(19) United States
(12) Patent Application Publication
(10) Pub. No.: US 2024/0309320 A1
(43) Pub. Date: Sep. 19, 2024

(54) METHODS FOR DIFFERENTIATING AND SCREENING STEM CELLS

(71) Applicants: THE BROAD INSTITUTE, INC., Cambridge, MA (US); MASSACHUSETTS INSTITUTE OF TECHNOLOGY, Cambridge, MA (US)

(72) Inventors: Feng Zhang, Cambridge, MA (US); Julia Joung, Cambridge, MA (US)

(21) Appl. No.: 18/576,909

(22) PCT Filed: Jul. 8, 2022
(86) PCT No.: PCT/US2022/073548

§ 371 Date: Jan. 5, 2024

Related U.S. Application Data
(60) Provisional application No. 63/219,705, filed on Jul. 8, 2021.
(60) Provisional application No. 63/313,842, filed on Feb. 25, 2022.

(51) Int. Cl. C12N 5/0793; A61K 35/30; C12Q 1/6809; C12Q 1/6881

(52) U.S. Cl. CPC C12N 5/0619; A61K 35/30; C12Q 1/6809; C12Q 1/6881; C12N 2510/00; C12Q 2600/158

(57) ABSTRACT

The subject matter disclosed herein is generally directed to methods of differentiating pluripotent cells into target cell types and screening platforms for systematically identifying transcription factors (TFs) that drive differentiation of pluripotent cells into target cell types. Also disclosed is a high-throughput multiplex screening platform. Also disclosed are in vitro models for neural progenitor cells and cardiomyocytes.

### CROSS-REFERENCE TO RELATED APPLICATIONS

[0001] This application claims the benefit of U.S. Provisional Application Nos. 63/219,705, filed Jul. 8, 2021 and 63/313,842, filed Feb. 25, 2022. The entire contents of the above-identified applications are hereby fully incorporated herein by reference.

### STATEMENT REGARDING FEDERALLY SPONSORED RESEARCH

[0002] This invention was made with government support under Grant Nos. MH117886, HG009761, MH110049, and HL141201 awarded by the National Institutes of Health. The government has certain rights in the invention.

### REFERENCE TO AN ELECTRONIC SEQUENCE LISTING

[0003] The contents of the electronic sequence listing (BROD-5420WP_ST26.xml”; Size is 23,452,824 (23.5 MB on disk) bytes and it was created on Jul. 8, 2022) is herein incorporated by reference in its entirety.

### TECHNICAL FIELD

[0004] The subject matter disclosed herein is generally directed to methods of differentiating stem cells into target cell types and screening platforms for systematically identifying transcription factors (TFs) that drive differentiation of stem cells into target cell types.

### BACKGROUND

[0005] Directed differentiation of human pluripotent stem cells into diverse cell types has the potential to realize a broad array of cellular replacement therapies and provides a tractable model that can be perturbed, genetically or chemically, to assess effects in a cell type-specific context¹⁻⁵. Despite the utility of cellular engineering, however, it remains challenging or impossible to generate many cell types¹⁻⁵. The best differentiation methods are often labor-intensive and can require months to produce even heterogenous or immature cell populations. Many of these methods rely on exogenous growth factors or small molecules, which are often dosage-sensitive and difficult to identify in a scalable manner. Alternatively, overexpression of transcription factors (TFs) has been shown to rapidly and efficiently generate many different cell types, including neurons and skeletal muscle cells⁶⁻¹². As TFs use endogenous regulatory pathways to drive differentiation, mimicking natural development, this approach to engineering cell fate may produce higher fidelity models while illuminating aspects of cellular development. However, the process of discovering TFs for directed differentiation relies on time-intensive and low-throughput arrayed screens. Arrayed screens, in which each perturbation must be performed and tested individually, are inherently limited in their scalability, typically 5-25 TFs⁶⁻¹². By contrast, pooled screening approaches, which make use of barcodes to enable multiple perturbations to be tested in parallel, are dramatically more scalable, both in terms of time and cost.

[0006] In vitro models of the human brain enable high-throughput genetic and chemical screens that can advance our understanding of complex neuro-developmental and -degenerative diseases. To simultaneously assess thousands of different perturbations and ensure unbiased results, such models should be homogenous, robust, and scalable. Current methods for generating models of the brain generally involve differentiating human embryonic stem cells (hESCs) into neural cells using exogenous factors or small molecules, a process that is labor-intensive, time-consuming, and produces non-homogeneous cell types (Douvaras P, et al., Efficient generation of myelinating oligodendrocytes from primary progressive multiple sclerosis patients by induced pluripotent stem cells. Stem Cell Reports. 2014; 3(2):250-9; Krencik R, et al., Specification of transplantable astroglial subtypes from human pluripotent stem cells. Nat Biotechnol. 2011; 29(6):528-34; Li X J, et al., Specification of motoneurons from human embryonic stem cells. Nat Biotechnol. 2005; 23(2):215-21; Perrier A L, et al., Derivation of midbrain dopamine neurons from human embryonic stem cells. Proc Natl Acad Sci USA. 2004; and Muffat J, et al., Efficient derivation of microglia-like cells from human pluripotent stem cells. Nat Med. 2016; 22(11):1358-67). Furthermore, many cell types in the brain cannot be derived from hESCs. Although methods exist for differentiating neural progenitors and some neuronal subtypes, none efficiently generate glial cells (astrocytes, oligodendrocytes, and microglia) that resemble their in vivo counterparts without transplantation (Douvaras P, et al., 2014, Krencik R, et al., 2011, and Muffat J, et al., 2016). Since glia have been shown to play critical roles in neural development and disease, including them in models is critical to the success of this approach for studying the brain (Chung W S, et al., Do glia drive synaptic and cognitive impairment in disease? Nat Neurosci. 2015; 18(11): 1539-45; and Hong S, Stevens B. Microglia: Phagocytosing to Clear, Sculpt, and Eliminate. Dev Cell. 2016; 38(2):126-8).

[0007] Thus, there is a need to develop an efficient method that can generate more complete in vitro models of the human brain. Additionally, there is a need for in vitro models of other cell types that can advance our understanding of development and disease.

### SUMMARY

[0008] In certain example embodiments, the present invention provides for screening platforms for systematically identifying transcription factors (TFs) that drive differentiation of pluripotent stem cells into target cell types. In certain example embodiments, the present invention provides for differentiation methods based on overexpression of TFs to generate specific cell types. Applicants provide examples of the screening methods to identify transcription factors that are capable of differentiating stem cells into all cell types, including neural progenitors/radial glia in the developing central nervous system that are capable of differentiating into neurons, astrocytes, and oligodendrocytes. In certain embodiments, the neural progenitors are referred to as induced neural progenitors (iNPs). Some, but not all, of the iNPs become radial glial cells. Thus, “neural progenitors” as used herein may be referred to as “induced neural progenitors” or “radial glia”. Applicants further identify TFs that are capable of differentiating stem cells into cardiomyocytes.

[0009] In one aspect, the present invention provides for a method of differentiating a pluripotent cell population to a target cell type of interest comprising overexpressing one or more transcription factors (TFs) from Table 1 or Table 3 in a pluripotent cell population, and selecting cells expressing one or more target cell markers. In certain embodiments, the target cell is a neural progenitor and selecting cells comprises selecting cells expressing one or more radial glial cell markers. In certain embodiments, the one or more transcription factors are selected from the group consisting of RFX4, NFIB, ASCL1, PAX6, EOMES, FOS, OTX1, NFIC, LHX2, FANCD2, NOTCH1, SMARCC1, ESR2, ESR1, MESP1, RCOR2, GLI3, NOTCH2, HELLS, BCL11A, HES1, FANCD2, SOX9, FEZF2, and TCF7L2 or TFs that are ranked in the top 10% of any screening method in Table 1 (e.g., RFX4, NFIB, ASCL1, PAX6, EOMES, FOS, OTX1, NFIC, LHX2, RCOR2, GLI3, NOTCH2, HELLS, BCL11A, HES1, FANCD2, SOX9, FEZF2, TCF7L2). In certain embodiments, the one or more transcription factors are RFX4, NFIB, ASCL1, PAX6, or a combination thereof. In preferred embodiments, RFX4 is overexpressed to produce the neural progenitors. In certain embodiments, the method further comprises producing RFX4 neural progenitor cells in media comprising dual SMAD inhibitors. In certain embodiments, the one or more radial glial cell markers are selected from Table 2. In certain embodiments, the one or more radial glial cell markers are selected from the group consisting of NES, VIM, SLC1A3, and PAX6. In certain embodiments, the method further comprises inducing differentiation of the neural progenitors into neurons, astrocytes and/or oligodendrocytes. In certain embodiments, differentiation comprises spontaneous differentiation of the neural progenitors. In certain embodiments, differentiation comprises directed differentiation of the neural progenitors.

[0010] In certain embodiments, selecting further comprises selecting cells enriched for expression of one or more gene signatures expressed in in vivo radial glia cells. The one or more gene signatures may be any in vivo gene signature known in the art (see, e.g., Pollen et al., Molecular identity of human outer radial glia during cortical development. Cell. 2015; 163(1):55-67). In certain embodiments, selecting cells enriched for expression of one or more gene signatures expressed in in vivo radial glia cells comprises identifying gene signatures for each TF by identifying differentially expressed genes between cells overexpressing a transcription factor and control cells; and selecting cells having a signature that is enriched in an in vivo radial glia cell type. Differentially expressed genes may be identified by comparing expression of genes in cells overexpressing a transcription factor and control cells overexpressing only the reporter gene (e.g., GFP). In certain embodiments, the signature may encompass the top differentially expressed genes (e.g., top 10, 100, 1000 or more most differentially expressed genes). In certain embodiments, the gene signatures are compared to in vivo cells and the gene signatures from cells having an overexpressed transcription factor that are most enriched in the in vivo cell types are selected.

[0011] In another aspect, the present invention provides for an isolated neural progenitor cell produced by the method of any embodiment herein. In certain embodiments, the present invention provides for a therapeutic composition comprising the isolated neural progenitor cell. In certain embodiments, the present invention provides for an ex vivo system comprising the isolated neural progenitor cell.

[0012] In another aspect, the present invention provides for a method of producing neurons, astrocytes and/or oligodendrocytes comprising expressing one or more transcription factors from Table 1 in the isolated neural progenitor cell of any embodiment herein and inducing spontaneous differentiation of the isolated neural progenitor cells. In another aspect, the present invention provides for a method of producing neurons, astrocytes and/or oligodendrocytes comprising expressing one or more transcription factors from Table 1 in the isolated neural progenitor cell of any embodiment herein and inducing directed differentiation of the isolated neural progenitor cells. In preferred embodiments, the neural progenitor cell was produced by overexpression of RFX4. In certain embodiments, the method further comprises differentiating RFX4 neural progenitor cells in media comprising dual SMAD inhibitors. In certain embodiments, the RFX4 neural progenitor cells are differentiated for 7 days. In certain embodiments, the RFX4 neural progenitor cells are differentiated into CNS cell types, radial glia, and neurons. In certain embodiments, the neurons are GABAergic neurons.

[0013] In another aspect, the present invention provides for an isolated neuron, astrocyte, or oligodendrocyte produced according to any method described herein. In certain embodiments, the present invention provides for a therapeutic composition comprising the isolated neuron, astrocyte, or oligodendrocyte. In certain embodiments, the present invention provides for an ex vivo system comprising the isolated neurons, astrocytes, and/or oligodendrocytes. In preferred embodiments, the neuron is a GABAergic neuron. In certain embodiments, the GABAergic neuron can be used in a model of autism, schizophrenia, epilepsy, dementia, Alzheimer's disease, or anxiety disorders (e.g., depression).

[0014] In another aspect, the present invention provides for a non-naturally occurring population of stem cells comprising a reporter gene integrated into an endogenous locus of each stem cell in the population, wherein the endogenous locus is associated with a marker gene for a cell type of interest; the reporter gene is under control of the promoter for the marker gene; and the reporter gene and marker gene are expressed as separate proteins, whereby the marker gene and reporter gene are co-expressed upon differentiation of the stem cells into the cell type of interest. The non-naturally occurring population of stem cells may further comprise a second reporter gene integrated into a second endogenous locus of the stem cell, wherein the locus is associated with a marker gene for a second cell type of interest, and wherein the second cell type of interest is more differentiated than the first cell type of interest. The reporter gene and marker gene (e.g., first and/or second) may be separated by a ribosomal skipping site. The ribosomal skipping site may be a P2A sequence. The reporter gene may be a fluorescent protein as described herein. The cell type of interest may be any differentiated cell (e.g., more differentiated than a stem cell, including but not limited to a progenitor cell). The cell type of interest may be a neural progenitor or mature neural cell type.

[0015] In certain embodiments, the cell type of interest is a radial glia cell. The marker gene may be selected from Table 2. The marker gene may be selected from the group consisting of NES, VIM, SLC1A3, and PAX6.

[0016] In certain embodiments, the cell type of interest is an astrocyte. The marker gene may be selected from the group consisting of ALDH1L1 and GFAP.

[0017] In another aspect, the present invention provides for a pooled transcription factor screening system comprising a transcription factor library comprising one or more vectors encoding a transcription factor and a barcode identifying said transcription factor; and a population of pluripotent cells. In certain embodiments, the transcription factors encoded by the vectors are selected from Table 1 and/or Table 3. In certain embodiments, the population of pluripotent cells are stem cells. In certain embodiments, the system further comprises one or more fluorescent probes configured for detecting one or more target cell marker gene transcripts (e.g., Flow-FISH probes).

[0018] In another aspect, the present invention provides for a method of screening for transcription factors capable of differentiating pluripotent cells into a cell type of interest comprising: a) introducing a transcription factor library comprising one or more vectors to a population of pluripotent cells, wherein each vector encodes: a transcription factor selected from Table 1 and/or Table 3 or an agent capable of modulating said transcription factor, and a barcode identifying each transcription factor; b) culturing the cells to allow differentiation of the cells (e.g., 2-10 days, or 2-7 days, or 5-7 days); c) selecting cells expressing one or more marker genes for the cell type of interest; and d) determining barcodes enriched in cells expressing the one or marker genes, thereby identifying transcription factors capable of differentiating pluripotent cells into a cell type of interest. In certain embodiments, the population of pluripotent cells is a population of human embryonic stem cells (hESCs). In certain embodiments, each transcription factor is inducible. In certain embodiments, the transcription factors selected are normally expressed by the cell type of interest.

[0019] In certain embodiments, selecting cells expressing one or more marker genes for the cell type of interest comprises Flow-FISH using probes targeting one or more marker genes. In certain embodiments, selecting cells expressing one or more marker genes for the cell type of interest comprises single cell RNA-seq. In certain embodiments, selecting cells further comprises comparing single cell RNA-seq expression profiles of cells overexpressing one or more of the transcription factors to those of cells overexpressing controls (e.g., green fluorescent protein) to infer pseudotime for each cell, wherein transcription factors that increased pseudotimes direct differentiation. In certain embodiments, selecting cells further comprises grouping one or more of the transcription factors in modules that alter expression of the same gene programs, wherein transcription factors in the same modules are co-functional.

[0020] In certain embodiments, the one or more populations of pluripotent cells are stem cells. In certain embodiments, selecting cells expressing one or marker genes for the cell type of interest comprises detecting the reporter gene. In certain embodiments, selecting cells comprises FACS.

[0021] In certain embodiments, determining barcodes comprises sequencing the DNA barcode or transcript comprising the barcode. In certain embodiments, determining barcodes comprises amplification of barcode sequences (e.g., PCR).

[0022] In certain embodiments, the method further comprises introducing the transcription factor library at a low cell density, such that the cells multiply into small colonies; and inducing expression of the transcription factors or agents encoded by the vectors. In certain embodiments, the method further comprises introducing the vector library at a low MOI, such that most cells receive no more than one vector. In certain embodiments, the method further comprises introducing the vector library at a high MOI, such that most cells receive one or more vectors.

[0023] In certain embodiments, the transcription factor library comprises viral vectors. In certain embodiments, the viral vectors are lentivirus, adenovirus or adeno associated virus (AAV) vectors.

[0024] In certain embodiments, the transcription factor library further encodes a protein tag in frame with the transcription factor coding sequence.

[0025] In certain embodiments, the population of stem cells expresses a CRISPR system and the transcription factor library comprises vectors encoding one or more CRISPR guide sequences targeting one of the transcription factors. In certain embodiments, the guide sequences comprise one or more aptamer sequences specific for binding an adaptor protein and the CRISPR system comprises an enzymatically inactive CRISPR enzyme and the adaptor protein comprises a functional domain. In certain embodiments, the CRISPR system comprises an enzymatically inactive CRISPR enzyme and a functional domain. In certain embodiments, the functional domain is a transcription activation or repression domain.

[0026] In certain embodiments, the transcription factor library comprises vectors encoding a shRNA for one of the transcription factors.

[0027] In certain embodiments, identifying transcription factors further comprises determining gene signatures for each identified TF, wherein the gene signature comprises differentially expressed genes between cells overexpressing each transcription factor and control cells; and selecting transcription factors inducing a gene signature that is enriched in an in vivo cell type.

[0028] In another aspect, the present invention provides for a method of producing cardiomyocytes comprising overexpressing a transcription factor selected from the group consisting of MESP1, EOMES and ESR1 in a pluripotent cell population, and selecting cells expressing one or more cardiomyocyte markers. In certain embodiments, the transcription factor is EOMES. In certain embodiments, the amino acid sequence of EOMES is SEQ ID NO: 10807 or SEQ ID NO: 10808. In certain embodiments, the transcription factor is induced for about 2 days. In certain embodiments, the transcription factor is induced when the cell density is about 500,000 cells/ml. In certain embodiments, the one or more cardiomyocyte markers comprises TNNT2. In certain embodiments, selecting further comprises selecting cells enriched for expression of one or more gene signatures expressed in in vivo cardiomyocytes.

[0029] In another aspect, the present invention provides for an isolated cardiomyocyte produced by the method according to any embodiment herein. In certain embodiments, the present invention provides for a therapeutic composition comprising the isolated cardiomyocyte. In certain embodiments, the present invention provides for an ex vivo system comprising the isolated cardiomyocyte.

[0030] In certain embodiments, the pluripotent cell according to any embodiment herein is an embryonic stem cell (ES) or induced pluripotent stem cell. In certain embodiments, the stem cell is a human embryonic stem cell (ES). In certain embodiments, the human embryonic stem cell is selected from the group consisting of HUES66, HUES64, HUES3, HUES8, HUES53, HUES28, HUES49, HUES9, HUES48, HUES45, HUES1, HUES44, HUES6, H1, HUES62, HUES65, H7, HUES13, H9, and HUES63. In certain embodiments, the stem cell is a human induced pluripotent stem cell (iPSC). In certain embodiments, the human iPSC is selected from the group consisting of 11a, PGP1, GM08330 (also known as GM8330-8), and Mito 210.

[0031] In another aspect, the present invention provides for a stem cell comprising an exogenous nucleotide sequence capable of inducible expression of one or more transcription factors selected from the group consisting of RFX4, NFIB, ASCL1 and PAX6.

[0032] In another aspect, the present invention provides for a stem cell comprising an exogenous nucleotide sequence capable of inducible expression of one or more transcription factors selected from the group consisting of MESP1, EOMES and ESR1.

[0033] In another aspect, the present invention provides for a method of predicting transcription factor combinations for differentiating a stem cell into a cell type of interest comprising determining the average gene expression of one or more genes for two or more stem cells each expressing a single transcription factor and comparing the average expression to a gene signature specific for the cell type of interest. In certain embodiments, the method further comprises differentiating a stem cell into the cell type of interest by expressing in the stem cell a double or triple combination of transcription factors whose average gene expression is most similar to a gene signature specific for the cell type of interest.

[0034] In another aspect, the present invention provides for a method of differentiating a stem cell into a cell type of interest comprising expressing in the stem cell a double or triple combination of transcription factors selected from the clusters in Table 19.

[0035] These and other aspects, objects, features, and advantages of the example embodiments can become apparent to those having ordinary skill in the art upon consideration of the following detailed description of illustrated example embodiments.

### BRIEF DESCRIPTION OF THE DRAWINGS

[0036] An understanding of the features and advantages of the present invention can be obtained by reference to the following detailed description that sets forth illustrative embodiments, in which the principles of the invention may be utilized, and the accompanying drawings of which:

[0037] FIG. 1—Targeted arrayed TF screen. (A), Screening schematic. (B), Expression of radial glia marker genes after ASCL1 overexpression. (C), Image of differentiated cells after 4 days of ASCL1 overexpression. Scale bar, 100 μm.

[0038] FIG. 2—Gene expression signature of differentiated radial glia. Heat map of Z-scores indicating enrichment of TF candidate gene expression signatures in each cell type in vivo.

[0039] FIG. 3—Immunostaining of radial glia differentiated from candidate TFs. (A), Immunostaining of radial glia markers (VIM and NES) after 12 days of TF overexpression. (B), Immunostaining of neurons (MAP2), astrocytes (GFAP), and oligodendrocytes (NG2) after 4 weeks of spontaneous differentiation from radial glia induced by candidate TF overexpression. Scale bar, 50 μm.

[0040] FIG. 4—Immunostaining of neurons and astrocytes differentiated from ASCL1. Immunostaining for markers identifying neurons (MAP2), astrocytes (GFAP), and oligodendrocyte precursors (NG2 and PDGFRA) at indicated time points after induction of the TF (7 days, 14 days, 28 days).

[0041] FIG. 5—Immunostaining of neurons and astrocytes differentiated from NFIB. Immunostaining for markers identifying neurons (MAP2), astrocytes (GFAP), and oligodendrocyte precursors (NG2 and PDGFRA) at indicated time points after induction of the TF (7 days, 14 days, 28 days).

[0042] FIG. 6—Immunostaining of neurons and astrocytes differentiated from PAX6. Immunostaining for markers identifying neurons (MAP2), astrocytes (GFAP), and oligodendrocyte precursors (NG2 and PDGFRA) at indicated time points after induction of the TF (7 days, 14 days, 28 days).

[0043] FIG. 7—Immunostaining of neurons and astrocytes differentiated from RFX4. Immunostaining for markers identifying neurons (MAP2), astrocytes (GFAP), and oligodendrocyte precursors (NG2 and PDGFRA) at indicated time points after induction of the TF (7 days, 14 days, 28 days).

[0044] FIG. 8—Pooled TF screen. (A), Screening schematic. (B), Heat map of Z-scores representing median enrichment of each TF from 3 screens of 90 transcription factors performed in different clonal cell lines.

[0045] FIG. 9—Scatter Plot. Results of pooled screening of 1,387 transcription factors.

[0046] FIG. 10—Genome-wide astrocyte differentiation screen. Screening schematic.

[0047] FIG. 11—Cardiomyocyte differentiation. Bar graph showing the percentage of TNNT2 positive cells after cardiomyocyte differentiation of human embryonic stem cells under different conditions for inducing expression of two isoforms of EOMES.

[0048] FIG. 12—Cardiomyocyte differentiation. Bar graph showing the percentage of TNNT2 positive cells after cardiomyocyte differentiation of human embryonic stem cells under different conditions for inducing expression of two isoforms of EOMES or a small molecule differentiation method.

[0049] FIG. 13—Development of a pooled TF screening platform for directed differentiation. (A) Schematic of pooled TF screening. Barcoded TF ORFs are pooled and packaged into lentivirus for delivery into hESCs. TFs that can differentiate hESCs into the cell type of interest are identified using a reporter cell line, flow-FISH, or single-cell RNA sequencing, followed by deep sequencing of TF barcodes. MOI, multiplicity of infection. (B) Scatterplot showing enrichment of candidate TFs identified by flow-FISH with pooled FISH probes targeting 2 or 10 NP marker genes from n=3 infection replicates. (C) Same as (B) highlighting different isoforms of candidate TFs. (D) Comparison of TFs that ranked in the top 10% from the 4 different screens.

[0050] FIG. 14—Validation of candidate TFs for iNP differentiation. (A) Expression of NP marker genes VIM and NES in iNPs produced by candidate TFs after 7 days of overexpression. Cell culture media used for each ORF is indicated in parentheses. Scale bar, 50 μm. (B) Heat map of bulk RNA sequencing (RNA-seq) signature correlation between iNPs and human fetal cortex cell types from the Pollen 2015 dataset²⁰. D7 and D12 indicate the number of days that the ORF was overexpressed. RG, radial glia; IPC, intermediate progenitor cell; N, neuron; IN, interneuron.

[0051] FIG. 15—Candidate TFs produce iNPs that can spontaneously differentiate into cell types in the central nervous system. (A) Schematic of spontaneous differentiation. Dox-inducible candidate TFs are transiently overexpressed for 1 week to differentiate hESCs into iNPs and spontaneously differentiated for 8 weeks by withdrawing dox and growth factors. Spontaneously differentiated cells were characterized by immunostaining and single-cell RNA sequencing. rtTA, reverse tetracycline-controlled transactivator; dox, doxycycline; EGF, epidermal growth factor; FGF, fetal growth factor. (B) Expression of marker genes for neurons (MAP2), astrocytes (GFAP), and oligodendrocyte precursor cells (PDGFRA) after 1, 2, 4, or 8 weeks of spontaneous differentiation for 4 candidate TFs. Scale bar, 100 μm.

[0052] FIG. 16—Single-cell RNA sequencing of spontaneously differentiated cells from iNPs demonstrates development of a broad range of cell types. (A)-(C), t-distributed stochastic neighbor embedding (tSNE) visualization of single-cell RNA sequencing data from cells that have been spontaneously differentiated from iNPs for 8 weeks. iNPs were derived using RFX4, NFIB, ASCL1, or PAX6. A total of 52,364 cells from n=2 bioreps per TF were analyzed. (A) Cells are grouped into 31 clusters, and cluster 5 is further divided into 3 subclusters. Colors indicate cell type or state. (B) Clusters that represent central nervous system (CNS) cell types are highlighted. Percentage of total cells that contribute to the specified CNS cell type is indicated. (C) Cells spontaneously differentiated from each candidate TF are highlighted. Colors indicate bioreps, S1 and S2. (D) Quantification of spontaneously differentiated cells. Left, percentage of cells from each biorep that were grouped into each cluster. Right, over all distribution of general cell types. RP, retinal progenitors; RPE, retinal pigment epithelium; RGC, retinal ganglion cells; PR, photoreceptors; DNP, dorsal neural progenitors; RG, radial glia; Astro, astrocytes; CN, cortical neurons; HB&SCN, hindbrain and spinal cord neurons; IN, interneurons; EPD&CPE, ependyma and choroid plexis epithelium; EP, epithelial progenitors; BE, bronchial epithelium; CE, cranial epithelium; NC, neural crest; CNC, cranial neural crest; Pro, uncommitted progenitors; (P), proliferative cells; (S), structural cell types such as bone and cartilage.

[0053] FIG. 17—Modeling neurodevelopmental disorders using RFX4-iNPs with DYRK1A perturbation. (A) Schematic of disease modeling by perturbing DYRK1A expression. hESCs are transduced with Cas9 and DYRK1A KO sgRNAs or DYRK1A ORF to knockout or overexpress DYRK1A respectively. RFX4 is then transiently overexpressed for 1 week to differentiate hESCs into iNPs and spontaneously differentiated for 8 weeks by withdrawing dox and growth factors. Effects of DYRK1A perturbation were characterized by bulk RNA sequencing, EdU labeling, and immunostaining. rtTA, reverse tetracycline-controlled transactivator; dox, doxycycline; EGF, epidermal growth factor; FGF, fetal growth factor. (B)-(C), Expression of DYRK1A at 7 days after transduction with Cas9 and DYRK1A KO sgRNAs (B) or DYRK1A ORF (C). (D) Heat map of genes that were significantly differentially expressed (T-test q-value<0.05 with FDR correction) depending on the dosage of DYRK1A. Genes are annotated with broad categories of gene function relevant to neural development. (E)-(F), Percentage of EdU labeled cells at 0, 2, or 4 weeks of spontaneous differentiation for DYRK1A knockout (E) or overexpression (F). Values represent mean±SEM from n=3 bioreps. 10,000 cells were analyzed per biorep. (G)-(H), Intensity of MAP2 staining for neurons at 0, 1, 2, 4, or 8 weeks of spontaneous differentiation for DYRK1A knockout (G) or overexpression (F). Values represent mean±SEM from n=2 bioreps with 6 images per biorep. KO, knockout; NT, non-targeting. ****P<0.0001; ***P<0.001; **P<0.01; *P<0.05. ns, not significant.

[0054] FIG. 18—Comparison of TF overexpression methods for neuronal differentiation. (A) Schematic of ORF and CRISPR-Cas9 activator comparison. hESCs are transduced with ORF, ORF with UTRs, or SAM CRISPR-Cas9 activator to overexpress NEUROD1 or NEUROG2 for directed differentiation into induced neurons. (B) Expression of NEUROD1 mRNA and protein after NEUROD1 overexpression from n=4 bioreps. (C) Expression of marker genes for neurons (MAP2) and NPs (PAX6) after NEUROD1 overexpression. (D) Expression of NEUROG2 mRNA after NEUROG2 overexpression from n=4 bioreps. (E) Expression of marker genes for neurons (MAP2) and NPs (PAX6) after NEUROG2 overexpression. (F) Intensity of MAP2 staining from n=6 images per condition. All values are mean±SEM. Scale bar, 100 μm. ****P<0.0001; ***P<0.001. ns=not significant. UTR, untranslated region; NT, nontargeting.

[0055] FIG. 19—Arrayed TF ORF screen for iNP differentiation. (A) 90 TF ORFs included in the library for the arrayed screen (Table 1). (B) Schematic for arrayed screening (e.g., wells). TF ORFs were individually synthesized, cloned, and packaged into lentivirus for delivery into hESCs. After 4 or 7 days of differentiation, expression of NP marker genes SLC1A3 and VIM were measured to identify candidate TFs. (C) Timeline for arrayed screening. mTeSR stem cell media was incrementally changed to NP media during differentiation, and expression of NP marker genes was measured after 4 and 7 days of differentiation. (D)-(G), Expression of VIM and SLCIA3 mRNA relative to control hESCs overexpressing GFP in NP media from n=3 infection replicates at 4 (D,E) or 7 (F,G) days of differentiation. Candidate TFs (D,F) and other isoforms of candidate TFs (E,G) are indicated.

[0056] FIG. 20—A pooled TF ORF screening platform for iNP differentiation. (A) Design of lentiviral vectors for expression of barcoded TFs. WPRE, Woodchuck Hepatitis Virus Posttranscriptional Regulatory Element. (B) Schematic of pooled TF screening with 3 different methods for selecting cell types of interest. For the reporter cell line method, reporter cell lines transduced with the TF library are differentiated and sorted into high or low marker gene-expressing cell populations. For the flow-FISH method, differentiated cells are labeled with FISH probes targeting 2-10 marker genes and sorted based on marker gene expression. For the single-cell RNA sequencing method, differentiated cells can be analyzed using single-cell RNA-seq. In all selection methods, sequencing of TF barcodes enables identification of candidate TFs. (C) FACS plots showing distribution of EGFP expression in SLC1A3 and VIM reporter cell lines with or without the TF library. High and low bins sorted for sequencing of TF barcodes are indicated. (D)-(E), Enrichment of candidate TFs (D) or other isoforms of candidate TFs (D) in the high EGFP-expressing bin relative to the low bin from n=3 infection replicates per reporter cell line. (F) Representative FACS plot showing expression of RPL13A control or SLC1A3 and VIM mRNA labeled by FISH probes from n=3 infection replicates. High and low bins sorted for sequencing of TF barcodes are indicated. (G) Same as (F), showing expression of 10 marker gene mRNA labeled by FISH probes. (H) Comparison of candidate TF enrichment in screens using reporter cell lines and flow-FISH.

[0057] FIG. 21—Selection of candidate TFs using single-cell RNA sequencing. (A) Number of cells analyzed using single-cell RNA sequencing (RNA-seq) for each TF isoform out of 59,640 cells. (B) t-distributed stochastic neighbor embedding (tSNE) clustering of single-cell RNA-seq data from hESCs transduced with the TF library. Cells grouped into 18 clusters. (C) Same as (B) highlighting cells expressing a TF of interest. (D) Candidate TFs identified using single-cell RNA-seq. Top, correlations between TF transcriptome signatures and radial glia from human fetal cortex or brain organoid datasets^{20,25,26}. Values represent mean correlation of cells expressing each TF as z-scores. Dashed line indicates cutoff for identifying candidate TFs. Bottom, heat map indicating percentage of cells overexpressing each TF isoform that was grouped into a particular cluster. Candidate TFs selected using single-cell RNA-seq are indicated in blue.

[0058] FIG. 22—Validation of candidate TFs for iNP differentiation. (A) Expression of candidate TFs measured using the V5 epitope tag after 7 days of differentiation. (B) Expression of NP marker genes PAX6 and NES in iNPs produced by candidate TFs after 7 days of overexpression. Cell culture media used for each ORF is indicated in parentheses. Scale bar, 50 μm. (C)-(D), Heat map of bulk RNA sequencing (RNA-seq) signature correlation between iNPs and human fetal brain cell types from the Nowakowski 2017 dataset²⁶ (C) or human brain organoids from the Quadrato 2017 dataset²⁵ (D). D7 and D12 indicate whether the ORF was overexpressed for 7 or 12 days, respectively. RG, radial glia; div, dividing; oRG, outer radial glia; tRG, truncated radial glia; vRG, ventricular radial glia; MGE, medial ganglionic eminence; IPC, intermediate progenitor cell; nEN, newborn excitatory neurons, EN, excitatory neurons; PFC, prefrontal cortex; V1, primary visual cortex; nIN, newborn interneurons; IN, interneurons; CTX, cortex; CGE, cortical ganglionic eminence; STR, striatum; OPC, oligodendrocyte precursor cells; Glyc, cells expressing glycolysis genes; Pro, proliferating progenitors; NE, neuroepithelium; DN, dopaminergic neurons; CLN, callosal neurons; CFN, corticofugal neurons; Meso, mesodermal progenitors.

[0059] FIG. 23—Characterization of spontaneously differentiated cells produced by candidate TFs in HUES66. Expression of marker genes for neurons (MAP2), astrocytes (GFAP), and oligodendrocyte precursor cells (NG2) after 1, 2, 4, or 8 weeks of spontaneous differentiation for 4 candidate TFs. Scale bar, 100 μm.

[0060] FIG. 24—Characterization of iNPs and spontaneously differentiated cells produced by candidate TFs in iPSC11a and H1 pluripotent stem cell lines. (A)-(B), Expression of NP marker genes in iPSC11a iNPs (A) or H1 iNPs (B) after 1 week of TF overexpression. (C)-(D), Expression of marker genes for neurons (MAP2), astrocytes (GFAP), and oligodendrocyte precursor cells (NG2 and PDGFRA) in cells spontaneously differentiated from iPSC11a iNPs (C) or H1 iNPs (D) for 8 weeks. Scale bar, 100 μm.

[0061] FIG. 25—Single-cell RNA sequencing profiling of spontaneously differentiated cells produced by candidate TFs. (A) Heat map showing the z-score of the mean log-transformed, normalized counts for each cluster of selected marker genes used to annotate clusters. For a more extensive set of genes, see Table 8. RP, retinal progenitors; RPE, retinal pigment epithelium; RGC, retinal ganglion cells; PR, photoreceptors; DNP, dorsal neural progenitors; RG, radial glia; Astro, astrocytes; CN, cortical neurons; HB&SCN, hindbrain and spinal cord neurons; IN, interneurons; EPD&CPE, ependyma and choroid plexis epithelium; EP, epithelial progenitors; BE, bronchial epithelium; CE, cranial epithelium; NC, neural crest; CNC, cranial neural crest; Pro, uncommitted progenitors; (P), proliferative cells; (S), structural cell types such as bone and cartilage. (B) Distribution of cell types generated in human brain organoids at 6 months from the Quadrato 2017 dataset²⁵.

[0062] FIG. 26—ChIP-seq analysis of candidate TFs. (A) Top 3 de novo or known motifs identified using HOMER motif analysis. The names of the TFs with the closest matching motifs, indicating potential cofactors of candidate TFs, are listed. The percentages of ChIP peaks that contained each motif relative to the background, and the associated P-values of enrichment, are also listed. (B)-(C), Example NP marker gene loci with significant ChIP peaks from all 4 candidate TFs for HES1 (B) and BMPR1B (C). (D) Heat map showing percentage of NP-specific TFs or genes that had candidate TF ChIP peaks within 10 kb of the annotated transcriptional start site (TSS). (E) Overlap of NP-specific genes that had candidate TF ChIP peaks within 10 kb of the TSS and were differentially expressed (t-test q-value<0.05 with FDR correction) upon candidate TF overexpression. Blue regions indicate overlap.

[0063] FIG. 27—DYRK1A perturbation in RFX4-iNPs to model neurological disorders. (A) Percent indel in RFX4-derived iNPs transduced with DYRK1A KO sgRNAs. Values represent mean±SEM from n=3 bioreps. (B) DYRK1A mRNA expression measured using qPCR probes targeting the endogenous sequence or the codon-optimized ORF sequence. Values represent mean±SEM from n=4 bioreps with 4 technical replicates per biorep. *P<0.05; ND, not detected. (C) Venn diagram showing the number of genes that were significantly differentially expressed (t-test q-value<0.05 with FDR correction) and had an absolute log 2 fold change relative to control that was greater than 1. The KO sgRNAs 1 and 2 conditions were compared to both NT sgRNAs 1 and 2 controls. The ORF condition was compared to GFP control. (D)-(F) Volcano plots showing the number of genes that were significantly differentially expressed (t-test q-value<0.05 with FDR correction) and had an absolute log 2 fold change relative to control that was greater than 1 for DYRK1A KO sgRNA 1 (D), KO sgRNA 2 (E), and ORF (F) conditions. For a full list of genes, see Table 9. (G) Representative images of MAP2 staining during spontaneous differentiation for NT sgRNA 1 and DYRK1A KO sgRNA 2. Scale bar, 100 μm. KO, knockout; NT, non-targeting.

[0064] FIG. 28—A barcoded human TF library for directed differentiation. Schematic showing how the TF library can be used to produce differentiated cell types for cellular models and therapies. Puro, puromycin. WPRE, Woodchuck Hepatitis Virus Posttranscriptional Regulatory Element. MOI, multiplicity of infection.

[0065] FIG. 29—Development of a multiplexed TF screening platform for directed differentiation. (A) Schematic of multiplexed TF screening. Barcoded TF ORFs are pooled and packaged into lentivirus for delivery into hESCs. TFs that can differentiate hESCs into the cell type of interest are identified using reporter cell line, flow-FISH, or single-cell RNA sequencing (scRNA-seq), followed by deep sequencing of TF barcodes. MOI, multiplicity of infection. (B) Scatterplot showing median enrichment of candidate TFs identified using SLC1A3 or VIM reporter cell lines from n=3 infection replicates. (C) Scatterplot showing average enrichment of candidate TFs identified by flow-FISH with pooled FISH probes targeting 2 or 10 NP marker genes from n=3 infection replicates. (D) Uniform manifold approximation and projection (UMAP) clustering of scRNA-seq data from 53,560 hESCs transduced with the TF library. (E) Heatmap indicating correlations between TF transcriptome signatures and radial glia from human fetal cortex or brain organoid datasets. Values represent mean correlation of cells overexpressing each TF as z-scores. (F) Comparison of TFs that ranked in the top 10% from the 4 different screens.

[0066] FIG. 30—Validation of candidate TFs driving iNP differentiation. Top, expression of NP marker genes VIM and NES in iNPs produced by candidate TFs after 7 days of overexpression. Cell culture media used for each ORF is indicated in parentheses. Scale bar, 50 μm. Bottom, heat map of bulk RNA sequencing (RNA-seq) signature correlation between iNPs and human fetal cortex cell types from the Pollen 2015 dataset (Pollen et al., 2015). D7 and D12 indicate the number of days that the ORF was overexpressed. RG, radial glia; IPC, intermediate progenitor cell; N, neuron; IN, interneuron.

[0067] FIG. 31—Candidate TFs produce iNPs that can spontaneously differentiate into cell types in the central nervous system. (A) Schematic of spontaneous differentiation. Dox-inducible candidate TFs are transiently overexpressed for 1 week to differentiate hESCs into iNPs, which then spontaneously differentiate for 8 weeks following withdrawal of dox and growth factors. Spontaneously differentiated cells were characterized by immunostaining and single-cell RNA sequencing. rtTA, reverse tetracycline-controlled transactivator; dox, doxycycline; EGF, epidermal growth factor; FGF, fetal growth factor. (B) Expression of marker genes for neurons (MAP2), astrocytes (GFAP), and oligodendrocyte precursor cells (PDGFRA) after 1, 2, 4, or 8 weeks of spontaneous differentiation for 4 candidate TFs. Scale bar, 100 μm.

[0068] FIG. 32—Single-cell RNA sequencing of spontaneously differentiated cells from iNPs reveals a broad array of cell types. (A) UMAP clustering of scRNA-seq data from 53,113 cells that have been spontaneously differentiated from iNPs for 8 weeks. iNPs were derived using RFX4, NFIB, ASCL1, or PAX6 with n=2 biological replicates per TF. Colors indicate cell type or state. (B) Data as in (A), with clusters representing central nervous system (CNS) cell types highlighted. Percentage of total cells that contribute to the specified CNS cell type is indicated. (C) Dot plot showing marker genes for each cluster. Circle size indicates percentage of cells expressing the gene in the given cluster and color indicates the mean gene expression value. Horizontal lines distinguish between retinal, CNS, epithelial, and CNC cell types. (D) Cells spontaneously differentiated from each candidate TF are highlighted. Colors indicate biological replicates, S1 and S2. (E) Heatmap showing the percentage of cells from each biological replicate that were grouped into each cluster. (F) Distribution of general cell types produced by each biological replicate. Pro, uncommitted progenitors; RP, retinal progenitors; RPE, retinal pigment epithelium; PR, photoreceptors; RGC, retinal ganglion cells; DNP, dorsal neural progenitors; RG, radial glia; Astro, astrocytes; CN, CNS neurons; EPD, ependyma; EP, epithelial progenitors; BE, bronchial epithelium; CE, cranial epithelium; CNC, cranial neural crest; CNCP, cranial neural crest progenitors; (P), proliferative cells.

[0069] FIG. 33—Combining RFX4 with dual SMAD inhibition produces homogenous NPs that generate predominantly GABAergic neurons. (A) UMAP clustering of scRNA-seq data from iNPs derived using different iNP differentiation methods. RFX4-DS-iNPs were produced by combining RFX4 overexpression with dual SMAD inhibition, EB-iNPs were produced using the embryoid body protocol (Schafer et al., 2019), and DS-iNPs were produced using the dual SMAD inhibition protocol (Shi et al., 2012a). Data represents n=2 batch replicates per method with 15,211 RFX4-DS-iNPs, 11,148 EB-iNPs, and 16,421 DS-iNPs. Colors indicate cell type or state. (B) Dot plot showing marker genes for each cluster. Circle size indicates percentage of cells expressing the gene in the given cluster and color indicates the mean expression value. (C) Box plots showing distributions of Euclidean distances between cells within the same batch replicate. Whiskers indicate the 5^{th} and 95^{th} percentiles. (D) Same as (C), for cells between different batch replicates. (E) Data as in (A), highlighting cells derived from each differentiation method. Colors indicate batch replicates, S1 and S2. (F) Heatmap showing the percentage of cells from each batch replicate that were grouped into each cluster. (G) Data as in (A), colored by marker gene expression. (H) UMAP clustering of scRNA-seq data from 26,111 cells that have been spontaneously differentiated from iNPs. iNPs were produced by combining RFX4 overexpression with dual SMAD inhibition and spontaneously differentiated for 4 or 8 weeks. Data represents n=2 biological replicates per timepoint. Colors indicate cell type or state. (I) Dot plot showing marker genes for each cluster. Circle size indicates percentage of cells expressing the gene in the given cluster and color indicates the mean expression value. (J) Data as in (H), colored by marker gene expression. (K) Cells from each time point are highlighted. Colors indicate biological replicates, S1 and S2. (L) Heatmap showing the percentage of cells from each biological replicate that were grouped into each cluster. (M) Distribution of general cell types produced by each biological replicate. NP, neural progenitors; CN, CNS neurons; CNC, cranial neural crest; RG, radial glia; MNG, meninges; P, proliferative cells.

[0070] FIG. 34—Modeling neurodevelopmental disorders using RFX4-iNPs with DYRK1A perturbation. (A) Schematic of disease modeling by perturbing DYRK1A expression. Human induced pluripotent stem cells (iPSCs) are transduced with Cas9 and sgRNAs or ORF to knockout or overexpress DYRK1A, respectively. RFX4 is then transiently overexpressed for 1 week to differentiate iPSCs into iNPs, which then spontaneously differentiate for 8 weeks following withdrawal of dox and growth factors. Effects of DYRK1A perturbation were characterized using bulk RNA sequencing, EdU labeling, immunostaining, or electrophysiology. rtTA, reverse tetracycline-controlled transactivator; dox, doxycycline; EGF, epidermal growth factor; FGF, fetal growth factor. (B-D) Volcano plots showing the number of genes that were significantly differentially expressed (t-test q-value<0.05 with FDR correction) and had an absolute log 2 fold change relative to control that was greater than 1 for DYRK1A KO sgRNA 1 (B), KO sgRNA 2 (C), and ORF (D) conditions. For a full list of genes, see Table S3. The KO sgRNAs 1 and 2 conditions were compared to both NT sgRNAs. The ORF condition was compared to GFP control. (E) Venn diagram summarizing the significantly differentially expressed genes in (B-D). (F) Heatmap of genes that were significantly differentially expressed (T-test q-value<0.05 with FDR correction) depending on the dosage of DYRK1A. Genes are annotated with broad categories of gene function relevant to neural development. Average gene expression measurements across n=3 biological replicates are shown. (G-H) Percentage of EdU labeled cells at 0, 2, or 4 weeks of spontaneous differentiation for DYRK1A knockout (G) or overexpression (H). Values represent mean±SEM from n=3 biological replicates. 10,000 cells were analyzed per biological replicate. (I-J) Intensity of MAP2 staining for neurons at 0, 1, 2, 4, or 8 weeks of spontaneous differentiation for DYRK1A knockout (I) or overexpression (J). Values represent mean±SEM from n=2 biological replicates with 6 images per biological replicate. KO, knockout; NT, non-targeting. ****P<0.0001; ***P<0.001; **P<0.01; *P<0.05. ns, not significant.

[0071] FIG. 35—Comparison of TF overexpression methods for neuronal differentiation. (A) Schematic of ORF and CRISPR-Cas9 activator comparison. hESCs are transduced with ORF, ORF with UTRs, or SAM CRISPR-Cas9 activator to overexpress NEUROD1 or NEUROG2 for directed differentiation into induced neurons. (B) Expression of NEUROD1 mRNA and protein after NEUROD1 overexpression from n=4 biological replicates. (C) Expression of marker genes for neurons (MAP2) and NPs (PAX6) after NEUROD1 overexpression. (D) Expression of NEUROG2 mRNA after NEUROG2 overexpression from n=4 biological replicates. (E) Expression of marker genes for neurons (MAP2) and NPs (PAX6) after NEUROG2 overexpression. (F) Intensity of MAP2 staining from n=6 images per condition. All values are mean±SEM. Scale bar, 100 μm. ****P<0.0001; ***P<0.001. ns=not significant. UTR, untranslated region; NT, nontargeting.

[0072] FIG. 36—A multiplexed TF ORF screening platform for iNP differentiation. (A) Timeline for screening. mTeSR stem cell media was incrementally changed to NP media during differentiation, and cells were harvested after 7 days of differentiation. (B) FACS histograms showing distribution of EGFP expression in SLC1A3 and VIM reporter cell lines with or without the TF library. High and low bins sorted for sequencing of TF barcodes are indicated. (C) Scatterplot showing enrichment of alternative isoforms of candidate TFs identified using SLC1A3 or VIM reporter cell lines from n=3 infection replicates. (D) Representative FACS plot showing expression of RPL13A control or SLC1A3 and VIM mRNA labeled by FISH probes from n=3 infection replicates. High and low bins sorted for sequencing of TF barcodes are indicated. (E) Same as (D), showing expression of 10 marker gene mRNA labeled by FISH probes. (F) Scatterplot showing enrichment of alternative isoforms of candidate TFs identified by flow-FISH with pooled FISH probes targeting 2 or 10 NP marker genes from n=3 infection replicates. (G) Comparison of candidate TF enrichment in screens using reporter cell lines and flow-FISH. (H) Number of cells analyzed using single-cell RNA sequencing (RNA-seq) that were assigned to each TF isoform out of 53,560 cells. (I) Uniform manifold approximation and projection (UMAP) clustering of single-cell RNA-seq data from hESCs transduced with the TF library. Cells expressing TFs of interest are highlighted. (J) Z-score of median Euclidean distances between cells expressing a TF and the rest of the cells. Distances were calculated using 939 highly variable genes. (K) Heatmap showing relative marker gene expression of cell types from the mouse organogenesis cell atlas (Cao Nature 2019) in cells overexpressing each TF isoform. The top 30 marker genes for each cell type were used to determine marker gene enrichment as z-scores. Candidate TFs selected using single-cell RNA-seq are indicated in blue.

[0073] FIG. 37—Validation of candidate TFs identified by pooled screens for iNP differentiation. (A) Schematic for arrayed screening. TF ORFs were individually synthesized, cloned, and packaged into lentivirus for delivery into hESCs. After 7 days of differentiation, expression of NP marker genes SLC1A3 and VIM was measured to identify candidate TFs. (B-C) Expression of VIM and SLC1A3 mRNA relative to control hESCs overexpressing GFP in NP media from n=3 infection replicates. Candidate TFs (B) and alternative isoforms of candidate TFs (C) are indicated. (D) Western blot showing expression of candidate TFs measured using the V5 epitope tag after 7 days of differentiation. (E) Top, expression of NP marker genes PAX6 and NES in iNPs produced by candidate TFs after 7 days of overexpression. Cell culture media used for each ORF is indicated in parentheses. Scale bar, 50 μm. Middle and bottom, Heatmaps of bulk RNA sequencing (RNA-seq) signature correlation between iNPs and human fetal brain cell types from the Nowakowski 2017 dataset (middle) or human brain organoids from the Quadrato 2017 dataset (bottom). D7 and D12 indicate whether the ORF was overexpressed for 7 or 12 days, respectively. RG, radial glia; div, dividing; oRG, outer radial glia; tRG, truncated radial glia; vRG, ventricular radial glia; MGE, medial ganglionic eminence; IPC, intermediate progenitor cell; nEN, newborn excitatory neurons, EN, excitatory neurons; PFC, prefrontal cortex; V1, primary visual cortex; nIN, newborn interneurons; IN, interneurons; CTX, cortex; CGE, cortical ganglionic eminence; STR, striatum; OPC, oligodendrocyte precursor cells; Glyc, cells expressing glycolysis genes; Pro, proliferating progenitors; NE, neuroepithelium; DN, dopaminergic neurons; CLN, callosal neurons; CFN, corticofugal neurons; Meso, mesodermal progenitors.

[0074] FIG. 38—Characterization of iNPs and spontaneously differentiated cells produced by candidate TFs in different stem cell lines. (A) Expression of marker genes for neurons (MAP2), astrocytes (GFAP), and oligodendrocyte precursor cells (NG2) in cells spontaneously differentiated for 1, 2, 4, or 8 weeks from HUES66 iNPs produced by 4 candidate TFs. (B-C) Expression of NP marker genes in iPSC11a iNPs (B) or H1 iNPs (C) after 1 week of TF overexpression. (D-E) Expression of marker genes for neurons (MAP2), astrocytes (GFAP), and oligodendrocyte precursor cells (NG2 and PDGFRA) in cells spontaneously differentiated from iPSC11a iNPs (D) or H1 iNPs (E) for 8 weeks. Scale bar, 100 μm.

[0075] FIG. 39—Profiling spontaneously differentiated neurons from iNPs by single-cell RNA sequencing and target genes of candidate TFs by ChIP-seq. (A-E) UMAP clustering of single-cell RNA-seq data from 4,162 neurons that have been spontaneously differentiated from iNPs for 8 weeks. iNPs were derived using RFX4, NFIB, ASCL1, or PAX6 with n=2 biological replicates per TF. (A-D) or biological replicates (E). (A-D) Marker genes for general regions of the central nervous systems (A), newborn cortical excitatory neurons (B), neuronal subtypes (C), and cortical projection neurons (D) are shown. Colors indicate gene expression. (E) Neurons spontaneously differentiated from each candidate TF are highlighted. Colors indicate biological replicates, S1 and S2. (F) Top 3 de novo or known motifs identified using HOMER motif analysis. The names of the TFs with the closest matching motifs, indicating potential cofactors of candidate TFs, and the associated P-values of enrichment are listed. G, Heatmap showing percentage of NP-specific TFs or genes that had candidate TF ChIP peaks within 10 kb of the annotated transcriptional start site (TSS). (H-I) Overlap of NP-specific genes that had candidate TF ChIP peaks within 10 kb of the TSS and were differentially expressed (t-test q-value<0.05 with FDR correction) upon candidate TF overexpression. Genes that were shared between candidate TFs are shown in (H), with blue regions indicating overlap, and genes unique to each candidate TF are shown in (I).

[0076] FIG. 40—Characterization of iNPs produced by combining RFX4 with dual SMAD inhibition. (A) Schematic for different media conditions (M1-M8) tested. SMAD inhibitors dorsomorphin (DM) and SB-431542 (SB) were added to the media at the indicated concentrations. mTeSR stem cell media was changed to different NP media (NP, EB, and DS; see Methods) over 7 days of differentiation. (B) Heatmaps showing expression of neuron marker genes TUJ1 and MAP2 relative to GAPDH control in cells from iNPs that have undergone spontaneous neurogenesis for 2 or 4 weeks. iNPs were differentiated for 5 or 7 days using each of the media conditions in (A) and seeded at low or high densities prior to spontaneous neurogenesis. Colors represent mean expression from n=4 biological replicates. (C) Same as (A), for additional media conditions tested. (D) Same as (B), for the media conditions shown in (C). (E) UMAP clustering of scRNA-seq data from iNPs derived using different iNP differentiation methods. Marker genes for the telencephalon are shown. Data represents n=2 batch replicates per method with 15,211 RFX4-DS-iNPs, 11,148 EB-iNPs, and 16,421 DS-iNPs. Colors indicate gene expression. (F) Expression of NP marker genes NES and FOXG1 in iNPs produced by different NP differentiation methods. RFX4-DS-iNPs were produced by combining RFX4 overexpression with dual SMAD inhibition, EB-iNPs were produced using the embryoid body protocol (Schafer et al., 2019), and DS-iNPs were produced using the dual SMAD inhibition protocol (Shi et al., 2012a). Scale bar, 50 μm. (G-J) UMAP clustering of single-cell RNA-seq data from 26,111 cells that have been spontaneously differentiated from iNPs. iNPs were produced by combining RFX4 overexpression with dual SMAD inhibition and spontaneously differentiated for 4 or 8 weeks. Data represents n=2 biological replicates per timepoint. Marker genes for general regions of the central nervous systems (G), radial glia subtypes (H), neuronal subtypes (I), and GABAergic interneuron subtypes (J) are shown. Colors indicate gene expression.

[0077] FIG. 41—Perturbations of DYRK1A in RFX4-iNPs for modeling neurological disorders. (A) Percent indels in RFX4-iNPs transduced with DYRK1A KO sgRNAs. Values represent mean±SEM from n=3 biological replicates. (B) DYRK1A mRNA expression measured using qPCR probes targeting the endogenous sequence or the codon-optimized ORF sequence. Values represent mean±SEM from n=4 biological replicates with 4 technical replicates per biological replicate. ND, not detected. (C-D) Western blot of DYRK1A at 7 days after transduction with Cas9 and DYRK1A KO sgRNAs (C) or DYRK1A ORF (D). (E) Representative images of MAP2 staining during spontaneous differentiation for NT sgRNA 1 and DYRK1A KO sgRNA 2. Scale bar, 100 μm. (F) Representative electrophysiology traces for neurons with or without evoked action potentials (AP) and spontaneous excitatory postsynaptic currents (EPSCs). (G) Proportion of neurons with or without AP and EPSCs for different DYRK1A perturbations from n=31-45 neurons. (H-I) Intrinsic membrane (H) and action potential (I) properties measured using electrophysiology for different DYRK1A perturbations from n=12-36 neurons with evoked action potentials. Mean±SEM indicated on graph. *P<0.05.

[0078] FIG. 42—Building a TF Atlas of directed differentiation. (A) Schematic of TF Atlas setup. All 3,550 barcoded TF ORFs from the MORF library were packaged into lentivirus for delivery into human embryonic stem cells (hESCs) at a low multiplicity of infection (MOI). After 7 days of TF ORF overexpression, cells were profiled using single-cell RNA sequencing (scRNA-seq) to map TF ORFs to expression changes. (B-D) Uniform manifold approximation and projection (UMAP) of scRNA-seq data from 671,453 cells overexpressing 3,266 TF isoforms. Colors indicate Louvain clusters (B), gene expression (C), and diffusion pseudotime (D). (E) Smoothened heat map of the top 1,000 upregulated and downregulated genes over diffusion pseudotime. Gene expression in each row is represented as z-scores. Genes are ordered based on the slope of expression change over pseudotime fitted using linear regression. (F-G) Most enriched pathways among the top 100 upregulated (F) and downregulated (G) genes. (H) Heat map showing significance of the difference between assigned pseudotimes of cells expressing each TF isoform and those expressing controls. TF isoforms are grouped by gene. Only 320 TF genes with multiple isoforms, at least one of which induces a significantly different pseudotime than control, are included.

[0079] FIG. 43—Unbiased grouping of TFs based on gene programs. (A) Heat maps showing pairwise Pearson correlation (top) and enrichment of 100 gene programs (bottom) identified using non-negative matrix factorization (NMF) on mean expression profiles of 3,266 TF ORFs. TFs are ordered by hierarchical clustering. Each TF ORF is annotated by TF family and average diffusion pseudotime relative to control. Some TF groups are labeled and annotated based on known relationships. Numbers in parentheses indicate the number of TF isoforms that were found in the same group. (B-C) Zoomed in subsets of (A) with top enriched pathway annotated for each gene program. (D) UMAP of scRNA-seq data highlighting enrichment of each gene program.

[0080] FIG. 44—Mapping TF ORFs in differentiated cells to reference cell types. (A-B) UMAP of scRNA-seq data from 28,825 differentiated cells. Cells from clusters 6-8 of the TF Atlas shown in FIG. 42B were reclustered for further characterization. Colors indicate Louvain clusters (A) and nominated cell type from the human fetal cell atlas (Cao Science 2020) (B). Cell type matches with score >0.3 are highlighted. (C-D) Heat maps showing percentage of cells with the indicated TF ORF that were assigned to each cluster (C) or nominated cell type (D). Numbers after TF gene names indicate the isoform. Percentages are determined by normalizing to the total number of cells overexpressing the indicated TF in the entire TF Atlas. Only the 5 most enriched TF ORFs that are greater than 5% are shown. EMT, epithelial-mesenchymal transition; ENS, enteric nervous system.

[0081] FIG. 45—Validation of candidate TFs for differentiation towards nominated cell types. (A) Expression of marker genes for each nominated cell type in H1 hESCs after 7 days of candidate TF or GFP overexpression. Numbers after TF gene names indicate the isoform. n=4. (B-C) Scatterplot comparing expression of 205 marker genes in H1 hESCs to H9 hESCs (B) or 11a iPSCs (C). Expression is measured as average fold change in cells overexpressing candidate TF relative to GFP. (D-K) Left, expression of marker genes in H1 hESCs after 7 days of candidate TF overexpression. Right, intensity of marker gene staining from n=6 images per condition. Mean intensity per cell is normalized to cells overexpressing the GFP control. Scale bar, 25 μm. Marker genes for neuron (D), EMT smooth muscle (E), endothelial (F), smooth muscle (G), metanephric (H), intestinal epithelial (I), lung ciliated epithelial (J), and trophoblast (K) cells are shown. EMT, epithelial-mesenchymal transition. Values represent mean±SEM. ****P<0.0001; ***P<0.001; **P<0.01; *P<0.05.

[0082] FIG. 46—Targeted TF overexpression screening platform for directed differentiation. (A) Schematic of targeted TF screening. A subset of TFs are pooled from the MORF library and packaged into lentivirus for delivery into hESCs. TFs that can differentiate hESCs into the cell type of interest are identified using reporter cell line, flow-FISH, or scRNA-seq, followed by deep sequencing of TF barcodes. MOI, multiplicity of infection. (B) Comparison of TFs that ranked in the top 10% from the 4 different screens for induced neural progenitor (iNP) differentiation. (C) Expression of markers for neurons (MAP2), astrocytes (GFAP), and oligodendrocyte precursor cells (PDGFRA) after 1, 2, 4, or 8 weeks of spontaneous differentiation from RFX4-iNPs. Scale bar, 100 μm. (D-F) ScRNA-seq data from 26,111 cells that have been spontaneously differentiated from iNPs for 4 or 8 weeks. iNPs were produced by RFX4-DS-iNPs. Data represents n=2 biological replicates per timepoint. NP, neural progenitors; CN, CNS neurons; CNC, cranial neural crest; RG, radial glia; MNG, meninges; (P), proliferative cells. (D) UMAP clustering results with colors indicating Louvain clusters. (E) Dot plot showing marker genes for each cluster. Circle size indicates percentage of cells expressing the gene in the given cluster and color indicates the mean expression value. (F) Distribution of general cell types produced by each biological replicate. (G-J) Disease modeling by knocking out or overexpressing DYRK1A in human induced pluripotent stem cells (iPSCs) and differentiating into neural progenitors using RFX4. (G-H) Percentage of EdU labeled cells at 0, 2, or 4 weeks of spontaneous differentiation for DYRK1A knockout (G) or overexpression (H). n=3 biological replicates. (I-J) Intensity of MAP2 staining for neurons at 0, 1, 2, 4, or 8 weeks of spontaneous differentiation for DYRK1A knockout (I) or overexpression (J). n=12 images. Values represent mean±SEM. KO, knockout; NT, non-targeting; sg, single guide RNA. ****P<0.0001; ***P<0.001; **P<0.01; *P<0.05; ns, not significant.

[0083] FIG. 47—Regulatory networks by joint profiling of chromatin accessibility and gene expression under TF overexpression. (A) Weighted nearest neighbor (WNN) UMAP of joint chromatin accessibility and gene expression measured by scATAC- and scRNA-seq, respectively, from 69,085 cells overexpressing 198 TF isoforms for 4 or 7 days. Colors indicate clusters identified by the smart local moving (SLM) algorithm. (B) Dot plot showing marker genes for each cluster. Color indicates the expression and circle size indicates chromatin accessibility. Values represent average fold change relative to other clusters. (C-E) Example marker gene chromatin accessibility (left) and expression (right) for different clusters compared to the undifferentiated cluster 0. Genes that show strong (C), weak (D), and no (E) correlation between ATAC and RNA profiles are included. (F) Heat maps showing the top TF ORF (left) and nominated regulators (right) for each cluster. Left, percentage of cells with the indicated TF ORF is shown. Numbers after TF gene names indicate the isoform. Percentages are determined by normalizing to the total number of cells with the TF ORF in the joint scATAC- and scRNA-seq dataset. Only the 6 most enriched TF ORFs that are greater than 5% are shown. Right, average AUC (area under the ROC curve) of TF motif enrichment and RNA expression is shown. TFs with significantly enriched (FDR<0.05) motif and expression in each cluster are included. TFs that were identified as top ORFs and regulators are labeled in blue.

[0084] FIG. 48—Combinatorial TF screening and prediction. (A) UMAP of scRNA-seq profiles from the combinatorial TF screen in hESCs. Each circle represents the mean expression profile of cells overexpressing the indicated TF ORF(s). The screen included 10 TF ORFs in combinations, including 44 doubles and 3 triples, as well as 10 singles. Example single TF profiles with associated grouping of TF combinations (CDX1, FLI1, and KLF4) are indicated with black borders. (B-C) Percent accuracy for different approaches to predict TFs for measured double (B) or triple (C) TF expression profiles. Single TF profiles were averaged or fitted with linear regression models against double or triple TF profiles. Combinations of single TF profiles were ranked by similarity to the measured combinatorial TF profile. The nominated combinations were compared to the known TF combinations of the measured combinatorial TF profiles to assess accuracy. Kernel ridge and random forest regression algorithms did not significantly outperform random selection for triplet prediction and were excluded. (D-I) Cell type prediction results for double TF profiles. Known combinations (D) or predicted combinations for hepatoblasts (E), bronchiolar and alveolar epithelial cells (F), metanephric cells (G), vascular endothelial cells (H), and trophoblast giant cells (I) are shown. TF combinations were ranked by the gene signature scores for each respective cell type. As gene signature scores were discrete, the percentile ranks were reported as ranges. For predicted combinations, TFs that are part of known combinations, developmentally critical, or specifically expressed in the target cell types are indicated in blue.

[0085] FIG. 49—Comparison of TF overexpression methods for neuronal differentiation. (A) Schematic of ORF and CRISPR activator (CRISPRa) comparison. hESCs are transduced with ORF, ORF with UTRs, or SAM CRISPRa to upregulating NEUROD1 or NEUROG2 for directed differentiation into induced neurons. (B) Expression of NEUROD1 mRNA and protein after NEUROD1 upregulation. n=4. (C) Expression of marker genes for neurons (MAP2) and neural progenitors (PAX6) after NEUROD1 upregulation. (D) Expression of NEUROG2 mRNA after NEUROG2 upregulation. n=4. (E) Expression of marker genes for neurons (MAP2) and NPs (PAX6) after NEUROG2 upregulation. (F) Intensity of MAP2 staining normalized to nuclei count. n=6. All values are mean±SEM. Scale bar, 100 μm. ****P<0.0001; ***P<0.001; ns, not significant. UTR, untranslated region; NT, nontargeting; sg, single guide RNA.

[0086] FIG. 50—Bulk TF screening in different cell culture media. (A) Design of barcoded TF ORF lentiviral vectors. WPRE, Woodchuck Hepatitis Virus Posttranscriptional Regulatory Element. (B) Schematic of bulk TF screening. All 3,550 barcoded TF ORFs from the MORF library were packaged into lentivirus for delivery into hESCs at a low multiplicity of infection (MOI). After 7 days of TF ORF overexpression in 7 different cell culture media, cells were stained for stem cell markers (TRA-1-60 and SSEA4) and sorted to enrich for stem and differentiated cells. Deep sequencing of TF barcodes profiled changes in TF distribution. (C) Scatterplots comparing the TF barcode distribution for the initial plasmid and lentiviral libraries to the unsorted cells cultured in 7 different medias (M1-M7, see methods) after 7 days of TF ORF overexpression. BR1 and BR2 indicate the two biological replicates. Skew represents the ratio between the 90^{th} and 10^{th} percentile barcode counts. (D) Heat map showing the fold change in TF barcodes in each media condition relative to the initial lentivirus library. The top 10 most enriched and depleted TF barcodes are labeled. Numbers after the TF gene name indicate the isoform. (E) Heat map showing pairwise Pearson correlation between each of the conditions in (D). Conditions are ordered by hierarchical clustering. (F-G) Scatterplots showing the relationship between TF barcode counts and ORF length for the lentivirus library (F) and the average unsorted cells after 7 days of overexpression (G).

[0087] FIG. 51—Bulk TF screening to evaluate effects of media on TF-induced differentiation outcome. (A) Scatterplots showing the fold change in TF barcodes in the sorted differentiated cells relative to stem cells for each media condition (M1-M7, see methods). BR1 and BR2 indicate the two biological replicates. TFs with known roles in development or differentiation are labeled. (B) Heat map summarizing the fold changes in (A) for each TF isoform. The top 50 most enriched TFs are labeled. Numbers after the TF gene name indicate the isoform. (C) Data as in (B), highlighting the TFs with known roles in development or differentiation. (D) Heat map showing the pairwise Pearson correlation between each of the conditions in (B). The top 5% of TFs with the highest average fold change were evaluated. Conditions are ordered by hierarchical clustering. (E) Box plots showing fold enrichment of 67 developmentally critical TFs (Parekh Cell Systems 2018 and this study) for each media condition. Whiskers indicate the 10th and 90th percentiles.

[0088] FIG. 52—Data quality control for the TF Atlas. (A) Violin plots showing distribution of genes, unique molecular identifiers (UMIs), and percent mitochondrial counts per cell in the TF Atlas. (B) Comparison of TF ORF distributions between the bulk TF screen and the TF Atlas scRNA-seq. For each TF ORF, barcode counts per million (CPM) from the bulk screen is compared to the number of cells per TF in the TF Atlas. (C) Distribution of cells overexpressing each TF isoform. Cells were subsampled or filtered by TF ORF such that each TF had between 3 and 1,000 cells in the TF Atlas. (D) Scatterplot showing the relationship between average expression of the TF ORF per cell to the TF ORF length. (E) Density scatterplot showing, for each cell, expression of the TF ORF and the corresponding endogenous TF. TF ORF expression is measured using barcode counts and endogenous TF expression is measured using scRNA-seq counts. (F) UMAP of TF Atlas scRNA-seq data highlighting cells with indicated ORF. Numbers after TF gene names indicate the isoform. (G) Heat maps showing percentage of cells with the indicated TF ORF that were assigned to each cluster.

[0089] FIG. 53—Pseudotime analysis for ordering cells in differentiation trajectories. (A-B) Force-directed graph (FDG) representation of TF Atlas scRNA-seq data. Colors indicate Louvain clusters (A) and diffusion pseudotime (B). (C) Stream plot of velocities shown on the UMAP of TF Atlas scRNA-seq data from 671,453 cells overexpressing 3,266 TF isoforms. Colors indicate Louvain clusters. (D) UMAP of TF Atlas scRNA-seq data. Colors indicate RNA velocity pseudotimes. (E) FDG representation of (C). (F) FDG representation of (D). (G) Density scatterplots comparing the diffusion pseudotimes to RNA velocity for each cell. (H-J) Density scatterplots showing the number of genes (H), UMIs (I), and TF barcode counts (J) over diffusion pseudotime for each cell. (K) Comparison of the average euclidean distance and pseudotime for cells overexpressing TFs relative to those overexpressing controls.

[0090] FIG. 54—Differentially expressed genes across pseudotime. (A) Smoothened heat map of the top 1,000 upregulated and downregulated genes over RNA velocity. Gene expression in each row is represented as z-scores. Genes are ordered based on the slope of expression change over pseudotime fitted using linear regression. (B) Gene expression along trajectories calculated with diffusion (left) or RNA velocity (right). (C) Scatterplot comparing the differentiation results of the scRNA-seq pseudotime analysis to the bulk TF screen. For the scRNA-seq screen, the average pseudotime of cells overexpressing TFs relative to those overexpressing GFP or mCherry controls is shown. For the bulk TF screen, the average fold change in the corresponding TF barcodes in the sorted differentiated cells relative to stem cells is shown. (D) Significance of the difference between assigned pseudotimes of cells expressing each TF isoform and those expressing controls. Subset of TF isoforms from FIG. 42H are included. Dashed line indicates the threshold above which FDR<0.05.

[0091] FIG. 55—Unbiased clustering of TFs based on Pearson correlation of gene expression. (A) Heat map showing pairwise Pearson correlation for mean expression profiles of 3,266 TF ORFs. TFs are ordered by hierarchical clustering. Each TF is annotated by TF family and average pseudotime relative to control. Some TF groups are labeled and annotated based on known relationship. (B-C) Zoomed in subsets of (A).

[0092] FIG. 56—Differential gene expression analysis and cell type mapping for differentiated cells. (A) Smoothened heat map showing expression of marker genes for each cluster of differentiated cells from FIG. 44A. Cells are sorted by cluster followed by diffusion pseudotime. Gene expression in each column is represented as z-scores. (B) Heat map showing percentage of cells from each cluster that mapped to the indicated reference cell type. EMT, epithelial-mesenchymal transition; ENS, enteric nervous system. (C) Heat map showing enrichment of Gene Ontology (GO) biological process terms in differentially expressed genes for each cluster. CNS, central nervous system; diff., differentiation; reg., regulation; dev., development; migr., migration.

[0093] FIG. 57—Expression of marker genes across stem cell lines and in additional nominated cell types. (A) Heat map showing expression of marker genes in H1 hESCs (left), H9 hESCs (middle), or 11a iPSCs (right) after 7 days of candidate TF or GFP overexpression. Expression is shown as average fold change in cells overexpressing candidate TF relative to GFP. Numbers after TF gene names indicate the isoform. (B) Expression of marker genes for each nominated cell type in H1 hESCs after 7 days of candidate TF or GFP overexpression. n=4. Values represent mean±SEM. ****P<0.0001; ***P<0.001; **P<0.01; *P<0.05; ns, not significant.

[0094] FIG. 58—Validation of candidate TFs in other stem cell lines for differentiation towards nominated cell types. (A-B) Expression of marker genes for each nominated cell type in H9 hESCs (A) or 11a iPSCs (B) after 7 days of candidate TF or GFP overexpression. Numbers after TF gene names indicate the isoform. n=4. Values represent mean±SEM. ****P<0.0001; ***P<0.001; **P<0.01; *P<0.05; ns, not significant; ND, not detected.

[0095] FIG. 59—Immunostaining of marker genes to validate candidate TFs for inducing differentiation of nominated cell types. (A-C) Left, expression of marker genes in H1 hESCs after 7 days of candidate TF or GFP overexpression. Right, intensity of marker gene staining from n=6 images per condition. Numbers after TF gene names indicate the isoform. Mean intensity per cell is normalized to cells overexpressing the GFP control. Scale bar, 25 μm. Marker genes for stromal (A), intestinal epithelial (B), and lung ciliated epithelial (C) cells are shown. Values represent mean±SEM. **P<0.01; *P<0.05; ns, not significant. (D) Expression of marker genes in H1 hESCs after 7 days of GFP overexpression. Controls for data in FIG. 45D-K.

[0096] FIG. 60—A targeted TF ORF screening platform for iNP differentiation. (A) Timeline for screening. mTeSR stem cell media was incrementally changed to neural progenitor media during differentiation, and cells were harvested after 7 days of differentiation. (B) FACS histograms showing distribution of EGFP expression in SLC1A3 and VIM reporter cell lines with or without the TF library. High and low bins sorted for sequencing of TF barcodes are indicated. (C-D) Scatterplots showing enrichment of candidate TFs (C) and alternative isoforms (D) identified using SLC1A3 or VIM reporter cell lines. n=3 replicates per reporter cell line. (E-F) Representative FACS plots showing expression of 2 (E) or 10 (F) NP marker genes labeled by pooled FISH probes. High and low bins sorted for sequencing of TF barcodes are indicated. (G-H) Scatterplot showing enrichment of candidate TFs (G) and alternative isoforms (H) identified by flow-FISH with pooled FISH probes targeting 2 or 10 NP marker genes. n=3 replicates per flow-FISH screen. (I) Comparison of candidate TF enrichment in screens using reporter cell lines and flow-FISH.

[0097] FIG. 61—TF ORF screening with single-cell RNA-sequencing and in an arrayed format. (A-G) TF ORF screening using single-cell RNA sequencing (scRNA-seq) on 60,997 cells as readout. (A) Violin plots showing distribution of genes, unique molecular identifiers (UMIs), and percent mitochondrial counts per cell. (B) Distribution of cells overexpressing each TF isoform. (C) Comparison of TF ORF expression per cell measured by TF barcode counts and TF ORF length. Data represents mean±SEM. (D-E) Uniform manifold approximation and projection (UMAP) clustering of scRNA-seq data. Colors indicate Louvain clusters (D) or cells expressing TFs of interest (E). (F) Z-score of mean Euclidean distances between cells expressing a TF and the rest of the cells. (G) Heatmap indicating correlations between mean expression profiles of cells overexpressing each TF and human radial glia from published datasets (14, 22-25). Values represent z-scores of Pearson correlation. (H-I) Scatterplots showing enrichment of candidate TFs (H) and alternative isoforms (I) identified using arrayed screening format. TF ORFs were individually packaged into lentivirus for delivery into hESCs. Expression of marker genes SLC1A3 and VIM was measured to identify candidate TFs. N=3 screening replicates.

[0098] FIG. 62—Validation of candidate TFs driving iNP differentiation. (A) Western blot showing expression of candidate TFs measured using the V5 epitope tag after 7 days of differentiation. (B) Top, expression of NP markers VIM and NES in iNPs produced by candidate TFs after 7 days of overexpression. Cell culture media used for each ORF is indicated in parentheses. Scale bar, 50 μm. Bottom, heat maps showing correlation between expression profiles of iNPs and human fetal cortex or brain organoid cell types from 3 datasets (14, 23, 24). D7 and D12 indicate the number of days that the ORF was overexpressed. RG, radial glia; IPC, intermediate progenitor cell; N, neuron; IN, interneuron; div, dividing; oRG, outer radial glia; tRG, truncated radial glia; vRG, ventricular radial glia; MGE, medial ganglionic eminence; nEN, newborn excitatory neurons, EN, excitatory neurons; PFC, prefrontal cortex; V1, primary visual cortex; nIN, newborn interneurons; CTX, cortex; CGE, cortical ganglionic eminence; STR, striatum; OPC, oligodendrocyte precursor cells; Glyc, cells expressing glycolysis genes; Pro, proliferating progenitors; NE, neuroepithelium; DN, dopaminergic neurons; CLN, callosal neurons; CFN, corticofugal neurons; Meso, mesodermal progenitors.

[0099] FIG. 63—Characterization of cells spontaneously differentiated from iNPs generated by candidate TFs. (A) Schematic of spontaneous differentiation. Dox-inducible candidate TFs are transiently overexpressed for 1 week to differentiate hESCs into iNPs, which then spontaneously differentiate for 8 weeks following withdrawal of dox and growth factors. Spontaneously differentiated cells were characterized by immunostaining and single-cell RNA sequencing. dox, doxycycline; EGF, epidermal growth factor; FGF, fetal growth factor. (B-C) Expression of marker genes for neurons (MAP2), astrocytes (GFAP), and oligodendrocyte precursor cells [PDGFRA (B) or NG2 (C)] in cells spontaneously differentiated for 1, 2, 4, or 8 weeks from iNPs produced by candidate TFs. Scale bar, 100 μm.

[0100] FIG. 64—Validation of candidate TFs in other stem cell lines for iNP differentiation. (A-B) Expression of NP marker genes in iNPs generated using 11a iPSC (A) or H1 hESC (B) lines after 1 week of TF overexpression. (C-D) Expression of marker genes for neurons (MAP2), astrocytes (GFAP), and oligodendrocyte precursor cells (NG2 and PDGFRA) in cells spontaneously differentiated from 11a iPSC iNPs (C) or H1 hESC iNPs (D) for 8 weeks. Scale bar, 100 μm.

[0101] FIG. 65—Differentiation of cardiomyocytes from EOMES-derived progenitors. (A) Percent of cells that stained for TNNT2 at day 10 for different EOMES induction times and seeding densities pooled from n=3 biological replicates. (B) Percent of cells that stained for TNNT2 at day 10 after 2 days of EOMES induction or GSK and Wnt inhibition pooled from n=3 biological replicates. (C) Expression of cardiomyocyte markers TNNT2 and NKX2.5 at day 30 after 2 days of EOMES induction or GSK and Wnt inhibition. Scale bar, 100 μm. (D) UMAP clustering of single-cell RNA-seq data from 16,698 cells that have been spontaneously differentiated for 4 weeks after EOMES induction or GSK and Wnt inhibition. Data represents n=2 biological replicates per differentiation method. Colors indicate cell types of state. (E) Dot plot showing marker genes for each cluster. Circle size indicates percentage of cells expressing the gene in the given cluster and color indicates the mean expression value. (F) Data as in (D), colored by marker gene expression. (G) Heatmap showing the percentage of cells from each biological replicate that were grouped into each cluster. (H) Distribution of general cell types produced by each biological replicate. (I) Cells derived using each differentiation method are highlighted. Colors indicate biological replicates, S1 and S2. (J) Data as in (D), highlighting expression of marker genes for mature cardiomyocytes. (K) Violin plots showing expression of marker genes for mature cardiomyocytes for each biological replicate. VCM, ventricular cardiomyocytes; ACM, atrial cardiomyocytes; SMM, smooth muscle cells; SKM, skeletal muscle cells; EPTH, epithelial cells; (P), proliferative cells.

[0102] FIG. 66—Profiling cells spontaneously differentiated from iNPs using single-cell RNA sequencing. (A) UMAP clustering of scRNA-seq data from 53,113 cells that have been spontaneously differentiated from iNPs for 8 weeks. iNPs were derived using RFX4, NFIB, ASCL1, or PAX6 with n=2 biological replicates per TF. Colors indicate Louvain clusters. (B) Dot plot showing marker genes for each cluster. Circle size indicates percentage of cells expressing the gene in the given cluster and color indicates the mean expression value. Horizontal lines distinguish between major cell types. Pro, uncommitted progenitors; RP, retinal progenitors; RPE, retinal pigment epithelium; PR, photoreceptors; RGC, retinal ganglion cells; DNP, dorsal neural progenitors; RG, radial glia; Astro, astrocytes; CN, CNS neurons; EPD, ependyma; EP, epithelial progenitors; BE, bronchial epithelium; CE, cranial epithelium; CNC, cranial neural crest; CNCP, cranial neural crest progenitors; (P), proliferative cells.

[0103] FIG. 67—Single-cell RNA sequencing comparison of spontaneously differentiated cells produced by candidate TF iNPs. (A-B) UMAP clustering of scRNA-seq data from 53,113 cells that have been spontaneously differentiated from iNPs for 8 weeks. iNPs were derived using RFX4, NFIB, ASCL1, or PAX6 with n=2 biological replicates per TF. (A) Clusters representing central nervous system (CNS) cell types highlighted. Percentage of cells that contribute to the specified CNS cell type is indicated. (B) Cells spontaneously differentiated from each candidate TF are highlighted. Colors indicate biological replicates, S1 and S2. (C) Heatmap showing the percentage of cells from each replicate that were grouped into each cluster. (D) Distribution of general cell types produced by each biological replicate. Pro, uncommitted progenitors; RP, retinal progenitors; RPE, retinal pigment epithelium; PR, photoreceptors; RGC, retinal ganglion cells; DNP, dorsal neural progenitors; RG, radial glia; Astro, astrocytes; CN, CNS neurons; EPD, ependyma; EP, epithelial progenitors; BE, bronchial epithelium; CE, cranial epithelium; CNC, cranial neural crest; CNCP, cranial neural crest progenitors; (P), proliferative cells.

[0104] FIG. 68—Profiling spontaneously differentiated neurons from iNPs by single-cell RNA sequencing and target genes of candidate TFs by ChIP-seq. (A-E) UMAP reclustering of 4,162 neurons from clusters CN 1-3 of FIG. 66A. (A-D) Marker genes for general regions of the central nervous systems (A), newborn cortical excitatory neurons (B), neuronal subtypes (C), and cortical projection neurons (D) are shown. Colors indicate gene expression. (E) Neurons spontaneously differentiated from each candidate TF are highlighted. Colors indicate biological replicates, S1 and S2. (F) Top 3 de novo or known motifs identified using HOMER motif analysis. The names of the TFs with the closest matching motifs, indicating potential cofactors of candidate TFs, and the associated P-values of enrichment are listed. (G) Heatmap showing percentage of NP-specific TFs or genes that had candidate TF ChIP peaks within 10 kb of the annotated transcriptional start site (TSS). (H-I) Overlap of NP-specific genes that had candidate TF ChIP peaks within 10 kb of the TSS and were differentially expressed (t-test q-value<0.05 with FDR correction) upon candidate TF overexpression. Genes that were shared between candidate TFs are shown in (H), with blue regions indicating overlap, and genes unique to each candidate TF are shown in (I).

[0105] FIG. 69—Combining RFX4 with dual SMAD inhibition produces homogenous iNPs. (A) Schematic for different media conditions (M1-M8) tested. SMAD inhibitors dorsomorphin (DM) and SB-431542 (SB) were added to the media at the indicated concentrations. mTeSR stem cell media was changed to different NP media (NP, EB, and DS; see Methods) over 7 days of differentiation. (B) Heatmaps showing expression of neuron marker genes TUJ1 and MAP2 relative to GAPDH control in cells from iNPs that have undergone spontaneous neurogenesis for 2 or 4 weeks. iNPs were differentiated for 5 or 7 days using each of the media conditions in (A) and seeded at low or high densities prior to spontaneous neurogenesis. Colors represent mean expression from n=4 biological replicates. (C) Same as (A), for additional media conditions tested. (D) Same as (B), for the media conditions shown in (C). (E-K) Profiling of iNPs derived using different iNP differentiation methods by scRNA-seq. RFX4-DS-iNPs were produced by combining RFX4 overexpression with dual SMAD inhibition, EB-iNPs were produced using the embryoid body protocol (8), and DS-iNPs were produced using the dual SMAD inhibition protocol (7). Data represents n=2 batch replicates per method with 15,211 RFX4-DS-iNPs, 11,148 EB-iNPs, and 16,421 DS-iNPs. (E) UMAP clustering of scRNA-seq data with colors indicating Louvain clusters. (F) Dot plot showing marker genes for each cluster. Circle size indicates percentage of cells expressing the gene in the given cluster and color indicates the mean expression value. (G-H) Box plots showing intra-(G) or inter-(H) replicate Euclidean distances between cells. Whiskers indicate the 5^{th} and 95^{th} percentiles. (I) Data as in (E), highlighting cells derived from each differentiation method. Colors indicate batch replicates, S1 and S2. (J) Heatmap showing the percentage of cells from each batch replicate that were grouped into each cluster. (K) Data as in (E), colored by marker gene expression. NP, neural progenitors; CN, CNS neurons; CNC, cranial neural crest.

[0106] FIG. 70—Characterization of iNPs produced by combining RFX4 with dual SMAD inhibition. ScRNA-seq profiling of 26,111 cells that have been spontaneously differentiated from iNPs. iNPs were produced by combining RFX4 overexpression with dual SMAD inhibition and spontaneously differentiated for 4 or 8 weeks. Data represents n=2 biological replicates per timepoint. (A-B) UMAP clustering of scRNA-seq data. (A) Colors indicate expression of marker genes for major cell types. (B) Cells from each time point are highlighted. Colors indicate biological replicates, S1 and S2. (C) Heatmap showing the percentage of cells from each biological replicate that were grouped into each cluster from FIG. 5D. (D-G) UMAP clustering of scRNA-seq data. Marker genes for general regions of the central nervous systems (D), radial glia subtypes (E), neuronal subtypes (F), and GABAergic interneuron subtypes (G) are shown. Colors indicate gene expression. CN, CNS neurons; RG, radial glia; MNG, meninges; (P), proliferative cells.

[0107] FIG. 71—Modeling neurodevelopmental disorders using RFX4-iNPs with DYRK1A perturbation. (A) Schematic of disease modeling by perturbing DYRK1A expression. Human induced pluripotent stem cells (iPSCs) are transduced with Cas9 and sgRNAs or ORF to knockout or overexpress DYRK1A, respectively. RFX4 is then transiently overexpressed for 1 week to differentiate iPSCs into iNPs, which then spontaneously differentiate for 8 weeks following withdrawal of dox and growth factors. Effects of DYRK1A perturbation were characterized using bulk RNA sequencing, EdU labeling, immunostaining, or electrophysiology. dox, doxycycline; EGF, epidermal growth factor; FGF, fetal growth factor. (B) Percent indels in RFX4-iNPs transduced with DYRK1A KO sgRNAs. n=3. (C) DYRK1A expression measured using qPCR probes targeting the endogenous sequence or the codon-optimized ORF sequence. n=4. (D-E) Western blot of DYRK1A at 7 days after transduction with Cas9 and DYRK1A KO sgRNAs (D) or DYRK1A ORF (E). (F-H) Volcano plots showing the number of genes that were significantly differentially expressed (t-test q-value<0.05 with FDR correction) and had an absolute log 2 fold change relative to control that was greater than 1 for DYRK1A KO sgRNA 1 (F), KO sgRNA 2 (G), and ORF (H) conditions. For a full list of genes, see Table 17. The KO sgRNAs 1 and 2 conditions were compared to both NT sgRNAs. The ORF condition was compared to GFP control. (I) Venn diagram summarizing the significantly differentially expressed genes in (F-H). (J) Heatmap of genes that were significantly differentially expressed (t-test q-value<0.5 with FDR correction) depending on the dosage of DYRK1A. Genes are annotated with broad categories of gene function relevant to neural development. n=3. (K) Representative images of MAP2 staining during spontaneous differentiation for NT sg1 and DYRK1A KO sg2. Scale bar, 100 μm. Values represent mean±SEM. sg, single guide RNA; KO, knockout; NT, nontargeting. *P<0.05; ND, not detected.

[0108] FIG. 72—Characterization of DYRK1A perturbations in RFX4-iNP differentiated neurons by electrophysiology. (A) Representative electrophysiology traces for neurons with or without evoked action potentials (AP) and spontaneous excitatory postsynaptic currents (EPSCs). (B) Proportion of neurons with or without AP and EPSCs for different DYRK1A perturbations from n=31-45 neurons. (C-D) Intrinsic membrane (C) and action potential (D) properties measured using electrophysiology for different DYRK1A perturbations from n=12-36 neurons with evoked action potentials. Values represent mean±SEM. *P<0.05.

[0109] FIG. 73—Joint profiling of chromatin accessibility and gene expression on a subset of TF ORFs. (A) Violin plots showing distribution of UMIs and genes per cell for scRNA-seq from the joint profiling dataset. (B) Violin plots showing distribution of UMIs and fraction of reads in the top 500,000 peaks per cell for scATAC-seq from the joint profiling dataset. (C) Representative fragment histogram for scATAC-seq data using the first two megabases of chromosome 1. (D) Transcriptional start site (TSS) enrichment score for scATAC-seq data. (E) RNA (left) and ATAC (right) UMAP of 69,085 cells overexpressing 198 TF isoforms. Colors indicate clusters identified by the small local moving (SLM) algorithm. (F) Distribution of cells from day 4 or day 7 of TF overexpression in each of the clusters from FIG. 5A. Clusters with >30% cells from either time point are indicated with asterisks. (G) Weighted nearest neighbor (WNN) UMAP of joint profiling data from FIG. 46A, colored by diffusion pseudotime. (H) Violin plots comparing diffusion pseudotimes of each time point. (I) Heat map showing significance of the top nominated regulators for each cluster. Top regulators were nominated by evaluating motif enrichment in ATAC peaks with significant peak-gene associations in each cluster. TFs that were identified as top ORFs and regulators are labeled in blue.

[0110] FIG. 74—Combinatorial TF screening identifies TF combinations with similar expression profiles. (A) UMAP of scRNA-seq profiles from hESCs overexpressing 57 combinations of 10 TF ORFs for 7 days. Colors indicate Louvain clusters. (B) Heat map showing percentage of cells with the indicated TF combination for each cluster. Percentages are determined by normalizing to the total number of cells with the TF ORF in the combinatorial dataset. (C) Heat map showing pairwise Pearson correlation between mean expression profiles of each TF combination. TF combinations are ordered by hierarchical clustering.

[0111] FIG. 75—Fitting expression profiles of TF combinations with linear regression. (A-C) Heat maps showing the coefficient weights (A-B) and score (C) for linear regression. Single TF expression profiles were fitted to model each measured double TF profile by performing linear regression with an interaction term on the mean expression profiles. (D) Annotated relationships for each TF combination based on the fitted linear regression coefficients. (E) Heat maps showing average expression profile of double TFs with those of respective single TFs for example combinations with annotated relationships.

[0112] FIG. 76—Predicting TF combinations using the TF Atlas. (A-F) Percent accuracy for different approaches to predict TFs for double (A-C) or triple (D-F) TF combinations. Single TF expression profiles from the TF Atlas were averaged or fitted with linear regression models against measured double or triple TF expression profiles. TF combinations were ranked by the fit to the measured combinatorial TF profile. The top combinations were evaluated for accuracy. For comparison to the single TF profiles from the combinatorial TF screen dataset, prediction accuracy for the 10 corresponding TFs from the TF Atlas are shown (A,D). To reduce the number of possible combinations, TFs were grouped into 30 (B,E) or 51 (C,F) clusters based on expression profile similarity. (G-L) Prediction results for triple TF profiles. Known combinations (G) or predicted combinations for hepatoblasts (H), bronchiolar and alveolar epithelial cells (I), metanephric cells (J), vascular endothelial cells (K), and trophoblast giant cells (L) are shown. To expand the number of known combinations, parts of known combinations with more than 3 TFs were included for ENS neurons and cardiomyocytes. TF combinations were ranked by the gene signature scores for each respective cell type. As gene signature scores were discrete, the percentile ranks were reported as ranges. For predicted combinations, TFs that are part of known combinations, developmentally critical, or specifically expressed in the target cell types are indicated in blue.

[0113] The figures herein are for illustrative purposes only and are not necessarily drawn to scale.

### DETAILED DESCRIPTION OF THE EXAMPLE EMBODIMENTS

### General Definitions

[0114] Unless defined otherwise, technical and scientific terms used herein have the same meaning as commonly understood by one of ordinary skill in the art to which this disclosure pertains. Definitions of common terms and techniques in molecular biology may be found in Molecular Cloning: A Laboratory Manual, 2^{nd} edition (1989) (Sambrook, Fritsch, and Maniatis); Molecular Cloning: A Laboratory Manual, 4th edition (2012) (Green and Sambrook); Current Protocols in Molecular Biology (1987) (F. M. Ausubel et al. eds.); the series Methods in Enzymology (Academic Press, Inc.): PCR 2: A Practical Approach (1995) (M. J. MacPherson, B. D. Hames, and G. R. Taylor eds.): Antibodies, A Laboratory Manual (1988) (Harlow and Lane, eds.): Antibodies A Laboratory Manual, 2nd edition 2013 (E. A. Greenfield ed.); Animal Cell Culture (1987) (R. I. Freshney, ed.); Benjamin Lewin, Genes IX, published by Jones and Bartlet, 2008 (ISBN 0763752223); Kendrew et al. (eds.), The Encyclopedia of Molecular Biology, published by Blackwell Science Ltd., 1994 (ISBN 0632021829); Robert A. Meyers (ed.), Molecular Biology and Biotechnology: a Comprehensive Desk Reference, published by VCH Publishers, Inc., 1995 (ISBN 9780471185710); Singleton et al., Dictionary of Microbiology and Molecular Biology 2nd ed., J. Wiley & Sons (New York, N.Y. 1994), March, Advanced Organic Chemistry Reactions, Mechanisms and Structure 4th ed., John Wiley & Sons (New York, N.Y. 1992); and Marten H. Hofker and Jan van Deursen, Transgenic Mouse Methods and Protocols, 2nd edition (2011).

[0115] As used herein, the singular forms “a”, “an”, and “the” include both singular and plural referents unless the context clearly dictates otherwise.

[0116] The term “optional” or “optionally” means that the subsequent described event, circumstance or substituent may or may not occur, and that the description includes instances where the event or circumstance occurs and instances where it does not.

[0117] The recitation of numerical ranges by endpoints includes all numbers and fractions subsumed within the respective ranges, as well as the recited endpoints.

[0118] The terms “about” or “approximately” as used herein when referring to a measurable value such as a parameter, an amount, a temporal duration, and the like, are meant to encompass variations of and from the specified value, such as variations of +/−10% or less, +/−5% or less, +/−1% or less, and +/−0.1% or less of and from the specified value, insofar such variations are appropriate to perform in the disclosed invention. It is to be understood that the value to which the modifier “about” or “approximately” refers is itself also specifically, and preferably, disclosed.

[0119] As used herein, a “biological sample” may contain whole cells and/or live cells and/or cell debris. The biological sample may contain (or be derived from) a “bodily fluid”. The present invention encompasses embodiments wherein the bodily fluid is selected from amniotic fluid, aqueous humour, vitreous humour, bile, blood serum, breast milk, cerebrospinal fluid, cerumen (earwax), chyle, chyme, endolymph, perilymph, exudates, feces, female ejaculate, gastric acid, gastric juice, lymph, mucus (including nasal drainage and phlegm), pericardial fluid, peritoneal fluid, pleural fluid, pus, rheum, saliva, sebum (skin oil), semen, sputum, synovial fluid, sweat, tears, urine, vaginal secretion, vomit and mixtures of one or more thereof. Biological samples include cell cultures, bodily fluids, cell cultures from bodily fluids. Bodily fluids may be obtained from a mammal organism, for example by puncture, or other collecting or sampling procedures.

[0120] The terms “subject,” “individual,” and “patient” are used interchangeably herein to refer to a vertebrate, preferably a mammal, more preferably a human. Mammals include, but are not limited to, murines, simians, humans, farm animals, sport animals, and pets. Tissues, cells and their progeny of a biological entity obtained in vivo or cultured in vitro are also encompassed.

[0121] The term “multiplicity of infection” (MOI) as used herein refers to the ratio of agents (e.g. vector, transcription factors) introduced to target cells (e.g. stem cell, radial glia). In certain embodiments, MOI can refer to viral vectors used to introduce an agent.

[0122] Various embodiments are described hereinafter. It should be noted that the specific embodiments are not intended as an exhaustive description or as a limitation to the broader aspects discussed herein. One aspect described in conjunction with a particular embodiment is not necessarily limited to that embodiment and can be practiced with any other embodiment(s). Reference throughout this specification to “one embodiment”, “an embodiment,” “an example embodiment,” means that a particular feature, structure or characteristic described in connection with the embodiment is included in at least one embodiment of the present invention. Thus, appearances of the phrases “in one embodiment,” “in an embodiment,” or “an example embodiment” in various places throughout this specification are not necessarily all referring to the same embodiment, but may. Furthermore, the particular features, structures or characteristics may be combined in any suitable manner, as would be apparent to a person skilled in the art from this disclosure, in one or more embodiments. Furthermore, while some embodiments described herein include some but not other features included in other embodiments, combinations of features of different embodiments are meant to be within the scope of the invention. For example, in the appended claims, any of the claimed embodiments can be used in any combination.

[0123] All publications, published patent documents, and patent applications cited herein are hereby incorporated by reference to the same extent as though each individual publication, published patent document, or patent application was specifically and individually indicated as being incorporated by reference.

### Overview

[0124] The ability to engineer cell types of interest has advanced basic research and has therapeutic potential, but is currently limited to a small number of cell types. Transcription factors (TFs) regulate gene programs, thereby controlling diverse cellular processes and cell states. Although overexpression of transcription factors (TFs) has been shown to efficiently convert one cell type to another, the process of discovering the right TFs is time-intensive and low-throughput.

[0125] The ability to engineer any cell type of interest has the potential to advance our understanding of biological processes and capability to treat disease¹⁻⁵. Despite this, currently only a few cell types can be generated efficiently and consistently^{1,2,4,5}. Overexpression of transcription factors (TFs) can be used to engineer cell fates, and TFs have been shown to rapidly and efficiently generate many different cell types, including neurons and skeletal muscle cells⁶⁻¹². For example, overexpressing either NEUROD1 or NEUROG2 can efficiently and rapidly differentiate hESCs into cortical neurons (Zhang Y, et al., Rapid single-step induction of functional neurons from human pluripotent stem cells. Neuron. 2013; 78(5):785-98). As TFs use endogenous regulatory pathways to drive differentiation, mimicking natural development, this approach may produce higher fidelity models while illuminating aspects of cellular development. Although overexpression of transcription factors (TFs) has been shown to efficiently convert one cell type to another, the process of discovering TFs that can direct differentiation into a desired cell type (cellular engineering) is time-intensive and low-throughput, limiting the number of transformative TFs that have been identified. Typically, candidate TFs are overexpressed individually or in specific combinations. Cells produced from independent perturbations are evaluated for similarity with the target cell type using discrete assays. This costly and time-consuming process has restricted the TFs tested per cell type to those predicted from prior studies (5-25 TFs on average), thus limiting the number of novel TFs that have been identified for cellular engineering.

[0126] To achieve a comprehensive understanding of TFs and their respective programs, Applicants developed a platform for high-throughput, systematic TF ORF overexpression that leverages barcodes for pooled screening. Applicants created a library of all annotated human TF splice isoforms (1,836 genes encoding 3,548 isoforms) and applied it to build a TF Atlas charting expression profiles in human embryonic stem cells (hESCs) overexpressing each TF. The comprehensive TF Atlas allowed systematic investigation and generalized observations, showing that 27% of TF genes could function as “master regulators” that induce differentiation when overexpressed in hESCs. Applicants mapped TF-induced expression profiles to reference cell types and validated candidate TFs for generation of diverse cell types, spanning all three germ layers and trophoblasts. Further targeted screens with a subset of the library allowed Applicants to create a tailored cellular disease model and integrate mRNA expression and chromatin accessibility data to identify downstream regulators. Finally, Applicants predicted the effects of TF combinations, demonstrated the validity of the predictions in a combinatorial TF overexpression dataset, and showed how to predict combinations of TFs that could produce target profiles of reference cell types, reducing the combinatorial search space for experiments. The TF atlas provides a comprehensive overview of gene regulatory networks and a roadmap for further understanding developmental trajectories and guiding cellular engineering efforts.

[0127] Applicants also provide different selection methods to enrich for expression of different numbers of marker genes that define the target cell type (reporter assay, Flow-FISH, and scRNA-seq).

[0128] Applicants applied the library to differentiation of human embryonic stem cells (hESCs) into neural progenitors (NPs). Applicants identified four TFs (RFX4, NFIB, PAX6, and ASCL1) that produced induced NPs (iNPs) that spontaneously differentiate into an array of central nervous system (CNS) cell types. RFX4-iNPs gave rise to the highest proportion of CNS cell types and, when combined with dual SMAD inhibition, produced iNPs at >98% purity that differentiated into predominantly GABAergic neurons, opening up new avenues for studying this cell type.

[0129] In an exemplary case, 90 TF isoforms specifically expressed in a selected target cell type (neural progenitors) were selected using available expression data (Camp et al., 2015; Johnson et al., 2015; Llorens-Bobadilla et al., 2015; Pollen et al., 2015; Shin et al., 2015; Thomsen et al., 2016; Wu et al., 2010; Zhang et al., 2016) for screening neural progenitors (NPs). Applicants chose to differentiate hESCs into induced NPs (iNPs) because NPs are born early during development, and therefore overexpression of a single TF may be sufficient to differentiate NPs from hESCs, though none have been identified. In addition, current methods for producing NPs, embryoid body formation¹³ or dual SMAD inhibition¹⁴, are either low-throughput or produce variable differentiation results depending on the cell line¹⁵, respectively. Through pooled screening of 90 TF isoforms, Applicants found four novel TFs (RFX4, NFIB, PAX6, and ASCL1), each of which can produce functional iNPs within 1 week. The iNPs resemble the morphology, transcriptome signature, and functional capabilities of human fetal NPs. Applicants then applied the iNPs to model neurodevelopmental disorders. These results collectively demonstrate the feasibility of using pooled TF screening to produce a diverse array of cell types that could be tailored for specific applications.

[0130] Notably, although RFX4 has not been extensively studied in neural development, RFX4-derived iNPs spontaneously differentiated into the highest proportion of cell types in the central nervous system (CNS), highlighting the importance of performing unbiased TF screens. Applicants demonstrated that RFX4-derived iNPs can be used to model neurodevelopmental disorders. Applicants also identified transcription factors capable of differentiating stem cells into cardiomyocytes. The TF screening platform provides a generalizable approach for cellular programming that could expand our ability to generate desired cell types and elucidate the complex TF regulatory networks that govern cell type specification.

[0131] Embodiments disclosed herein provide for a screening platform and methods of screening for transcription factors (TFs) that drive differentiation of stem cells into target cell types. The stem cells may be induced pluripotent stem cells (also known as iPS cells or iPSCs). The iPSCs may be patient derived.

[0132] Embodiments disclosed herein also provide for a screening platform and methods of screening for transcription factors that drive transdifferentiation of cells into target cell types. In certain embodiments, transcription factors that differentiate stem cells into a target cell (e.g., progenitor cell) can be used to transdifferentiate cells of a different lineage to target cells. In certain embodiments, TFs that are expressed in progenitor cells can be used to transdifferentiate cells of one lineage into a target cell of a different lineage.

[0133] Embodiments disclosed herein also provide also provide for high throughput screening methods for identifying transcription factors that enhance or suppress tumor growth. In certain embodiments, a barcoded transcription factor library is introduced to a cancer cell line. After growing the cancer cell line (e.g., 2 weeks) the barcodes are sequenced and enriched and depleted barcodes are identified as compared to the barcodes present in the initial library. Enriched barcodes may indicate transcription factors that enhance tumor growth and depleted barcodes may indicate transcription factors that suppress tumor growth.

[0134] In certain embodiments, the screening platform is a high-throughput multiplex screening platform.

[0135] Embodiments disclosed herein also provide for methods of using transcription factors to drive differentiation of stem cells (e.g., iPSCs or hESCs) into target cell types (e.g., neural cell types, cardiomyocytes), providing a road map for the development of an array of in vitro human models (e.g., brain) that can be tailored for specific applications. Embodiments disclosed herein also provide for in vitro models of in vivo cell types for use in modelling development and disease. In certain embodiments, target cell types can be transferred to a subject in need thereof to regenerate a diseased or damaged tissue.

[0136] Embodiments disclosed herein also provide differentiating or transdifferentiating cells into target cells in vivo by targeted modulation of transcription factors or downstream targets. In certain embodiments, the targeted modulation of transcription factors can be used to regenerate, replenish or replace damaged or diseased cells in a subject in need thereof (e.g., heart cells, pancreatic β cells, eye cells, nervous system cells).

[0137] Embodiments disclosed herein also provide for modulating transcription factors that enhance tumor growth or that suppress tumor growth. In certain embodiments, transcription factors are modulated in a treatment regimen in a subject suffering from cancer. In certain embodiments, the treatment is targeted to tumors or sites of tumors.

[0138] Many methods of modulating transcription factors may be used. In certain embodiments, the activity of transcription factors can be enhanced (e.g., by modulation of TF phosphorylation sites). In certain embodiments, TFs are overexpressed. In certain embodiments, agents capable of enhancing expression or activity of transcription factors are used. In certain embodiments, agents capable of reducing expression or activity of transcription factors are used.

[0139] Applicants provide further examples of the screening methods to identify transcription factors required for differentiation of hESCs into radial glia, neural progenitors in the developing central nervous system that are capable of differentiating into neurons, astrocytes, and oligodendrocytes. Applicants further identify TFs required for differentiation of hESCs into cardiomyocytes. The present invention also advantageously provides for high-throughput methods of screening.

[0140] Applicants identified TFs that can differentiate hESCs into radial glia. Additionally, these candidate TFs can advantageously be applied to a high-throughput screening platform for identifying TFs that direct differentiation into specific cell types of interest (e.g., interneurons, pyramidal neurons, and oligodendrocytes). The screen can advantageously be used to identify TFs that differentiate radial glia into astrocytes. The screening platform can advance understanding of gene regulation in neural development and provide robust, scalable cellular models for studying the brain.

[0141] Finally, the methods of differentiation using the identified transcription factors can advantageously produce homogenous populations of target cells (e.g., neural progenitor cell populations).

### Screening Platforms

[0142] In certain embodiments, the present invention provides a screening platform for systematically identifying transcription factors (TFs) that drive differentiation of cells (e.g., pluripotent, stem cells, progenitor cells) into target cell types (e.g., neural cells, muscle cells, endocrine cells). In certain embodiments, the screening platform comprises pluripotent cells that are differentiated into target cells by overexpressing a plurality of transcription factors in the pluripotent cells. Over expression of transcription factors may be performed according to any method known in the art (e.g., introducing a vector encoding the transcription factor, introducing an agent capable of inducing expression of the endogenous gene, as described further herein). The screening platforms can provide a framework for the development of an array of in vitro human models that can be tailored for specific applications described herein. Further, the screening platform can be used to generate a transcription factor atlas, such that differential gene expression in cells differentiated using each individual transcription factor is identified. Thus, the atlas can be used to group TFs based on gene expression and to identify TFs for each target cell type. The gene expression profile generated by overexpressing single TFs in the TF Atlas can be used to predict expression profiles produced by overexpressing TF combinations (discussed further herein).

[0143] In certain embodiments, transcription factors may be selected for screening based on expression of the transcription factors in the target cell types or in progenitor cells for the target cell types. Non-limiting examples of transcription factors may be found in Tables 1, 3, 4 and 5. Cell type specific transcription factors are known in the art. Additionally, expression of transcription factors in a target cell type can be determined experimentally (e.g., by RNA sequencing).

[0144] An exemplary screening platform comprises one or more populations of pluripotent cells, a means to over express one or more transcription factors in the one or more populations of cells, and a means to identify target cells after differentiation of the cells. Each population of pluripotent cells may express a different transcription factor.

### Pooled Screening Platforms

[0145] In certain embodiments, TFs are screened for differentiation of stem cells into a target cell in a pooled screen, such that a library of transcription factors are introduced to a single population of stem cells and transcription factors able to differentiate the stem cells are identified. In certain embodiments, transcription factors are introduced such that each cell receives no more than one transcription factor or are introduced such that single cells receive one or more transcription factors (e.g., 2, 3, 4, 5 transcription factors). In certain embodiments, the pooled screening platform can be used to identify combinations of transcription factors required for differentiation into a target cell type.

[0146] An exemplary pooled screening platform comprises a single population of pluripotent cells, a means to over express one or more transcription factors in one or more cells in the population of cells, and a high throughput means to identify target cells (e.g., microscopy, FACS, Flow-FISH, single cell RNA-seq, or reporter gene) and the over expressed transcription factor introduced to generate the target cells (e.g., barcode). Each pluripotent cell in the pool may express a different transcription factor or combination of transcription factors.

[0147] In certain embodiments, barcodes are used to identify the transcription factor or modulating agent for the transcription factor introduced to a cell or population of cells. In certain embodiments, stem cells differentiated into target cells are enriched (e.g., sorted) and the barcodes identified in the enriched cells indicate the transcription factors introduced. Thus, transcription factors may be identified by determining the enrichment of barcodes in cells differentiated into target cells compared to barcodes in the starting library.

[0148] Nucleic acid barcode or barcode refer to a short sequence of nucleotides (for example, DNA or RNA) that is used as an identifier for an associated molecule, such as a target molecule and/or target nucleic acid (e.g., transcription factor). A nucleic acid barcode can have a length of at least, for example, 4, 5, 6, 7, 8, 9, 10, 11, 12, 13, 14, 15, 16, 17, 18, 19, 20, 21, 22, 23, 24, 25, 26, 27, 28, 29, 30, 35, 40, 45, 50, 60, 70, 80, 90, or 100 nucleotides and can be in single- or double-stranded form. In certain embodiments, the barcode is configured for amplification and subsequent sequencing. In certain embodiments, the barcode is expressed as a transcript (e.g., poly A tailed transcript) that can be identified using a method of RNA sequencing as described further herein. In certain embodiments barcoding uses an error correcting scheme (T. K. Moon, Error Correction Coding: Mathematical Methods and Algorithms (Wiley, New York, ed. 1, 2005)).

### Pluripotent Cells

### Stem Cells

[0149] Pluripotent cells may include any mammalian stem cell. As used herein, the term “stem cell” refers to a multipotent cell having the capacity to self-renew and to differentiate into multiple cell lineages. Mammalian stem cells may include, but are not limited to, embryonic stem cells of various types, such as murine embryonic stem cells, e.g., as described by Evans & Kaufman 1981 (Nature 292: 154-6) and Martin 1981 (PNAS 78: 7634-8); rat pluripotent stem cells, e.g., as described by lannaccone et al. 1994 (Dev Biol 163: 288-292); hamster embryonic stem cells, e.g., as described by Doetschman et al. 1988 (Dev Biol 127: 224-227); rabbit embryonic stem cells, e.g., as described by Graves et al. 1993 (Mol Reprod Dev 36: 424-433); porcine pluripotent stem cells, e.g., as described by Notarianni et al. 1991 (J Reprod Fertil Suppl 43: 255-60) and Wheeler 1994 (Reprod Fertil Dev 6: 563-8); sheep embryonic stem cells, e.g., as described by Notarianni et al. 1991 (supra); bovine embryonic stem cells, e.g., as described by Roach et al. 2006 (Methods Enzymol 418: 21-37); human embryonic stem (hES) cells, e.g., as described by Thomson et al. 1998 (Science 282: 1 145-1 147); human embryonic germ (hEG) cells, e.g., as described by Shamblott et al. 1998 (PNAS 95: 13726); embryonic stem cells from other primates such as Rhesus stem cells, e.g., as described by Thomson et al. 1995 (PNAS 92:7844-7848) or marmoset stem cells, e.g., as described by Thomson et al. 1996 (Biol Reprod 55: 254-259). In certain embodiments, the pluripotent cells may include, but are not limited to lymphoid stem cells, myeloid stem cells, neural stem cells, skeletal muscle satellite cells, epithelial stem cells, endodermal and neuroectodermal stem cells, germ cells, extraembryonic and embryonic stem cells, mesenchymal stem cells, intestinal stem cells, embryonic stem cells, and induced pluripotent stem cells (iPSCs).

[0150] As noted, prototype “human ES cells” are described by Thomson et al. 1998 (supra) and in U.S. Pat. No. 6,200,806. The scope of the term covers pluripotent stem cells that are derived from a human embryo at the blastocyst stage, or before substantial differentiation of the cells into the three germ layers. ES cells, in particular hES cells, are typically derived from the inner cell mass of blastocysts or from whole blastocysts. Derivation of hES cell lines from the morula stage has been documented and ES cells so obtained can also be used in the invention (Strelchenko et al. 2004. Reproductive BioMedicine Online 9: 623-629). As noted, prototype “human EG cells” are described by Shamblott et al. 1998 (supra). Such cells may be derived, e.g., from gonadal ridges and mesenteries containing primordial germ cells from fetuses. In humans, the fetuses may be typically 5-11 weeks post-fertilization.

[0151] In certain embodiments, mouse embryonic stem cells are used. In certain embodiments, mouse embryonic stem cells differentiated into a target cell may be transferred to a mouse to perform in vivo functional studies.

[0152] Human embryonic stem cells may include, but are not limited to the HUES66, HUES64, HUES3, HUES8, HUES53, HUES28, HUES49, HUES9, HUES48, HUES45, HUES1, HUES44, HUES6, H1, HUES62, HUES65, H7, HUES13, H9, and HUES63 cell lines. In certain embodiments, the stem cell is a human induced pluripotent stem cell (iPSC). In certain embodiments, the human iPSC is selected from the group consisting of 11a, PGP1, GM08330 (also known as GM8330-8), and Mito 210.

[0153] General techniques useful in the practice of this invention in cell culture and media uses are known in the art (e.g., Large Scale Mammalian Cell Culture (Hu et al. 1997. Curr Opin Biotechnol 8: 148); Serum-free Media (K. Kitano. 1991. Biotechnology 17: 73); or Large Scale Mammalian Cell Culture (Curr Opin Biotechnol 2: 375, 1991). The terms “culturing” or “cell culture” are common in the art and broadly refer to maintenance of cells and potentially expansion (proliferation, propagation) of cells in vitro. Typically, animal cells, such as mammalian cells, such as human cells, are cultured by exposing them to (i.e., contacting them with) a suitable cell culture medium in a vessel or container adequate for the purpose (e.g., a 96-, 24-, or 6-well plate, a T-25, T-75, T-150 or T-225 flask, or a cell factory), at art-known conditions conducive to in vitro cell culture, such as temperature of 37° C., 5% v/v CO₂ and >95% humidity.

[0154] Methods related to culturing stem cells are also useful in the practice of this invention (see, e.g., “Teratocarcinomas and embryonic stem cells: A practical approach” (E. J. Robertson, ed., IRL Press Ltd. 1987); “Guide to Techniques in Mouse Development” (P. M. Wasserman et al. eds., Academic Press 1993); “Embryonic Stem Cells: Methods and Protocols” (Kursad Turksen, ed., Humana Press, Totowa N.J., 2001); “Embryonic Stem Cell Differentiation in vitro” (M. V. Wiles, Meth. Enzymol. 225: 900, 1993); “Properties and uses of Embryonic Stem Cells: Prospects for Application to Human Biology and Gene Therapy” (P. D. Rathjen et al., al., 1993). Differentiation of stem cells is reviewed, e.g., in Robertson. 1997. Meth Cell Biol 75: 173; Roach and McNeish. 2002. Methods Mol Biol 185: 1-16; and Pedersen. 1998. Reprod Fertil Dev 10: 31). For further elaboration of general techniques useful in the practice of this invention, the practitioner can refer to standard textbooks and reviews in cell biology, tissue culture, and embryology (see, e.g., Culture of Human Stem Cells (R. Ian Freshney, Glyn N. Stacey, Jonathan M. Auerbach—2007); Protocols for Neural Cell Culture (Laurie C. Doering—2009); Neural Stem Cell Assays (Navjot Kaur, Mohan C. Vemuri—2015); Working with Stem Cells (Henning Ulrich, Priscilla Davidson Negraes—2016); and Biomaterials as Stem Cell Niche (Krishnendu Roy—2010)). In certain embodiments, stem cells are spontaneously differentiated or directed to differentiate (see, e.g., Amit and Itskovitz-Eldor, Derivation and spontaneous differentiation of human embryonic stem cells, J Anat. 2002 March; 200(3): 225-232). For further methods of cell culture solutions and systems, see International Patent Publication No. WO 2014/159356A1.

### Induced Pluripotent Cells

[0155] In certain embodiments, iPSCs or iPSC cell lines are used to identify transcription factors for differentiation of target cells. iPSCs advantageously can be used to generate patient specific models and cell types. iPSCs are a type of pluripotent stem cell that can be generated directly from adult cells. Further, because embryonic stem cells can only be derived from embryos, it has so far not been feasible to create patient-matched embryonic stem cell lines.

[0156] Various strategies can be used to induce pluripotency, or increase potency, in cells (Takahashi, K., and Yamanaka, S., Cell 126, 663-676 (2006); Takahashi et al., Cell 131, 861-872 (2007); Yu et al., Science 318, 1917-1920 (2007); Zhou et al., Cell Stem Cell 4, 381-384 (2009); Kim et al., Cell Stem Cell 4, 472-476 (2009); Yamanaka et al., 2009; Saha, K., Jaenisch, R., Cell Stem Cell 5, 584-595 (2009)), and improve the efficiency of reprogramming (Shi et al., Cell Stem Cell 2, 525 20 528 (2008a); Shi et al., Cell Stem Cell 3, 568-574 (2008b); Huangfu et al., Nat Biotechnol 26, 795-797 (2008a); Huangfu et al., Nat Biotechnol 26, 1269-1275 (2008b); Silva et al., Plos Bio 6, e253. doi: 10.1371/journal. pbio. 0060253 (2008); Lyssiotis et al., PNAS 106, 8912-8917 (2009); Ichida et al., Cell Stem Cell 5, 491-503 (2009); Maherali, N., Hochedlinger, K., Curr Biol 19, 1718-1723 (2009b); Esteban et 25 al., Cell Stem Cell 6, 71-79 (2010); and Feng et al., Cell Stem Cell 4, 301-3 12 (2009)).

[0157] Generally, techniques for reprogramming involve modulation of specific cellular pathways, either directly or indirectly, using polynucleotide-, polypeptide and/or small molecule-based approaches (see, e.g., International Patent Publication No. WO 2012/087965A2). The developmental potency of a cell may be increased, for example, by contacting a cell with one or more pluripotency factors. “Contacting”, as used herein, can involve culturing cells in the presence of a pluripotency factor (such as, for example, small molecules, proteins, peptides, etc.) or introducing pluripotency factors into the cell. Pluripotency factors can be introduced into cells by culturing the cells in the presence of the factor, including transcription factors such as proteins, under conditions that allow for introduction of the transcription factor into the cell. See, e.g., Zhou H et al., Cell Stem Cell. 2009 May 8; 4(5):381-4; International Patent Publication No. WO 2009/117439. Introduction into the cell may be facilitated, for example, using transient methods, e.g., protein transduction, microinjection, non-integrating gene delivery, mRNA transduction, etc., or any other suitable technique. In some embodiments, the transcription factors are introduced into the cells by expression from a recombinant vector that has been introduced into the cell, or by incubating the cells in the presence of exogenous transcription factor polypeptides such that the polypeptides enter the cell. In particular embodiments, the pluripotency factor is a transcription factor. Exemplary transcription factors that are associated with increasing, establishing, or maintaining the potency of a cell include, but are not limited to Oct-3/4, Cdx-2, 15 Gbx2, Gsh1, HesX1, HoxA10, HoxA 11, HoxB1, Irx2, Isl1, Meis1, Meox2, Nanog, Nkx2.2, Onecut, Otx1, Oxt2, Pax5, Pax6, Pdx1, Tcf1, Tcf2, Zfhxlb, Klf-4, Atbf1, Esrb, Genf, Jarid2, Jmjd1a, Jmjd2c, Klf-3, Klf-5, Mel-18, Myst3, Nac1, REST, Rex-i, Rybp, Sall4, Sall1, Tif1, YY1, Zeb2, Zfp281, Zfp57, Zic3, Coup-Tf1, Coup-Tf2, Bmi1, Rnf2, Mta1, Pias1, Pias2, Pias3, Piasy, Sox2, Lef1, Sox15, Sox6, Tcf-7, Tcf7ll, c-Myc, L-Myc, N-Myc, Hand1, Mad1, Mad3, Mad4, Mxi1, Myf5, Neurog2, Ngn3, Olig2, Tcf3, Tcf4, Foxc1, Foxd3, BAF155, C/EBPP, mafa, Eomes, Tbx-3; Rfx4, Stat3, Stella, and UTF-1. Exemplary transcription factors include Oct4, Sox2, Klf4, c-Myc, and Nanog.

[0158] Small molecule reprogramming agents are also pluripotency factors and may also be employed in the methods of the invention for inducing reprogramming and maintaining or increasing cell potency. In some embodiments of the invention, one or more small molecule reprogramming agents are used to induce pluripotency of a somatic cell, increase or maintain the potency of a cell, or improve the efficiency of reprogramming. In some embodiments, small molecule reprogramming agents are employed in the methods of the invention to improve the efficiency of reprogramming. Improvements in efficiency of reprogramming can be measured by (1) a decrease in the time required for reprogramming and generation of pluripotent cells (e.g., by shortening the time to generate pluripotent cells by at least a day compared to a similar or same process without the small molecule), or alternatively, or in combination, (2) an increase in the number of pluripotent cells generated by a particular process (e.g., increasing the number of cells reprogrammed in a given time period by at least 10%, 30%, 50%, 100%, 200%, 500%, etc. compared to a similar or same process without the small molecule). In some embodiments, a 2-fold to 20-fold improvement in reprogramming efficiency is observed. In some embodiments, reprogramming efficiency is improved by more than 20 fold. In some embodiments, a more than 100 fold improvement in efficiency is observed over the method without the small molecule reprogramming agent (e.g., a more than 100 fold increase in the number of pluripotent cells generated). Several classes of small molecule reprogramming agents may be important to increasing, establishing, and/or maintaining the potency of a cell. Exemplary small molecule reprogramming agents include, but are not limited to: agents that inhibit H3K9 methylation or promote H3K9 demethylation; agents that inhibit H3K4 demethylation or promotes H3K4 methylation; agents that inhibit histone deacetylation or promote histone acetylation; L-type Ca channel agonists; activators of the cAMP pathway; DNA methyltransferase (DNMT) inhibitors; nuclear receptor ligands; GSK3 inhibitors; MEK inhibitors; TGFP receptor/ALK5 inhibitors; HDAC inhibitors; Erk inhibitors; ROCK inhibitors; FGFR inhibitors; and PARP inhibitors. Exemplary small molecule reprogramming agents include GSK3 inhibitors; MEK inhibitors; TGFP receptor/ALK5 inhibitors; HDAC inhibitors; Erk inhibitors; and ROCK inhibitors.

[0159] In some embodiments of the invention, small molecule reprogramming agents are used to replace one or more transcription factors in the methods of the invention to induce pluripotency, improve the efficiency of reprogramming, and/or increase or maintain the potency of a cell. For example, in some embodiments, a cell is contacted with one or more small molecule reprogramming agents, wherein the agents are included in an amount sufficient to improve the efficiency of reprogramming. In other embodiments, one or more small molecule reprogramming agents are used in addition to transcription factors in the methods of the invention. In one embodiment, a cell is contacted with at least one pluripotency transcription factor and at least one small molecule reprogramming agent under conditions to increase, establish, and/or maintain the potency of the cell or improve the efficiency of the reprogramming process. In another embodiment, a cell is contacted with at least one pluripotency transcription factor and at least two, at least three, at least four, at least five, at least six, at least seven, at least eight, at least nine, or at least ten small molecule reprogramming agents under conditions and for a time sufficient to increase, establish, and/or maintain the potency of the cell or improve the efficiency of reprogramming. The state of potency or differentiation of cells can be assessed by monitoring the pluripotency characteristics (e.g., expression of markers including, but not limited to SSEA-3, SSEA-4, TRA-1-60, TRA-1-81, TRA-2-49/6E, Oct-3/4, Sox2, Nanog, GDF3, REX1, FGF4, ESG1, DPPA2, DPPA4, and hTERT).

### Introducing Transcription Factors

[0160] In certain embodiments, the screening platform may comprise an open reading frame (ORF) or cDNA encoding each transcription factor used in the screen (as used herein cDNA or ORF may be used interchangeably). A cDNA may be synthesized and cloned into a vector. A plurality of cDNAs may be cloned into a library of vectors, such that each transcription factor is represented in the library. Representative transcription factor libraries are known in the art (see, e.g., Yang et al., 2011, A public genome-scale lentiviral expression library of human ORFs Nature Methods 8, 659-66; and portals.broadinstitute.org/gpp/public/).

[0161] In certain embodiments, the screening platform may comprise an agent capable of overexpressing or modulating activity of endogenous transcription factors. In certain embodiments, the agent may be a CRISPR system. In certain embodiments, pluripotent cells are differentiated into target cells by introducing a CRISPR system targeting the endogenous loci encoding the transcription factors. In certain embodiments, the CRISPR system comprises a functional domain that is targeted to the endogenous loci encoding the transcription factors. The functional domain may be a transcriptional activator or repressor (see, e.g., Konermann et al. “Genome-scale transcriptional activation by an engineered CRISPR-Cas9 complex” Nature. 2014 Dec. 10. doi: 10.1038/nature14136; Qi, L. S., et al. (2013). “Repurposing CRISPR as an RNA-guided platform for sequence-specific control of gene expression”. Cell. 152 (5): 1173-83; and Gilbert, L. A., et al., (2013). “CRISPR-mediated modular RNA-guided regulation of transcription in eukaryotes”. Cell. 154 (2): 442-51). In certain embodiments, a functional domain is targeted to a genomic locus encoding a transcription factor using a guide sequence that includes one or more aptamer sequences. In particular embodiments, this is ensured by the use of adaptor protein/aptamer combinations that exist within the diversity of bacteriophage coat proteins. Examples of such coat proteins include but are not limited to: MS2, PP7, Qβ, F2, GA, fr, JP501, M12, R17, BZ13, JP34, JP500, KU1, M11, MX1, TW18, VK, SP, FI, ID2, NL95, TW19, AP205, ϕCb5, ϕCb8r, ϕCb12r, ϕCb23r, 7s and PRR1. In particular embodiments, the aptamer is a minimal hairpin aptamer which selectively binds dimerized MS2 bacteriophage coat proteins in mammalian cells and is introduced into the guide molecule, such as in the stemloop and/or in a tetraloop. In these embodiments, the functional domain is fused to MS2 (see, e.g., Konermann et al., Nature 2015, 517(7536): 583-588).

[0162] In certain embodiments, the arrayed screening platform can utilize multiwell plates to introduce individual transcription factors or an agent capable of modulating said transcription factors to populations of pluripotent cells. As used throughout the specification, reference to introducing transcription factors can refer to overexpressing the transcription factor from a vector or introducing an agent capable of modulating said transcription factor (e.g., CRISPR system targeting the transcription factor). Thus, each well of the multiwell plate may be configured for overexpression of a single transcription factor or combination of multiple transcription factors.

[0163] In certain embodiments, transcription factors may be introduced to individual cells by nanowires (see e.g., Shalek et al., Vertical silicon nanowires as a universal platform for delivering biomolecules into living cells, PNAS, Volume 107, Issue 1870 February, 2010). This modality enables one to assess the phenotypic consequences of introducing a broad range of biological effectors (DNAs, RNAs, peptides, proteins, and small molecules) into almost any cell type. In certain embodiments, the nanowires may be configured on a microarray format. In certain embodiments, the microarray may be configured for overexpressing transcription factors in a site-specific fashion. In certain embodiments, the array may be coupled with live-cell imaging.

### Vectors

[0164] In certain embodiments, vectors are used to overexpress or modulate expression of transcription factors. Vectors for introducing CRISPR systems are described further herein.

[0165] The term “vector” generally denotes a tool that allows or facilitates the transfer of an entity from one environment to another. More particularly, the term “vector” as used throughout this specification refers to nucleic acid molecules to which nucleic acid fragments (cDNA) may be inserted and cloned, i.e., propagated. Hence, a vector is typically a replicon, into which another nucleic acid segment may be inserted, such as to bring about the replication of the inserted segment in a defined host cell or vehicle organism.

[0166] A vector thus typically contains an origin of replication and other entities necessary for replication and/or maintenance in a host cell. A vector may typically contain one or more unique restriction sites allowing for insertion of nucleic acid fragments. A vector may also preferably contain a selection marker, such as, e.g., an antibiotic resistance gene or auxotrophic gene (e.g., URA3, which encodes an enzyme necessary for uracil biosynthesis or TRP1, which encodes an enzyme required for tryptophan biosynthesis), to allow selection of recipient cells that contain the vector. Vectors include, but are not limited to, nucleic acid molecules that are single-stranded, double-stranded, or partially double-stranded; nucleic acid molecules that comprise one or more free ends, no free ends (e.g., circular); nucleic acid molecules that comprise DNA, RNA, or both; and other varieties of polynucleotides known in the art.

[0167] Expression vectors are generally configured to allow for and/or effect the expression of nucleic acids (e.g., cDNA, CRISPR system) introduced thereto in a desired expression system, e.g., in vitro, in a host cell, host organ and/or host organism. For example, the vector can express nucleic acids functionally or operatively linked to regulatory element(s) and hence the regulatory element(s) drive expression. The promoter(s) can be constitutive promoter(s) and/or conditional promoter(s) and/or inducible promoter(s). In certain embodiments, the vectors comprise regulatory sequences for inducible expression of cDNAs encoding transcription factors. Thus, expression of the transcription factors in cells can induced at particular time points after introducing the vectors. Inducible expression systems are known in the art and may include, for example, Tet on/off systems (see, e.g., Gossen et al., Transcriptional activation by tetracyclines in mammalian cells. Science. 1995 Jun. 23; 268(5218):1766-9).

[0168] In certain example embodiments, the vectors disclosed herein may further encode an epitope tag in frame with the transcription factors for use in downstream assessment of protein expression and TF abundance in cell populations respectively. Epitope tags provide high sensitivity and specificity in detection by specific antigen binding molecules (e.g., antibodies, aptamers). Exemplary epitope tags include, but are not limited to, Flag, CBP, GST, HA, HBH, MBP, Myc, polyHis, S-tag, SUMO, TAP, TRX, or V5.

[0169] Vectors may include, without limitation, plasmids (which refer to circular double stranded DNA loops which, in their vector form are not bound to the chromosome), episomes, phagemids, bacteriophages, bacteriophage-derived vectors, bacterial artificial chromosomes (BAC), yeast artificial chromosomes (YAC), P1-derived artificial chromosomes (PAC), transposons, cosmids, linear nucleic acids, viral vectors, etc., as appropriate. A vector can be a DNA or RNA vector. A vector can be a self-replicating extrachromosomal vector or a vector which integrates into a host genome, hence, vectors can be autonomous or integrative.

[0170] The term “viral vectors” refers to the use as viruses, or virus-associated vectors as carriers of the nucleic acid construct into the cell. Constructs may be integrated and packaged into non-replicating, defective viral genomes like adenovirus, adeno-associated virus (AAV), or herpes simplex virus (HSV) or others, including retroviral and lentiviral vectors, for infection or transduction into cells. The vector may or may not be incorporated into the cell's genome. The constructs may include viral sequences for transfection, if desired. Alternatively, the construct may be incorporated into vectors capable of episomal replication, e.g., EPV and EBV vectors.

[0171] Methods for introducing nucleic acids, including vectors, expression cassettes and expression vectors, into cells (e.g., transfection, transduction or transformation) are known to the person skilled in the art, and may include calcium phosphate co-precipitation, electroporation, micro-injection, protoplast fusion, lipofection, exosome-mediated transfection, transfection employing polyamine transfection reagents, bombardment of cells by nucleic acid-coated tungsten micro projectiles, viral particle delivery, etc.

### Identification of Target Cells

[0172] In certain embodiments, differentiation of pluripotent cells is monitored. In certain embodiments, differentiation of pluripotent cells is monitored by microscopy. The screening method may further be combined with live cell imaging to monitor differentiation upon overexpression of transcription factors. The screening method may also be combined with FACS or ELISA assays to determine cells expressing markers specific for differentiated cell types. Additionally, methods of detecting target cell specific markers may include detecting reporter genes linked to marker genes, FISH, Flow-FISH, RNA sequencing, single cell RNA sequencing, quantitative RT-PCR, or western blot. In preferred embodiments, a pooled screen uses three different selection methods to enrich for cells that express one or more marker genes that define the target cell type; reporter assay, Flow-FISH, and scRNA-seq. In preferred embodiments, each transcription factor is associated with a unique barcode sequence that can be detected using sequencing.

### Reporter Genes

[0173] In certain embodiments, differentiated target cells can be identified and enriched from a pool of cells using a detectable marker (i.e., high throughput means to identify target cells). In certain embodiments, the pooled screening platform uses detectable markers associated with marker genes specific to target cells to identify transcription factors.

[0174] In certain embodiments, the detectable marker is integrated into a genomic locus in the pool of cells such that the detectable marker is under control of the regulatory sequences for a target cell specific marker gene. In other words, a polynucleotide sequence encoding a detectable marker is integrated into a genomic locus encoding a marker gene, such that the marker gene and detectable marker are under control of the regulatory sequences for the marker gene and upon activation of the marker gene the detectable marker is co-expressed. In certain embodiments, the marker gene and detectable marker are expressed as separate proteins to avoid the detectable marker from interfering with proper protein folding and function of the marker gene. Thus, the detectable marker can be used to monitor activation of the marker gene to indicate differentiation into a target cell type. Thus, the present invention also provides for a population of pluripotent cells comprising a detectable marker integrated into an endogenous marker gene specific for a target cell.

[0175] Integration of the detectable marker gene at a genomic locus can be performed using known methods in the art. In certain embodiments, a donor construct is used to integrate a polynucleotide sequence encoding the detectable marker. In certain embodiments, the donor construct may comprise a nucleotide sequence encoding: a detectable marker, and optionally, a resistance gene operably linked to a separate regulatory sequence. Cells having the donor construct integrated can be selected based on fluorescence of the detectable marker. Cells having the donor construct integrated can be selected based on selection of cells expressing the resistance gene. The cells can be further selected by determining the integration site of the donor construct.

[0176] Selectable markers are known in the art and enable screening for targeted integrations. Examples of selectable markers include, but are not limited to, antibiotic resistance genes, such as beta-lactamase, neo, FabI, URA3, cam, tet, blasticidin, hyg, puromycin and the like. A selectable marker useful in accordance with the invention may be any selectable marker appropriate for use in a eukaryotic cell, such as a mammalian cell, or more specifically a human cell. One of skill in the art will understand and be able to identify and use selectable markers in accordance with the invention.

[0177] In certain embodiments, the donor construct is a plasmid, vector, PCR product, or synthesized polynucleotide sequence. In certain embodiments, the donor construct is modified to increase stability or to increase efficiency of integration into a genomic locus. In certain embodiments, the donor construct is modified by a 5′ and/or 3′ phosphorylation modification. In certain embodiments, the donor construct is modified by one or more internal or terminal PTO modifications. Phosphorothioate (PTO) modifications are used to generate nuclease resistant oligonucleotides. In PTO oligonucleotides, a non-bridging oxygen is replaced by a sulfur atom. Therefore, PTOs are also known as “S-oligos”. Phosphorothioate can be introduced to an oligonucleotide at the 5′- or 3′-end to inhibits exonuclease degradation and internally to limit the attack by endonucleases. In certain embodiments, the donor construct is obtained using PCR amplification and the 5′ phosphorylation is introduced using 5′ phosphorylated primers.

[0178] In certain embodiments, a genetic modifying agent is used to target the donor construct sequence to the correct genomic location (e.g., CRISPR, TALEN, Zinc finger protein, meganuclease).

[0179] In certain embodiments, a method of tagging genes in cells uses a donor template having homology arms that can be integrated at a target locus in the genome of a cell using homology dependent based repair mechanisms. In certain embodiments, a method of tagging genes in cells uses a generic donor template that can be integrated at any target locus in the genome of a cell using homology independent based repair mechanisms. In certain embodiments, gene tagging uses a CRISPR system. In certain embodiments, gene tagging uses a system that alleviates the need for homology templates. Previous reports using zinc-finger nucleases, TALE effector nucleases or CRISPR-Cas9 technology have shown that plasmids containing an endonuclease cleavage site can be integrated in a homology-independent manner and any of these methods may be used for constructing the tagged pluripotent population of cells of the present invention (see, e.g., Lackner, D. H. et al. A generic strategy for CRISPR-Cas9-mediated gene tagging. Nat. Commun. 6:10237 doi: 10.1038/ncomms10237 (2015); Auer, et al., Highly efficient CRISPR/Cas9-mediated knock-in in zebrafish by homology-independent DNA repair. Genome Res. 24, 142-153 (2014); Maresca, et al., Obligate ligation-gated recombination (ObLiGaRe): custom-designed nuclease-mediated targeted integration through nonhomologous end joining. Genome Res. 23, 539-546 (2013); and Cristea, S. et al., In vivo cleavage of transgene donors promotes nuclease-mediated targeted integration. Biotechnol. Bioeng. 110, 871-880 (2013)).

[0180] In certain embodiments, cells are tagged by introducing a ribonucleoprotein complex (RNP) comprising a donor sequence, guide sequences targeting a genomic locus and a CRISPR system. Delivery of CRISPR RNP complexes is described further herein. For example, the RNP complexes may be delivered to a population of cells by transfection.

[0181] In certain embodiments, the detectable marker is integrated downstream of the marker gene. In certain embodiments, the detectable marker is integrated upstream of the marker gene.

[0182] In certain embodiments, the detectable marker is separated from the marker gene by a ribosomal skipping site. Ribosomal ‘skipping’ refers to generating more than one protein during translation where a specific sequence in the nascent peptide chain prevents the ribosome from creating the peptide bond with the next proline. Translation continues and gives rise to a second chain. This mechanism results in apparent co-translational cleavage of the polyprotein. This process is induced by a ‘2A-like’, or CHYSEL (cis-acting hydrolase element) sequence. In other words, a normal peptide bond is impaired at the site, resulting in two discontinuous protein fragments from one translation event.

[0183] In certain embodiments, the detectable marker is a fluorescent protein such as green fluorescent protein (GFP), enhanced green fluorescent protein (EGFP), red fluorescent protein (RFP), blue fluorescent protein (BFP), cyan fluorescent protein (CFP), yellow fluorescent protein (YFP), miRFP (e.g., miRFP670, see, Shcherbakova, et al., Nat Commun. 2016; 7: 12405), mCherry, tdTomato, DsRed-Monomer, DsRed-Express, DSRed-Express2, DsRed2, AsRed2, mStrawberry, mPlum, mRaspberry, HcRed1, E2-Crimson, mOrange, mOrange2, mBanana, ZsYellow1, TagBFP, mTagBFP2, Azurite, EBFP2, mKalamal, Sirius, Sapphire, T-Sapphire, ECFP, Cerulean, SCFP3A, mTurquoise, mTurquoise2, monomelic Midoriishi-Cyan, TagCFP, niTFP1, Emerald, Superfolder GFP, Monomeric Azami Green, TagGFP2, mUKG, mWasabi, Clover, mNeonGreen, Citrine, Venus, SYFP2, TagYFP, Monomeric Kusabira-Orange, mKOk, mK02, mTangerine, mApple, mRuby, mRuby2, HcRed-Tandem, mKate2, mNeptune, NiFP, mkeima Red, LSS-mKate1, LSS-mkate2, mBeRFP, PA-GFP, PAmCherry1, PATagRFP, TagRFP6457, IFP1.2, iRFP, Kaede (green), Kaede (red), KikGR1 (green), KikGR1 (red), PS-CFP2, mEos2 (green), mEos2 (red), mEos3.2 (green), mEos3.2 (red), PSmOrange, Dronpa, Dendra2, Timer, AmCyan1, or a combination thereof. In certain embodiments, the detectable marker is a cell surface marker. In other instances, the cell surface marker is a marker not normally expressed on the cells, such as a truncated nerve growth factor receptor (tNGFR), a truncated epidermal growth factor receptor (tEGFR), CD8, truncated CD8, CD19, truncated CD19, a variant thereof, a fragment thereof, a derivative thereof, or a combination thereof.

[0184] In certain embodiments, the signal of the detectable marker may be enhanced by using a fluorescently labeled antibody, antibody fragment, nanobody, or aptamer. The binding agent may be specific to the detectable marker.

### Flow-FISH

[0185] In certain embodiments, Flow FISH (fluorescent in-situ hybridization) is used to identify target cells in transcription factor screens. Flow FISH is a cytogenetic technique to quantify the copy number of RNA or specific repetitive elements in genomic DNA of whole cell populations via the combination of flow cytometry with cytogenetic fluorescent in situ hybridization staining protocols (see, e.g., C. P. Fulco et al., Activity-by-contact model of enhancer-promoter regulation from thousands of CRISPR perturbations. Nat Genet 51, 1664-1669 (2019); and Coillard A, Segura E. Visualization of RNA at the Single Cell Level by Fluorescent in situ Hybridization Coupled to Flow Cytometry. Bio Protoc. 2018; 8(12):e2892). The method provides for detecting marker genes for indicating differentiation of target cells using gene specific FISH probes and sorting the cells. In certain embodiments, multiple markers are used to increase specificity. Selecting for multiple reporter genes at the same time can narrow down target cell types because in certain embodiments one gene is not specific enough depending on the target cell type. Additionally, the assay is versatile in that reporter genes can be added or changed by applying different probes. Flow FISH combines FISH to fluorescently label mRNA of reporter genes and flow cytometry (see, e.g., Arrigucci et al., FISH-Flow, a protocol for the concurrent detection of mRNA and protein in single cells using fluorescence in situ hybridization and flow cytometry, Nat Protoc. 2017 June; 12(6):1245-1260. doi:10.1038/nprot.2017.039). In certain embodiments, the mRNA of reporter genes is fluorescently labeled; target cells are selected by flow cytometry; and TF barcodes are sequenced (e.g., amplified and then sequenced) to identify TFs enriched in the target cells. In certain embodiments, the marker genes are selected, such that they are specifically expressed only in the target cell. In this way, false positive selection or background is avoided. In certain embodiments, the assay is optimized to remove background fluorescence and to select for true positive cells.

### Single Cell RNA-seq

[0186] In certain embodiments, the invention provides for identifying transcription factors whose overexpression can differentiate stem cells or progenitor cells into target cells by using single cell sequencing methods. In certain embodiments, transcription factors are introduced to a population of cells and single cells are analyzed by single cell sequencing. The population of cells may be analyzed with or without an integrated detectable marker. The introduced transcription factors can be identified in cells having a gene signature or biological program of interest (e.g., signature characteristic of the target cell). As used herein a “signature” may encompass any gene or genes, protein or proteins, or epigenetic element(s) whose expression profile or whose occurrence is associated with a specific cell type, subtype, or cell state of a specific cell type or subtype within a population of cells. A gene signature as used herein, may thus refer to any set of up- and down-regulated genes that are representative of a cell type or subtype or cell state. In certain embodiments, transcription factors are introduced at a high MOI to identify combinations of transcription factors capable of inducing a signature or biological program characteristic of the target cell of interest.

[0187] The transcription factors introduced may be identified by a barcode associated with each transcription factor. The barcode may be expressed on a transcript capable of identification by RNA-seq (e.g., a poly-A tailed transcript including the barcode sequence). In certain embodiments, single cells can be analyzed for a target cell phenotype or target cell subtypes after introducing transcription factors identified by the screening methods described herein. Thus, single cell sequencing may be used for identification of transcription factors and for analysis of cells differentiated by overexpressing transcription factors.

[0188] In certain embodiments, the invention involves single cell RNA sequencing (see, e.g., Kalisky, T., Blainey, P. & Quake, S. R. Genomic Analysis at the Single-Cell Level. Annual review of genetics 45, 431-445, (2011); Kalisky, T. & Quake, S. R. Single-cell genomics. Nature Methods 8, 311-314 (2011); Islam, S. et al. Characterization of the single-cell transcriptional landscape by highly multiplex RNA-seq. Genome Research, (2011); Tang, F. et al. RNA-Seq analysis to capture the transcriptome landscape of a single cell. Nature Protocols 5, 516-535, (2010); Tang, F. et al. mRNA-Seq whole-transcriptome analysis of a single cell. Nature Methods 6, 377-382, (2009); Ramskold, D. et al. Full-length mRNA-Seq from single-cell levels of RNA and individual circulating tumor cells. Nature Biotechnology 30, 777-782, (2012); and Hashimshony, T., Wagner, F., Sher, N. & Yanai, I. CEL-Seq: Single-Cell RNA-Seq by Multiplexed Linear Amplification. Cell Reports, Cell Reports, Volume 2, Issue 3, p 666-673, 2012).

[0189] In certain embodiments, the invention involves plate based single cell RNA sequencing (see, e.g., Picelli, S. et al., 2014, “Full-length RNA-seq from single cells using Smart-seq2” Nature protocols 9, 171-181, doi:10.1038/nprot.2014.006).

[0190] In certain embodiments, the invention involves high-throughput single-cell RNA-seq. In this regard reference is made to Macosko et al., 2015, “Highly Parallel Genome-wide Expression Profiling of Individual Cells Using Nanoliter Droplets” Cell 161, 1202-1214; International Patent Application No. PCT/US2015/049178, published as International Patent Publication No. WO 2016/040476 on Mar. 17, 2016; Klein et al., 2015, “Droplet Barcoding for Single-Cell Transcriptomics Applied to Embryonic Stem Cells” Cell 161, 1187-1201; International Patent Application No. PCT/US2016/027734, published as International Patent Publication No. WO 2016/168584A1 on Oct. 20, 2016; Zheng, et al., 2016, “Haplotyping germline and cancer genomes with high-throughput linked-read sequencing” Nature Biotechnology 34, 303-311; Zheng, et al., 2017, “Massively parallel digital transcriptional profiling of single cells” Nat. Commun. 8, 14049 doi: 10.1038/ncomms14049; International Patent Publication No. WO 2014 210353A2; Zilionis, et al., 2017, “Single-cell barcoding and sequencing using droplet microfluidics” Nat Protoc. January; 12(1):44-73; Cao et al., 2017, “Comprehensive single cell transcriptional profiling of a multicellular organism by combinatorial indexing” bioRxiv preprint first posted online Feb. 2, 2017, doi: dx.doi.org/10.1101/104844; Rosenberg et al., 2017, “Scaling single cell transcriptomics through split pool barcoding” bioRxiv preprint first posted online Feb. 2, 2017, doi: dx.doi.org/10.1101/105163; Rosenberg et al., “Single-cell profiling of the developing mouse brain and spinal cord with split-pool barcoding” Science 15 Mar. 2018; Vitak, et al., “Sequencing thousands of single-cell genomes with combinatorial indexing” Nature Methods, 14(3):302-308, 2017; Cao, et al., Comprehensive single-cell transcriptional profiling of a multicellular organism. Science, 357(6352):661-667, 2017; Gierahn et al., “Seq-Well: portable, low-cost RNA sequencing of single cells at high throughput” Nature Methods 14, 395-398 (2017); and Hughes, et al., “Highly Efficient, Massively-Parallel Single-Cell RNA-Seq Reveals Cellular States and Molecular Features of Human Skin Pathology” bioRxiv 689273; doi: doi.org/10.1101/689273, all the contents and disclosure of each of which are herein incorporated by reference in their entirety.

[0191] In certain embodiments, the invention involves single nucleus RNA sequencing. In this regard reference is made to Swiech et al., 2014, “In vivo interrogation of gene function in the mammalian brain using CRISPR-Cas9” Nature Biotechnology Vol. 33, pp. 102-106; Habib et al., 2016, “Div-Seq: Single-nucleus RNA-Seq reveals dynamics of rare adult newborn neurons” Science, Vol. 353, Issue 6302, pp. 925-928; Habib et al., 2017, “Massively parallel single-nucleus RNA-seq with DroNc-seq” Nat Methods. 2017 October; 14(10):955-958; International Patent Application No. PCT/US2016/059239, published as WO 2017/164936 on Sep. 28, 2017; Patent Application No. PCT/US2018/060860, published as WO 2019/094984 on May 16, 2019; Patent Application No. PCT/US2019/055894, published as WO 2020/077236 on Apr. 16, 2020; and Drokhlyansky, et al., “The enteric nervous system of the human and mouse colon at a single-cell resolution,” bioRxiv 746743; doi: doi.org/10.1101/746743, which are herein incorporated by reference in their entirety.

[0192] In certain embodiments, the invention involves the Assay for Transposase Accessible Chromatin using sequencing (ATAC-seq) as described. (see, e.g., Buenrostro, et al., Transposition of native chromatin for fast and sensitive epigenomic profiling of open chromatin, DNA-binding proteins and nucleosome position. Nature methods 2013; 10 (12): 1213-1218; Buenrostro et al., Single-cell chromatin accessibility reveals principles of regulatory variation. Nature 523, 486-490 (2015); Cusanovich, D. A., Daza, R., Adey, A., Pliner, H., Christiansen, L., Gunderson, K. L., Steemers, F. J., Trapnell, C. & Shendure, J. Multiplex single-cell profiling of chromatin accessibility by combinatorial cellular indexing. Science. 2015 May 22; 348(6237):910-4. doi: 10.1126/science.aab1601. Epub 2015 May 7; US20160208323A1; US20160060691A1; and WO2017156336A1).

[0193] In certain embodiments, the invention involves single cell multimodal data. Multiomic review (see, e.g., Lee J, Hyeon D Y, Hwang D. Single-cell multiomics: technologies and data analysis methods. Exp Mol Med. 2020; 52(9):1428-1442. doi:10.1038/s12276-020-0420-2). In certain embodiments, SHARE-Seq (Ma, S. et al. Chromatin potential identified by shared single cell profiling of RNA and chromatin. bioRxiv 2020.06.17.156943 (2020) doi:10.1101/2020.06.17.156943) is used to generate single cell RNA-seq and chromatin accessibility data. In certain embodiments, CITE-seq (Stoeckius, M. et al. Simultaneous epitope and transcriptome measurement in single cells. Nat. Methods 14, 865-868 (2017)) (cellular proteins) is used to generate single cell RNA-seq and proteomics data. In certain embodiments, Patch-seq (Cadwell, C. R. et al. Electrophysiological, transcriptomic and morphologic profiling of single neurons using Patch-seq. Nat. Biotechnol. 34, 199-203 (2016)) is used to generate single cell RNA-seq and patch-clamping electrophysiological recording and morphological analysis of single neurons data (see, e.g., van den Hurk, et al., Patch-Seq Protocol to Analyze the Electrophysiology, Morphology and Transcriptome of Whole Single Neurons Derived From Human Pluripotent Stem Cells, Front Mol Neurosci. 2018; 11: 261).

### Transcription Factor Modules

[0194] In example embodiments, the invention provides for identifying transcription factors whose overexpression can differentiate stem cells or progenitor cells into target cells by using single cell sequencing methods. In example embodiments, selecting cells further comprises grouping one or more of the transcription factors into modules that alter expression of the same gene programs, such that transcription factors in the same modules are co-functional (i.e., function in similar pathways or have similar functions). As used herein the term “gene program” or “program” can be used interchangeably with “biological program”, “expression program”, “transcriptional program”, “expression profile”, or “expression program” and may refer to a set of genes that share a role in a biological function (e.g., an activation program, cell differentiation program, proliferation program). Biological programs can include a pattern of gene expression that result in a corresponding physiological event or phenotypic trait. Biological programs can include up to several hundred genes that are expressed in a spatially and temporally controlled fashion. Expression of individual genes can be shared between biological programs. Expression of individual genes can be shared among different single cell types; however, expression of a biological program may be cell type specific or temporally specific (e.g., the biological program is expressed in a cell type at a specific time). Multiple biological programs may include the same gene, reflecting the gene's roles in different processes. Expression of a biological program may be regulated by a master switch, such as a transcription factor or chromatin modifier. As used herein, the term “topic” refers to a biological program. The biological program can be modeled as a distribution over expressed genes.

[0195] One method to identify cell programs is non-negative matrix factorization (NMF) (see, e.g., Lee D D and Seung H S, Learning the parts of objects by non-negative matrix factorization, Nature. 1999 Oct. 21; 401(6755):788-91). As an alternative, a generative model based on latent Dirichlet allocation (LDA) (Blei, D. M., Ng, A. Y., and Jordan, M. I. (2003). Latent Dirichlet allocation. J Mach Learn Res 3, 993-1022), or “topic modeling” may be created. Topic modeling is a statistical data mining approach for discovering the abstract topics that explain the words occurring in a collection of text documents. Originally developed to discover key semantic topics reflected by the words used in a corpus of documents (Dumais, S. T., Furnas, G. W., Landauer, T. K., and Harshman, R. (1990). Indexing by Latent Semantic Analysis. Journal of the American Society for Information Science 41, 391-407), topic modeling can be used to explore gene programs (“topics”) in each cell (“document”) based on the distribution of genes (“words”) expressed in the cell. A gene can belong to multiple programs, and its relative relevance in the topic is reflected by a weight. A cell is then represented as a weighted mixture of topics, where the weights reflect the importance of the corresponding gene program in the cell. Topic modeling using LDA has recently been applied to scRNA-seq data (see, e.g., Bielecki, Riesenfeld, Kowalczyk, et al., 2018 Skin inflammation driven by differentiation of quiescent tissue-resident ILCs into a spectrum of pathogenic effectors. bioRxiv 461228; and duVerle, D. A., Yotsukura, S., Nomura, S., Aburatani, H., and Tsuda, K. (2016). CellTree: an R/bioconductor package to infer the hierarchical structure of cell populations from single-cell RNA-seq data. BMC Bioinformatics 17, 363). Other approaches include word embeddings. Identifying cell programs can recover cell states and bridge differences between cells. Single cell types may span a range of continuous cell states (see, e.g., Shekhar et al., Comprehensive Classification of Retinal Bipolar Neurons by Single-Cell Transcriptomics Cell. 2016 Aug. 25; 166(5):1308-1323.e30; and Bielecki, et al., 2018).

### Pseudotime

[0196] In example embodiments, the invention provides for identifying transcription factors whose overexpression can differentiate stem cells or progenitor cells into target cell types by using single cell sequencing methods. In example embodiments, selecting cells further comprises inferring pseudotime distribution of cells by comparing expression profiles of single cells overexpressing one or more of the transcription factors to those overexpressing controls (e.g., empty vector not expressing a transcription factor or a vector overexpressing a control protein), wherein transcription factors that increase pseudotimes direct differentiation. The methods of the invention can use any trajectory inference (TI) method (see, e.g., Cao J, Spielmann M, Qiu X, et al. The single-cell transcriptional landscape of mammalian organogenesis. Nature. 2019; 566(7745):496-502; Chen H, Albergante L, Hsu J Y, et al. Single-cell trajectories reconstruction, exploration and mapping of omics data with STREAM. Nat Commun. 2019; 10(1):1903; and Van den Berge K, Roux de Bézieux H, Street K, et al. Trajectory-based differential expression analysis for single-cell sequencing data. Nat Commun. 2020; 11(1):1201).

[0197] Cellular processes, such as cell differentiation and cell maturation, are dynamic in nature and not always well described by discrete analysis like clustering. Therefore, other methods such as single-cell trajectory inference and pseudotime estimation have emerged. These methods allow to study cellular dynamics, delineate cell developmental lineages, and characterize the transition between different cell states. Briefly, single cells are ordered along deterministic or probabilistic trajectories and a numeric value referred to as pseudotime is assigned to each cell to indicate how far it progresses along a dynamic process of interest. Cell trajectory analysis, also known as pseudo-time series (pseudotime) analysis, uses single cell gene expression to order individual cells at pseudo-time, placing the cells at appropriate trajectory positions corresponding to biological processes, such as cell differentiation, by way of the individual cell's asynchronous biological processes. Most TI methods share a common workflow: dimensionality reduction followed by inference of lineages and pseudotimes in the reduced dimensional space. In that reduced dimensional space, a cell's pseudotime for a given lineage is the distance, along the lineage, between the cell and the origin of the lineage. For cells overexpressing TFs, the origin is defined using cells overexpressing controls.

### Target Cell Types

[0198] Target cell types may include, but are not limited to an immune cell, intestinal cell, liver cell, kidney cell, lung cell, brain cell, epithelial cell, endoderm cell, neuron, ectoderm cell, islet cell, acinar cell, hematopoietic cell, hepatocyte, skin/keratinocyte, melanocyte, bone/osteocyte, hair/dermal papilla cell, cartilage/chondrocyte, fat cell/adipocyte, skeletal muscular cell, endothelium cell, cardiac muscle/cardiomyocyte, trophoblast. Target cells may also include progenitor cells associated with target cell types. Markers specific to target cell types are well known in the art.

[0199] In certain embodiments, target cell types are neural progenitors. In preferred embodiments, neural progenitors are differentiated to obtain a target cell type that is a neuron, astrocyte and/or oligodendrocyte. In more preferred embodiments, the target cell type is a neuron. In more preferred embodiments, the neuron is a GABAergic neuron. Neurons that produce GABA as their output are called GABAergic neurons, and have chiefly inhibitory action at receptors in the adult vertebrate (Rudy, et al., Three Groups of Interneurons Account for Nearly 100% of Neocortical GABAergic Neurons, Dev Neurobiol. 2011 Jan. 1; 71(1): 45-61). Malfunction of GABAergic neurons has been implicated in a number of diseases ranging from epilepsy to schizophrenia, anxiety disorders and autism. Id.

[0200] In certain embodiments, cells differentiated by overexpression of specific transcription factors can be further analyzed. Differentiated target cells can be analyzed for expression of biomarkers specific to the target cells or specific to a phenotype associated with the target cells.

[0201] The term “biomarker” is widespread in the art and commonly broadly denotes a biological molecule, more particularly an endogenous biological molecule, and/or a detectable portion thereof, whose qualitative and/or quantitative evaluation in a tested object (e.g., in or on a cell, cell population, tissue, organ, or organism) is predictive or informative with respect to one or more aspects of the tested object's phenotype and/or genotype. The terms “marker” and “biomarker” may be used interchangeably throughout this specification. Biomarkers as intended herein may be nucleic acid-based or peptide-, polypeptide- and/or protein-based. For example, a marker may be comprised of peptide(s), polypeptide(s) and/or protein(s) encoded by a given gene, or of detectable portions thereof. Further, whereas the term “nucleic acid” generally encompasses DNA, RNA and DNA/RNA hybrid molecules, in the context of markers the term may typically refer to heterogeneous nuclear RNA (hnRNA), pre-mRNA, messenger RNA (mRNA), or complementary DNA (cDNA), or detectable portions thereof. Such nucleic acid species are particularly useful as markers, since they contain qualitative and/or quantitative information about the expression of the gene. Particularly preferably, a nucleic acid-based marker may encompass mRNA of a given gene, or cDNA made of the mRNA, or detectable portions thereof. Any such nucleic acid(s), peptide(s), polypeptide(s) and/or protein(s) encoded by or produced from a given gene are encompassed by the term “gene product(s)”.

[0202] Preferably, markers as intended herein may be extracellular or cell surface markers, as methods to measure extracellular or cell surface marker(s) need not disturb the integrity of the cell membrane and may not require fixation/permeabilization of the cells.

[0203] Unless otherwise apparent from the context, reference herein to any marker, such as a peptide, polypeptide, protein, or nucleic acid, may generally also encompass modified forms of said marker, such as bearing post-expression modifications including, for example, phosphorylation, glycosylation, lipidation, methylation, cysteinylation, sulphonation, glutathionylation, acetylation, oxidation of methionine to methionine sulphoxide or methionine sulphone, and the like.

[0204] The term “peptide” as used throughout this specification preferably refers to a polypeptide as used herein consisting essentially of 50 amino acids or less, e.g., 45 amino acids or less, preferably 40 amino acids or less, e.g., 35 amino acids or less, more preferably 30 amino acids or less, e.g., 25 or less, 20 or less, 15 or less, 10 or less or 5 or less amino acids.

[0205] The term “polypeptide” as used throughout this specification generally encompasses polymeric chains of amino acid residues linked by peptide bonds. Hence, insofar a protein is only composed of a single polypeptide chain, the terms “protein” and “polypeptide” may be used interchangeably herein to denote such a protein. The term is not limited to any minimum length of the polypeptide chain. The term may encompass naturally, recombinantly, semi-synthetically or synthetically produced polypeptides. The term also encompasses polypeptides that carry one or more co- or post-expression-type modifications of the polypeptide chain, such as, without limitation, glycosylation, acetylation, phosphorylation, sulfonation, methylation, ubiquitination, signal peptide removal, N-terminal Met removal, conversion of pro-enzymes or pre-hormones into active forms, etc. The term further also includes polypeptide variants or mutants which carry amino acid sequence variations vis-à-vis a corresponding native polypeptide, such as, e.g., amino acid deletions, additions and/or substitutions. The term contemplates both full-length polypeptides and polypeptide parts or fragments, e.g., naturally-occurring polypeptide parts that ensue from processing of such full-length polypeptides.

[0206] The term “protein” as used throughout this specification generally encompasses macromolecules comprising one or more polypeptide chains, i.e., polymeric chains of amino acid residues linked by peptide bonds. The term may encompass naturally, recombinantly, semi-synthetically or synthetically produced proteins. The term also encompasses proteins that carry one or more co- or post-expression-type modifications of the polypeptide chain(s), such as, without limitation, glycosylation, acetylation, phosphorylation, sulfonation, methylation, ubiquitination, signal peptide removal, N-terminal Met removal, conversion of pro-enzymes or pre-hormones into active forms, etc. The term further also includes protein variants or mutants which carry amino acid sequence variations vis-à-vis a corresponding native protein, such as, e.g., amino acid deletions, additions and/or substitutions. The term contemplates both full-length proteins and protein parts or fragments, e.g., naturally-occurring protein parts that ensue from processing of such full-length proteins.

[0207] The reference to any marker, including any peptide, polypeptide, protein, or nucleic acid, corresponds to the marker commonly known under the respective designations in the art. The terms encompass such markers of any organism where found, and particularly of animals, preferably warm-blooded animals, more preferably vertebrates, yet more preferably mammals, including humans and non-human mammals, still more preferably of humans.

[0208] The terms particularly encompass such markers, including any peptides, polypeptides, proteins, or nucleic acids, with a native sequence, i.e., ones of which the primary sequence is the same as that of the markers found in or derived from nature. A skilled person understands that native sequences may differ between different species due to genetic divergence between such species. Moreover, native sequences may differ between or within different individuals of the same species due to normal genetic diversity (variation) within a given species. Also, native sequences may differ between or even within different individuals of the same species due to somatic mutations, or post-transcriptional or post-translational modifications. Any such variants or isoforms of markers are intended herein. Accordingly, all sequences of markers found in or derived from nature are considered “native”. The terms encompass the markers when forming a part of a living organism, organ, tissue or cell, when forming a part of a biological sample, as well as when at least partly isolated from such sources. The terms also encompass markers when produced by recombinant or synthetic means.

[0209] In certain embodiments, markers, including any peptides, polypeptides, proteins, or nucleic acids, may be human, i.e., their primary sequence may be the same as a corresponding primary sequence of or present in a naturally occurring human markers. Hence, the qualifier “human” in this connection relates to the primary sequence of the respective markers, rather than to their origin or source. For example, such markers may be present in or isolated from samples of human subjects or may be obtained by other means (e.g., by recombinant expression, cell-free transcription or translation, or non-biological nucleic acid or peptide synthesis).

[0210] The reference herein to any marker, including any peptide, polypeptide, protein, or nucleic acid, also encompasses fragments thereof. Hence, the reference herein to measuring (or measuring the quantity of) any one marker may encompass measuring the marker and/or measuring one or more fragments thereof.

[0211] For example, any marker and/or one or more fragments thereof may be measured collectively, such that the measured quantity corresponds to the sum amounts of the collectively measured species. In another example, any marker and/or one or more fragments thereof may be measured each individually. The terms encompass fragments arising by any mechanism, in vivo and/or in vitro, such as, without limitation, by alternative transcription or translation, exo- and/or endo-proteolysis, exo- and/or endo-nucleolysis, or degradation of the peptide, polypeptide, protein, or nucleic acid, such as, for example, by physical, chemical and/or enzymatic proteolysis or nucleolysis.

[0212] The term “fragment” as used throughout this specification with reference to a peptide, polypeptide, or protein generally denotes a portion of the peptide, polypeptide, or protein, such as typically an N- and/or C-terminally truncated form of the peptide, polypeptide, or protein. Preferably, a fragment may comprise at least about 30%, e.g., at least about 50% or at least about 70%, preferably at least about 80%, e.g., at least about 85%, more preferably at least about 90%, and yet more preferably at least about 95% or even about 99% of the amino acid sequence length of said peptide, polypeptide, or protein. For example, insofar not exceeding the length of the full-length peptide, polypeptide, or protein, a fragment may include a sequence of ≥5 consecutive amino acids, or ≥10 consecutive amino acids, or ≥20 consecutive amino acids, or ≥30 consecutive amino acids, e.g., ≥40 consecutive amino acids, such as for example ≥50 consecutive amino acids, e.g., ≥60, ≥70, ≥80, ≥90, ≥100, ≥200, ≥ 300, ≥400, ≥500 or ≥600 consecutive amino acids of the corresponding full-length peptide, polypeptide, or protein.

[0213] The term “fragment” as used throughout this specification with reference to a nucleic acid (polynucleotide) generally denotes a 5′- and/or 3′-truncated form of a nucleic acid. Preferably, a fragment may comprise at least about 30%, e.g., at least about 50% or at least about 70%, preferably at least about 80%, e.g., at least about 85%, more preferably at least about 90%, and yet more preferably at least about 95% or even about 99% of the nucleic acid sequence length of said nucleic acid. For example, insofar not exceeding the length of the full-length nucleic acid, a fragment may include a sequence of ≥5 consecutive nucleotides, or ≥10 consecutive nucleotides, or ≥20 consecutive nucleotides, or ≥30 consecutive nucleotides, e.g., ≥40 consecutive nucleotides, such as for example ≥50 consecutive nucleotides, e.g., ≥60, ≥ 70, ≥80, ≥90, ≥100, ≥200, ≥300, ≥400, ≥500 or ≥600 consecutive nucleotides of the corresponding full-length nucleic acid.

[0214] Cells such as target cells as disclosed herein may in the context of the present specification be said to “comprise the expression” or conversely to “not express” one or more markers, such as one or more genes or gene products; or be described as “positive” or conversely as “negative” for one or more markers, such as one or more genes or gene products; or be said to “comprise” a defined “gene or gene product signature”.

[0215] Such terms are commonplace and well-understood by the skilled person when characterizing cell phenotypes. By means of additional guidance, when a cell is said to be positive for or to express or comprise expression of a given marker, such as a given gene or gene product, a skilled person would conclude the presence or evidence of a distinct signal for the marker when carrying out a measurement capable of detecting or quantifying the marker in or on the cell. Suitably, the presence or evidence of the distinct signal for the marker would be concluded based on a comparison of the measurement result obtained for the cell to a result of the same measurement carried out for a negative control (for example, a cell known to not express the marker) and/or a positive control (for example, a cell known to express the marker). Where the measurement method allows for a quantitative assessment of the marker, a positive cell may generate a signal for the marker that is at least 1.5-fold higher than a signal generated for the marker by a negative control cell or than an average signal generated for the marker by a population of negative control cells, e.g., at least 2-fold, at least 4-fold, at least 10-fold, at least 20-fold, at least 30-fold, at least 40-fold, at least 50-fold higher or even higher. Further, a positive cell may generate a signal for the marker that is 3.0 or more standard deviations, e.g., 3.5 or more, 4.0 or more, 4.5 or more, or 5.0 or more standard deviations, higher than an average signal generated for the marker by a population of negative control cells.

[0216] A marker, for example a gene or gene product, for example a peptide, polypeptide, protein, or nucleic acid, or a group of two or more markers, is “detected” or “measured” in a tested object (e.g., in or on a cell, cell population, tissue, organ, or organism) when the presence or absence and/or quantity of said marker or said group of markers is detected or determined in the tested object, preferably substantially to the exclusion of other molecules and analytes, e.g., other genes or gene products.

[0217] The terms “increased” or “increase” or “upregulated” or “upregulate” as used herein generally mean an increase by a statically significant amount. For avoidance of doubt, “increased” means a statistically significant increase of at least 10% as compared to a reference level, including an increase of at least 20%, at least 30%, at least 40%, at least 50%, at least 60%, at least 70%, at least 80%, at least 90%, at least 100% or more, including, for example at least 2-fold, at least 3-fold, at least 4-fold, at least 5-fold, at least 10-fold increase or greater as compared to a reference level, as that term is defined herein.

[0218] The term “reduced” or “reduce” or “decrease” or “decreased” or “downregulate” or “downregulated” as used herein generally means a decrease by a statistically significant amount relative to a reference. For avoidance of doubt, “reduced” means statistically significant decrease of at least 10% as compared to a reference level, for example a decrease by at least 20%, at least 30%, at least 40%, at least 50%, or at least 60%, or at least 70%, or at least 80%, at least 90% or more, up to and including a 100% decrease (i.e., absent level as compared to a reference sample), or any decrease between 10-100% as compared to a reference level, as that.

[0219] The terms “quantity”, “amount” and “level” are synonymous and generally well-understood in the art. The terms as used throughout this specification may particularly refer to an absolute quantification of a marker in a tested object (e.g., in or on a cell, cell population, tissue, organ, or organism, e.g., in a biological sample of a subject), or to a relative quantification of a marker in a tested object, i.e., relative to another value such as relative to a reference value, or to a range of values indicating a base-line of the marker. Such values or ranges may be obtained as conventionally known.

[0220] An absolute quantity of a marker may be advantageously expressed as weight or as molar amount, or more commonly as a concentration, e.g., weight per volume or mol per volume. A relative quantity of a marker may be advantageously expressed as an increase or decrease or as a fold-increase or fold-decrease relative to said another value, such as relative to a reference value. Performing a relative comparison between first and second variables (e.g., first and second quantities) may but need not require determining first the absolute values of said first and second variables. For example, a measurement method may produce quantifiable readouts (such as, e.g., signal intensities) for said first and second variables, wherein said readouts are a function of the value of said variables, and wherein said readouts may be directly compared to produce a relative value for the first variable vs. the second variable, without the actual need to first convert the readouts to absolute values of the respective variables.

[0221] Reference values may be established according to known procedures previously employed for other cell populations, biomarkers and gene or gene product signatures. For example, a reference value may be established in an individual or a population of individuals characterized by a particular diagnosis, prediction and/or prognosis of said disease or condition (i.e., for whom said diagnosis, prediction and/or prognosis of the disease or condition holds true). Such population may comprise without limitation 2 or more, 10 or more, 100 or more, or even several hundred or more individuals.

[0222] A “deviation” of a first value from a second value may generally encompass any direction (e.g., increase: first value>second value; or decrease: first value<second value) and any extent of alteration.

[0223] For example, a deviation may encompass a decrease in a first value by, without limitation, at least about 10% (about 0.9-fold or less), or by at least about 20% (about 0.8-fold or less), or by at least about 30% (about 0.7-fold or less), or by at least about 40% (about 0.6-fold or less), or by at least about 50% (about 0.5-fold or less), or by at least about 60% (about 0.4-fold or less), or by at least about 70% (about 0.3-fold or less), or by at least about 80% (about 0.2-fold or less), or by at least about 90% (about 0.1-fold or less), relative to a second value with which a comparison is being made.

[0224] For example, a deviation may encompass an increase of a first value by, without limitation, at least about 10% (about 1.1-fold or more), or by at least about 20% (about 1.2-fold or more), or by at least about 30% (about 1.3-fold or more), or by at least about 40% (about 1.4-fold or more), or by at least about 50% (about 1.5-fold or more), or by at least about 60% (about 1.6-fold or more), or by at least about 70% (about 1.7-fold or more), or by at least about 80% (about 1.8-fold or more), or by at least about 90% (about 1.9-fold or more), or by at least about 100% (about 2-fold or more), or by at least about 150% (about 2.5-fold or more), or by at least about 200% (about 3-fold or more), or by at least about 500% (about 6-fold or more), or by at least about 700% (about 8-fold or more), or like, relative to a second value with which a comparison is being made.

[0225] Preferably, a deviation may refer to a statistically significant observed alteration. For example, a deviation may refer to an observed alteration which falls outside of error margins of reference values in a given population (as expressed, for example, by standard deviation or standard error, or by a predetermined multiple thereof, e.g., ±1×SD or ±2×SD or ±3×SD, or ±1×SE or ±2×SE or ±3×SE). Deviation may also refer to a value falling outside of a reference range defined by values in a given population (for example, outside of a range which comprises ≥40%, ≥50%, ≥60%, ≥70%, ≥75% or ≥80% or ≥85% or ≥90% or ≥95% or even ≥100% of values in said population).

[0226] In a further embodiment, a deviation may be concluded if an observed alteration is beyond a given threshold or cut-off. Such threshold or cut-off may be selected as generally known in the art to provide for a chosen sensitivity and/or specificity of the prediction methods, e.g., sensitivity and/or specificity of at least 50%, or at least 60%, or at least 70%, or at least 80%, or at least 85%, or at least 90%, or at least 95%.

[0227] For example, receiver-operating characteristic (ROC) curve analysis can be used to select an optimal cut-off value of the quantity of a given immune cell population, biomarker or gene or gene product signatures, for clinical use of the present diagnostic tests, based on acceptable sensitivity and specificity, or related performance measures which are well-known per se, such as positive predictive value (PPV), negative predictive value (NPV), positive likelihood ratio (LR+), negative likelihood ratio (LR−), Youden index, or similar.

[0228] In certain embodiments, the target cells may be detected, quantified, sorted or isolated using a technique selected from the group consisting of flow cytometry, mass cytometry, fluorescence activated cell sorting (FACS), fluorescence microscopy, affinity separation, magnetic cell separation, microfluidic separation, RNA-seq (e.g., bulk or single cell), quantitative PCR, MERFISH (multiplex (in situ) RNA FISH) and combinations thereof. The technique may employ one or more agents capable of specifically binding to one or more gene products expressed or not expressed by the target cells, preferably on the cell surface of the target cells. The one or more agents may be one or more antibodies. Other methods including absorbance assays and colorimetric assays are known in the art and may be used herein.

[0229] In other example embodiments, detection of a marker may include immunological assay methods, wherein the ability of an assay to separate, detect and/or quantify a marker (such as, preferably, peptide, polypeptide, or protein) is conferred by specific binding between a separable, detectable and/or quantifiable immunological binding agent (antibody) and the marker. Immunological assay methods include without limitation immunohistochemistry, immunocytochemistry, flow cytometry, mass cytometry, fluorescence activated cell sorting (FACS), fluorescence microscopy, fluorescence based cell sorting using microfluidic systems, immunoaffinity adsorption based techniques such as affinity chromatography, magnetic particle separation, magnetic activated cell sorting or bead based cell sorting using microfluidic systems, enzyme-linked immunosorbent assay (ELISA) and ELISPOT based techniques, radioimmunoassay (RIA), western blot, etc.

[0230] In certain example embodiments, detection of a marker or signature may include biochemical assay methods, including inter alia assays of enzymatic activity, membrane channel activity, substance-binding activity, gene regulatory activity, or cell signaling activity of a marker, e.g., peptide, polypeptide, protein, or nucleic acid.

[0231] In other example embodiments, detection of a marker may include mass spectrometry analysis methods. Generally, any mass spectrometric (MS) techniques that are capable of obtaining precise information on the mass of peptides, and preferably also on fragmentation and/or (partial) amino acid sequence of selected peptides (e.g., in tandem mass spectrometry, MS/MS; or in post source decay, TOF MS), may be useful herein for separation, detection and/or quantification of markers (such as, preferably, peptides, polypeptides, or proteins). Suitable peptide MS and MS/MS techniques and systems are well-known per se (see, e.g., Methods in Molecular Biology, vol. 146: “Mass Spectrometry of Proteins and Peptides”, by Chapman, ed., Humana Press 2000, ISBN 089603609x; Biemann 1990. Methods Enzymol 193: 455-79; or Methods in Enzymology, vol. 402: “Biological Mass Spectrometry”, by Burlingame, ed., Academic Press 2005, ISBN 9780121828073) and may be used herein. MS arrangements, instruments and systems suitable for biomarker peptide analysis may include, without limitation, matrix-assisted laser desorption/ionization time-of-flight (MALDI-TOF) MS; MALDI-TOF post-source-decay (PSD); MALDI-TOF/TOF; surface-enhanced laser desorption/ionization time-of-flight mass spectrometry (SELDI-TOF) MS; electrospray ionization mass spectrometry (ESI-MS); ESI-MS/MS; ESI-MS/(MS)n (n is an integer greater than zero); ESI 3D or linear (2D) ion trap MS; ESI triple quadrupole MS; ESI quadrupole orthogonal TOF (Q-TOF); ESI Fourier transform MS systems; desorption/ionization on silicon (DIOS); secondary ion mass spectrometry (SIMS); atmospheric pressure chemical ionization mass spectrometry (APCI-MS); APCI-MS/MS; APCI-(MS)n; atmospheric pressure photoionization mass spectrometry (APPI-MS); APPI-MS/MS; and APPI-(MS)n. Peptide ion fragmentation in tandem MS (MS/MS) arrangements may be achieved using manners established in the art, such as, e.g., collision induced dissociation (CID). Detection and quantification of markers by mass spectrometry may involve multiple reaction monitoring (MRM), such as described among others by Kuhn et al. 2004 (Proteomics 4: 1175-86). MS peptide analysis methods may be advantageously combined with upstream peptide or protein separation or fractionation methods, such as for example with the chromatographic and other methods.

[0232] In other example embodiments, detection of a marker may include chromatography methods. In a one example embodiment, chromatography refers to a process in which a mixture of substances (analytes) carried by a moving stream of liquid or gas (“mobile phase”) is separated into components as a result of differential distribution of the analytes, as they flow around or over a stationary liquid or solid phase (“stationary phase”), between said mobile phase and said stationary phase. The stationary phase may be usually a finely divided solid, a sheet of filter material, or a thin film of a liquid on the surface of a solid, or the like. Chromatography may be columnar. While particulars of chromatography are well known in the art, for further guidance see, e.g., Meyer M., 1998, ISBN: 047198373X, and “Practical HPLC Methodology and Applications”, Bidlingmeyer, B. A., John Wiley & Sons Inc., 1993. Exemplary types of chromatography include, without limitation, high-performance liquid chromatography (HPLC), normal phase HPLC (NP-HPLC), reversed phase HPLC (RP-HPLC), ion exchange chromatography (IEC), such as cation or anion exchange chromatography, hydrophilic interaction chromatography (HILIC), hydrophobic interaction chromatography (HIC), size exclusion chromatography (SEC) including gel filtration chromatography or gel permeation chromatography, chromatofocusing, affinity chromatography such as immunoaffinity, immobilized metal affinity chromatography, and the like.

[0233] In certain embodiments, further techniques for separating, detecting and/or quantifying markers may be used in conjunction with any of the above described detection methods. Such methods include, without limitation, chemical extraction partitioning, isoelectric focusing (IEF) including capillary isoelectric focusing (CIEF), capillary isotachophoresis (CITP), capillary electrochromatography (CEC), and the like, one-dimensional polyacrylamide gel electrophoresis (PAGE), two-dimensional polyacrylamide gel electrophoresis (2D-PAGE), capillary gel electrophoresis (CGE), capillary zone electrophoresis (CZE), micellar electrokinetic chromatography (MEKC), free flow electrophoresis (FFE), etc.

[0234] In certain examples, such methods may include separating, detecting and/or quantifying markers at the nucleic acid level, more particularly RNA level, e.g., at the level of hnRNA, pre-mRNA, mRNA, or cDNA. Standard quantitative RNA or cDNA measurement tools known in the art may be used. Non-limiting examples include hybridization-based analysis, microarray expression analysis, digital gene expression profiling (DGE), RNA-in-situ hybridization (RISH), Northern-blot analysis and the like; PCR, RT-PCR, RT-qPCR, end-point PCR, digital PCR or the like; supported oligonucleotide detection, pyrosequencing, polony cyclic sequencing by synthesis, simultaneous bi-directional sequencing, single-molecule sequencing, single molecule real time sequencing, true single molecule sequencing, hybridization-assisted nanopore sequencing, sequencing by synthesis, single-cell RNA sequencing (sc-RNA seq), or the like.

[0235] The present invention is also directed to signatures and uses thereof. In certain embodiments, a homogenous population of a target cell type (e.g., radial glia) may allow identification of specific signatures (e.g., rare signatures). As used herein a “signature” may encompass any gene or genes, protein or proteins, or epigenetic element(s) whose expression profile or whose occurrence is associated with a specific cell type, subtype, or cell state of a specific cell type or subtype within a population of cells (e.g., radial glia). In certain embodiments, the expression of the target cell signatures is dependent on epigenetic modification of the genes or regulatory elements associated with the genes. Thus, in certain embodiments, use of signature genes includes epigenetic modifications that may be detected or modulated. For ease of discussion, when discussing gene expression, any gene or genes, protein or proteins, or epigenetic element(s) may be substituted. Reference to a gene name throughout the specification encompasses the human gene, mouse gene and all other orthologues as known in the art in other organisms. As used herein, the terms “signature”, “expression profile”, or “expression program” may be used interchangeably. It is to be understood that also when referring to proteins (e.g., differentially expressed proteins), such may fall within the definition of “gene” signature. Levels of expression or activity or prevalence may be compared between different cells in order to characterize or identify for instance signatures specific for cell (sub)populations. Increased or decreased expression or activity of signature genes may be compared between different cells in order to characterize or identify for instance specific cell (sub)populations. The detection of a signature in single cells may be used to identify and quantitate for instance specific cell (sub)populations. A signature may include a gene or genes, protein or proteins, or epigenetic element(s) whose expression or occurrence is specific to a cell (sub)population, such that expression or occurrence is exclusive to the cell (sub)population. A gene signature as used herein, may thus refer to any set of up- and down-regulated genes that are representative of a cell type or subtype. A gene signature as used herein, may also refer to any set of up- and down-regulated genes between different cells or cell (sub)populations derived from a gene-expression profile. For example, a gene signature may comprise a list of genes differentially expressed in a distinction of interest.

[0236] The signature as defined herein (being it a gene signature, protein signature or other genetic or epigenetic signature) can be used to indicate the presence of a cell type, a subtype of the cell type, the state of the microenvironment of a population of cells, a particular cell type population or subpopulation, and/or the overall status of the entire cell (sub)population. Furthermore, the signature may be indicative of cells within a population of cells in vivo.

[0237] The signature according to certain embodiments of the present invention may comprise or consist of one or more genes, proteins and/or epigenetic elements, such as for instance 1, 2, 3, 4, 5, 6, 7, 8, 9, 10 or more. In certain embodiments, the signature may comprise or consist of two or more genes, proteins and/or epigenetic elements, such as for instance 2, 3, 4, 5, 6, 7, 8, 9, 10 or more. In certain embodiments, the signature may comprise or consist of three or more genes, proteins and/or epigenetic elements, such as for instance 3, 4, 5, 6, 7, 8, 9, 10 or more. In certain embodiments, the signature may comprise or consist of four or more genes, proteins and/or epigenetic elements, such as for instance 4, 5, 6, 7, 8, 9, 10 or more. In certain embodiments, the signature may comprise or consist of five or more genes, proteins and/or epigenetic elements, such as for instance 5, 6, 7, 8, 9, 10 or more. In certain embodiments, the signature may comprise or consist of six or more genes, proteins and/or epigenetic elements, such as for instance 6, 7, 8, 9, 10 or more. In certain embodiments, the signature may comprise or consist of seven or more genes, proteins and/or epigenetic elements, such as for instance 7, 8, 9, 10 or more. In certain embodiments, the signature may comprise or consist of eight or more genes, proteins and/or epigenetic elements, such as for instance 8, 9, 10 or more. In certain embodiments, the signature may comprise or consist of nine or more genes, proteins and/or epigenetic elements, such as for instance 9, 10 or more. In certain embodiments, the signature may comprise or consist of ten or more genes, proteins and/or epigenetic elements, such as for instance 10, 11, 12, 13, 14, 15, or more. It is to be understood that a signature according to the invention may for instance also include genes or proteins as well as epigenetic elements combined.

[0238] In certain embodiments, a signature is characterized as being specific for a particular target cell or target cell (sub)population if it is upregulated or only present, detected or detectable in that particular target cell or target cell (sub)population, or alternatively is downregulated or only absent, or undetectable in that particular target cell or target cell (sub)population. In this context, a signature consists of one or more differentially expressed genes/proteins or differential epigenetic elements when comparing different cells or cell (sub)populations, including comparing different target cell or target cell (sub)populations, as well as comparing target cell or target cell (sub)populations with non-target cell or non-target cell (sub)populations. It is to be understood that “differentially expressed” genes/proteins include genes/proteins which are up- or down-regulated as well as genes/proteins which are turned on or off. When referring to up- or down-regulation, in certain embodiments, such up- or down-regulation is preferably at least two-fold, such as two-fold, three-fold, four-fold, five-fold, or more, such as for instance at least ten-fold, at least 20-fold, at least 30-fold, at least 40-fold, at least 50-fold, or more. Alternatively, or in addition, differential expression may be determined based on common statistical tests, as is known in the art.

[0239] As discussed herein, differentially expressed genes/proteins, or differential epigenetic elements may be differentially expressed on a single cell level, or may be differentially expressed on a cell population level. Preferably, the differentially expressed genes/proteins or epigenetic elements as discussed herein, such as constituting the gene signatures as discussed herein, when as to the cell population or subpopulation level, refer to genes that are differentially expressed in all or substantially all cells of the population or subpopulation (such as at least 80%, preferably at least 90%, such as at least 95% of the individual cells). This allows one to define a particular subpopulation of target cells. As referred to herein, a “subpopulation” of cells preferably refers to a particular subset of cells of a particular cell type which can be distinguished or are uniquely identifiable and set apart from other cells of this cell type. The cell subpopulation may be phenotypically characterized, and is preferably characterized by the signature as discussed herein. A cell (sub)population as referred to herein may constitute of a (sub)population of cells of a particular cell type characterized by a specific cell state.

[0240] When referring to induction, or alternatively suppression of a particular signature, preferable is meant induction or alternatively suppression (or upregulation or downregulation) of at least one gene/protein and/or epigenetic element of the signature, such as for instance at least two, at least three, at least four, at least five, at least six, or all genes/proteins and/or epigenetic elements of the signature.

[0241] In certain embodiments, cells overexpressing transcription factors may be analyzed for the ability to further differentiate (e.g., radial glia can be differentiated to astrocytes, oligodendrocytes and neurons). The cells may be analyzed by analyzing spontaneous or directed differentiation methods. In certain embodiments, cells are analyzed by performing xenografts in immune compromised animal models. In certain embodiments, the cells are analyzed for the ability to repair or regenerate diseased tissue.

### Oncology Screening

[0242] In certain embodiments, the barcoded transcription library can be used for a method of pooled screening for transcription factors that enhance or suppress tumor growth. Expression of tumor suppressors have been shown to suppress tumor growth (see, e.g., Wang et al., Restoring expression of wild-type p53 suppresses tumor growth but does not cause tumor regression in mice with a p53 missense mutation. J Clin Invest. 2011 March; 121(3):893-904). In certain embodiments, the method is used to identify therapeutic targets for treating specific cancers. Cancer cell lines for any cancer type may be used. Cancer cell lines may be obtained from a patient. In certain embodiments, the barcoded transcription factor library is introduced to a cancer cell line in vitro, the cells are grown (e.g., 1 to 3 weeks), and the enrichment and depletion of barcodes in the cells is determined as compared to the barcodes present in the original library. In certain embodiments, the barcoded transcription factor library is introduced to a cancer cell line in vitro and transferred to an in vivo model (e.g., nude mice), the cells are grown in vivo (e.g., 1 to 8 weeks), tumor cells are removed (e.g., the tumor), and the enrichment and depletion of barcodes in the cells is determined as compared to the barcodes present in the original library. Barcodes that are enriched represent transcription factors that enhance tumor growth. These transcription factor may be targeted for inhibition to suppress tumor growth. Barcodes that are depleted represent transcription factors that suppress tumor growth. These transcription factors may be overexpressed or activated to suppress tumor growth.

### Combinatorial TF Screening and Prediction

[0243] In example embodiments, the genes and gene programs expressed in cells screened by overexpression of single transcription factors is used to identify transcription factor combinations to differentiate stem cells into a target cell type. In example embodiments, single cells overexpressing single transcription factors are used to identify one or more differentially expressed genes as compared to cells not expressing a transcription factor. In one embodiment, a transcription factor atlas as described herein is used. The differentially expressed genes can be used to determine combinations of transcription factors for directing differentiation of stem cells into target cells that more faithfully recapitulate the in vivo target cells. Thus, providing for improved cellular models and therapeutics. In one example embodiment, the average expression of differentially expressed genes for two or more transcription factors are compared to the gene expression of the differentially expressed genes in the target cell. The combination of transcription factors that provide an average expression that most closely recapitulates the expression in the target cell can be used to differentiate stem cells into the target cells. In example embodiments, the average is taken from 2, 3, 4, or more transcription factors, preferably, 2, 3, or 4 transcription factors. In example embodiments, more than 1 gene is averaged, for example, more than 10, 100, 1,000, 5,000, or 10,000 genes. In example embodiments, the genes are part of a gene program, expression program, or pathway as described herein.

[0244] In example embodiments, combinations of TFs can be screened using the methods and libraries described herein. For example, a library of 4, 5, 6, 7, 8, 9, 10, 20 or more transcription factors can be introduced to stem cells. In preferred embodiments, the TF library is introduced at high MOI (e.g., greater than 1, 2, 3, 4, 5 or more vectors per cell). In example embodiments, the cells are profiled by single cell RNA-seq. Using the pooled screening methods described herein TF combinations can be identified that are overexpressed by each single cell.

### Use of Target Cells and Transcription Factors

### In Vitro Models

[0245] In certain embodiments, the present invention provides methods of generating target cell types in vitro. In vitro models may be obtained by overexpressing transcription factors identified through screening as described herein. In certain embodiments, the methods advantageously produce homogeneous cell types. The methods also provide target cells with reduced labor, time and cost.

[0246] In certain embodiments, the in vitro models of the present invention may be used to study development, cell biology and disease. In certain embodiments, the in vitro models of the present invention may be used to screen for drugs capable of modulating the target cells or for determining toxicity of drugs (e.g., toxic to cardiomyocytes). In certain embodiments, the in vitro models of the present invention may be used to identify specific cell states and/or subtypes.

[0247] In certain embodiments, the in vitro models of the present invention may be used in perturbation studies. Perturbations may include conditions, substances or agents. Agents may be of physical, chemical, biochemical and/or biological nature. Perturbations may include treatment with a small molecule, protein, RNAi, CRISPR system, TALE system, Zinc finger system, meganuclease, pathogen, allergen, biomolecule, or environmental stress. Such methods may be performed in any manner appropriate for the particular application.

[0248] In certain embodiments, the in vitro models are configured for performing perturb-seq. Methods and tools for genome-scale screening of perturbations in single cells using CRISPR have been described, herein referred to as perturb-seq (see e.g., Dixit et al., “Perturb-Seq: Dissecting Molecular Circuits with Scalable Single-Cell RNA Profiling of Pooled Genetic Screens” 2016, Cell 167, 1853-1866; Adamson et al., “A Multiplexed Single-Cell CRISPR Screening Platform Enables Systematic Dissection of the Unfolded Protein Response” 2016, Cell 167, 1867-1882; Feldman et al., Lentiviral co-packaging mitigates the effects of intermolecular recombination and multiple integrations in pooled genetic screens, bioRxiv 262121, doi: doi.org/10.1101/262121; Datlinger, et al., 2017, Pooled CRISPR screening with single-cell transcriptome readout. Nature Methods. Vol. 14 No. 3 DOI: 10.1038/nmeth.4177; Hill et al., On the design of CRISPR-based single cell molecular screens, Nat Methods. 2018 April; 15(4): 271-274; Replogle, et al., “Combinatorial single-cell CRISPR screens by direct guide RNA capture and targeted sequencing” Nat Biotechnol (2020). doi.org/10.1038/s41587-020-0470-y; and International Patent Publication No. WO 2017/075294). In certain embodiments, stem cells are configured for expression of a CRISPR enzyme, such that the cells can be induced to differentiate by overexpressing a transcription factor and barcoded guide sequences can be introduced to the cells.

### Differentiation of Progenitor Cells

[0249] In certain embodiments, target cells are further differentiated. In certain embodiments, cells are differentiated by spontaneous differentiation. In certain embodiments, cells are differentiated by directed differentiation.

[0250] As used herein the term “spontaneous differentiation” refers to a process where progenitor cells spontaneously differentiate into a target cell and usually involves removal of growth factors from the media. In certain embodiments, the process of spontaneous differentiation can be accelerated by suboptimal culture conditions, such as cultivation to high density for extended periods (4-7 weeks) without replacement of a feeder layer. In certain embodiments, neural progenitor cells obtained by overexpressing transcription factors are spontaneously differentiated into neurons, astrocytes and oligodendrocytes by removal of growth factors from the media (see, e.g., Example 1-2).

[0251] As used herein the term “directed differentiation” refers to exposing the stem cells or pluripotent cells to specific signaling pathways modulators and manipulating cell culture conditions (environmental or exogenous) to mimic the natural sequence of developmental decisions to produce a given cell type/tissue. In certain embodiments, pluripotent stem cells (PSCs) are cultured in controlled conditions involving specific substrate or extracellular matrices promoting cell adhesion and differentiation, and defined culture media compositions. A limited number of signaling factors, such as growth factors or small molecules, controlling cell differentiation is applied sequentially or in a combinatorial manner, at varying dosage and exposure time (Cohen D E, Melton D, 2011 “Turning straw into gold: directing cell fate for regenerative medicine”. Nature Reviews Genetics. 12 (4): 243-252). In certain embodiments, radial glia produced using the TF overexpression method as described herein can also be differentiated by directed differentiation into neurons, astrocytes, oligodendrocytes, or organoids.

[0252] As used herein, the term “organoid” or “epithelial organoid” refers to a cell cluster or aggregate that resembles an organ, or part of an organ, and possesses cell types relevant to that particular organ. Organoid systems have been described previously, for example, for brain, retinal, stomach, lung, thyroid, small intestine, colon, liver, kidney, pancreas, prostate, mammary gland, fallopian tube, taste buds, salivary glands, and esophagus (see, e.g., Clevers, Modeling Development and Disease with Organoids, Cell. 2016 Jun. 16; 165(7):1586-1597).

[0253] In certain embodiments, directed differentiation may include the use of hormones, cytokines, growth factors, mitogens or any other differentiation promoting agents.

[0254] In certain embodiments, dual SMAD inhibition (Chambers et al., 2009; Shi et al., 2012a) is used to differentiate RFX4 neural progenitor cells towards CNS cell types, radial glia, and neurons. In certain embodiments, the neurons are GABAergic neurons. Dual SMAD inhibition may include two inhibitors of SMAD signaling. One inhibitor may be a BMP inhibitor. BMP inhibitors include chordin, follistatin, and noggin (Chambers et al., 2009). The two inhibitors may be Noggin and SB431542. SB431542 inhibits the Lefty/Activin/TGFβ pathways by blocking phosphorylation of ALK4, ALK5, ALK7 receptors. Id.

[0255] Non-limiting examples of hormones include growth hormone (GH), adrenocorticotropic hormone (ACTH), dehydroepiandrosterone (DHEA), cortisol, epinephrine, thyroid hormone, estrogen, progesterone, testosterone, or combinations thereof.

[0256] Non-limiting examples of cytokines include lymphokines (e.g., interferon-γ, IL-2, IL-3, IL-4, IL-6, granulocyte-macrophage colony-stimulating factor (GM-CSF), interferon-γ, leukocyte migration inhibitory factors (T-LIF, B-LIF), lymphotoxin-alpha, macrophage-activating factor (MAF), macrophage migration-inhibitory factor (MIF), neuroleukin, immunologic suppressor factors, transfer factors, or combinations thereof), monokines (e.g., IL-1, TNF-alpha, interferon-α, interferon-β, colony stimulating factors, e.g., CSF2, CSF3, macrophage CSF or GM-CSF, or combinations thereof), chemokines (e.g., beta-thromboglobulin, C chemokines, CC chemokines, CXC chemokines, CX3C chemokines, macrophage inflammatory protein (MIP), or combinations thereof), interleukins (e.g., IL-1, IL-2, IL-3, IL-4, IL-5, IL-6, IL-7, IL-8, IL-9, IL-10, IL-11, IL-12, IL-13, IL-14, IL-15, IL-17, IL-18, IL-19, IL-20, IL-21, IL-22, IL-23, IL-24, IL-25, IL-26, IL-27, IL-28, IL-29, IL-30, IL-31, IL-32, IL-33, IL-34, IL-35, IL-36, or combinations thereof), and several related signaling molecules, such as tumor necrosis factor (TNF) and interferons (e.g., interferon-α, interferon-β, interferon-γ, interferon-λ, or combinations thereof).

[0257] Non-limiting examples of growth factors include those of fibroblast growth factor (FGF) family, bone morphogenic protein (BMP) family, platelet derived growth factor (PDGF) family, transforming growth factor beta (TGFbeta) family, nerve growth factor (NGF) family, epidermal growth factor (EGF) family, insulin related growth factor (IGF) family, hepatocyte growth factor (HGF) family, hematopoietic growth factors (HeGFs), platelet-derived endothelial cell growth factor (PD-ECGF), angiopoietin, vascular endothelial growth factor (VEGF) family, glucocorticoids, or combinations thereof.

[0258] Non-limiting examples of mitogens include phytohaemagglutinin (PHA), concanavalin A (conA), lipopolysaccharide (LPS), pokeweed mitogen (PWM), phorbol ester such as phorbol myristate acetate (PMA) with or without ionomycin, or combinations thereof.

[0259] Non-limiting examples of cell surface receptors the ligands of which may act as immunomodulants include Toll-like receptors (TLRs) (e.g., TLR1, TLR2, TLR3, TLR4, TLR5, TLR6, TLR7, TLR8, TLR9, TLR10, TLR11, TLR12 or TLR13), CD80, CD86, CD40, CCR7, or C-type lectin receptors.

[0260] In certain embodiments, differentiation promoting agents may be used to obtain particular types of target cells. Differentiation promoting agents include anticoagulants, chelating agents, and antibiotics. Examples of such agents may be one or more of the following: vitamins and minerals or derivatives thereof, such as A (retinol), B₃, C (ascorbate), ascorbate 2-phosphate, D such as D₂ or D₃, K, retinoic acid, nicotinamide, zinc or zinc compound, and calcium or calcium compounds; natural or synthetic hormones such as hydrocortisone, and dexamethasone; amino acids or derivatives thereof, such as L-glutamine (L-glu), ethylene glycol tetracetic acid (EGTA), proline, and non-essential amino acids (NEAA); compounds or derivatives thereof, such as β-mercaptoethyl, dibutyl cyclic adenosine monophosphate (db-CAMP), monothioglycerol (MTG), putrescine, dimethyl sulfoxide (DMSO), hypoxanthine, adenine, forskolin, cilostamide, and 3-isobutyl-1-methylxanthine; nucleosides and analogues thereof, such as 5-azacytidine; acids or salts thereof, such as ascorbic acid, pyruvate, okadic acid, linoleic acid, ethylenediaminetetraacetic acid (EDTA), anticoagulant citrate dextrose formula A (ACDA), disodium EDTA, sodium butyrate, and glycerophosphate; antibiotics or drugs, such as G418, gentamycine, Pentoxifylline (1-(5-oxohexyl)-3,7-dimethylxanthine), and indomethacin; and proteins such as tissue plasminogen activator (TPA).

### Transdifferentiation

[0261] In certain embodiments, the screening platform and methods of screening are used for identifying transcription factors that drive transdifferentiation of cells into target cell types. As used herein, the terms “transdifferentiation” and “lineage reprogramming” refer to the process by which a committed cell of a first cell lineage is changed into another cell of a different cell type or a process in which one mature somatic cell transforms into another mature somatic cell without undergoing an intermediate pluripotent state or progenitor cell type. In some embodiments, transdifferentiation may be a combination of retrodifferentiation and redifferentiation. A “transdifferentiated cell” is a cell that results from transdifferentiation of a committed cell. For example, a committed cell such as a blood cell or glial cell may be transdifferentiated into a neuron; or a fibroblast may be transdifferentiated into a myocyte. As used herein, “retrodifferentiation” is the process by which a committed cell, i.e., mature, specialized cell, reverts back to a more primitive cell stage. A “retrodifferentiated cell” is a cell that results from retrodifferentiation of a committed cell. As used herein, “redifferentiation” refers to the process by which an uncommitted cell or a retrodifferentiated cell differentiates into a more mature, specialized cell. A “redifferentiated cell” refers to a cell that results from redifferentiation of an uncommitted cell or a retrodifferentiated cell. If a redifferentiated cell is obtained through redifferentiation of a retrodifferentiated cell, the redifferentiated cell may be of the same or different lineage as the committed cell that had undergone retrodifferentiation. For example, a committed cell such as a white blood cell may be retrodifferentiated to form a retrodifferentiated cell such as a pluripotent stem cell, and then the retrodifferentiated cell may be redifferentiated to form a lymphocyte, which is of the same lineage as the white blood cell (committed cell), or redifferentiated to form a neuron, which is of a different lineage than the white blood cell (committed cell).

[0262] In certain embodiments, transcription factors are used to transdifferentiate cells of one lineage into a target cell of a different lineage. In certain embodiments, target cell types can be transferred to a subject in need thereof to regenerate a diseased or damaged tissue. One study showed that that islet α-cells can be lineage-traced and reprogrammed by the transcription factors PDX1 and MAFA to produce and secrete insulin in response to glucose that are capable of reversing diabetes in mice (see, e.g., Furuyama, K. et al., 2019 Diabetes relief in mice by glucose-sensing insulin-secreting human α-cells Nature 567, 43-48). Another study showed that functional cardiomyocytes can be directly reprogrammed from differentiated somatic cells using three developmental transcription factors (i.e., Gata4, Mef2c and Tbx5) (see, e.g., Ieda, et al. (2010). “Direct Reprogramming of Fibroblasts into Functional Cardiomyocytes by Defined Factors”. Cell. 142 (3): 375-386. Another study identified that a combination of three factors, Ascl1, Bm2 and Myt11, sufficed to convert mouse embryonic and postnatal fibroblasts into functional neurons in vitro (see, e.g., Vierbuchen, et al., (2010). “Direct conversion of fibroblasts to functional neurons by defined factors”. Nature. 463 (7284): 1035-1041). In certain embodiments, transcription factors that differentiate stem cells into a target cell (e.g., progenitor cell) can be used to transdifferentiate cells of one lineage into a target cell of a different lineage. In certain embodiments, TFs that are expressed in progenitor cells can be used to transdifferentiate cells of one lineage into a target cell of a different lineage (see, e.g., Graf, T.; Enver, T. (2009). “Forcing cells to change lineages”. Nature. 462 (7273): 587-594). In this approach, transcription factors from progenitor cells of the target cell type are transfected into a somatic cell to induce transdifferentiation. Determining the unique set of cellular factors that is needed to be manipulated for each cell conversion is a long and costly process that involves much trial and error. Previous methods required narrowing down factors one by one. As a result, this first step of identifying the key set of cellular factors for cell conversion is the major obstacle researchers face in the field of cell reprogramming. In certain embodiments, the pooled screening methods described herein are used for determining which transcription factors to use.

[0263] In certain embodiments, cells can be transdifferentiated to target cells in vivo by targeted modulation of transcription factors or downstream targets. In certain embodiments, the targeted modulation of transcription factors can be used to regenerate, replenish or replace damaged or diseased cells in a subject in need thereof (e.g., heart cells, pancreatic β cells, eye cells, nervous system cells).

[0264] In certain embodiments, modulation of one or more of the transcription factors RFX4, NFIB, ASCL1 and PAX6 are used to transdifferentiate glia cells into neurons, astrocytes, or oligodendrocytes. For example, oligodendrocytes may be produced to regenerate the myelin sheath on axons.

[0265] In certain embodiments, modulation of one or more of the transcription factors MESP1, EOMES and ESR1 are used to transdifferentiate cardiofibroblasts into cardiomyocytes. For example, cardiomyocytes may be produced to regenerate a damaged heart.

### Cell State Transitions

[0266] In certain embodiments, the screening platform and methods of screening are used for identifying transcription factors that modify the cell state or cell state transitions of target cell types. In example embodiments, cell state reflects the fact that cells of a particular type can exhibit variability with regard to one or more features and/or can exist in a variety of different conditions, while retaining the features of their particular cell type and not gaining features that would cause them to be classified as a different cell type. The different states or conditions in which a cell can exist may be characteristic of a particular cell type (e.g., they may involve properties or characteristics exhibited only by that cell type and/or involve functions performed only or primarily by that cell type) or may occur in multiple different cell types. Sometimes a cell state reflects the capability of a cell to respond to a particular stimulus or environmental condition (e.g., whether or not the cell will respond, or the type of response that will be elicited) or is a condition of the cell brought about by a stimulus or environmental condition. Cells in different cell states may be distinguished from one another in a variety of ways. For example, they may express, produce, or secrete one or more different genes, proteins, or other molecules (“markers”), exhibit differences in protein modifications such as phosphorylation, acetylation, etc., or may exhibit differences in appearance. Thus, a cell state may be a condition of the cell in which the cell expresses, produces, or secretes one or more markers, exhibits particular protein modification(s), has a particular appearance, and/or will or will not exhibit one or more biological response(s) to a stimulus or environmental condition.

[0267] In example embodiments, a transcription factor or combination of TFs can transition a cell from expressing one cell program to another cell program while the cell type remains the same (e.g., biological program, signature, expression program as described herein). For example, a cell may transition from an “old cell signature” to a “young cell signature” for rejuvenation (e.g., transitioning an “old neuron” to “young neuron”). Another example is enhancing certain cell functions, such as increasing efficiency of T cell killing by transitioning “exhausted T cell signature” to “active or naïve T cell signature.”

[0268] Another example of cell state is “activated” state as compared with “resting” or “non-activated” state. Many cell types in the body have the capacity to respond to a stimulus by modifying their state to an activated state. The particular alterations in state may differ depending on the cell type and/or the particular stimulus. A stimulus could be any biological, chemical, or physical agent to which a cell may be exposed.

[0269] Another example of cell state reflects the condition of cell (e.g., a muscle cell or adipose cell) as either sensitive or resistant to insulin. Insulin resistant cells exhibit decreased response to circulating insulin; for example, insulin-resistant skeletal muscle cells exhibit markedly reduced insulin-stimulated glucose uptake and a variety of other metabolic abnormalities that distinguish these cells from cells with normal insulin sensitivity.

[0270] In an example embodiment, the cell state is an immune cell state. The term “immune cell” as used throughout this specification generally encompasses any cell derived from a hematopoietic stem cell that plays a role in the immune response. The term is intended to encompass immune cells both of the innate or adaptive immune system. The immune cell as referred to herein may be a leukocyte, at any stage of differentiation (e.g., a stem cell, a progenitor cell, a mature cell) or any activation stage. Immune cells include lymphocytes (such as natural killer cells, T-cells (including, e.g., thymocytes, Th or Tc; Th1, Th2, Th17, Thαβ, CD4+, CD8+, effector Th, memory Th, regulatory Th, CD4⁺/CD8⁺ thymocytes, CD4−/CD8− thymocytes, γδ T cells, etc.) or B-cells (including, e.g., pro-B cells, early pro-B cells, late pro-B cells, pre-B cells, large pre-B cells, small pre-B cells, immature or mature B-cells, producing antibodies of any isotype, T1 B-cells, T2, B-cells, naïve B-cells, GC B-cells, plasmablasts, memory B-cells, plasma cells, follicular B-cells, marginal zone B-cells, B-1 cells, B-2 cells, regulatory B cells, etc.), such as for instance, monocytes (including, e.g., classical, non-classical, or intermediate monocytes), (segmented or banded) neutrophils, eosinophils, basophils, mast cells, histiocytes, microglia, including various subtypes, maturation, differentiation, or activation stages, such as for instance hematopoietic stem cells, myeloid progenitors, lymphoid progenitors, myeloblasts, promyelocytes, myelocytes, metamyelocytes, monoblasts, promonocytes, lymphoblasts, prolymphocytes, small lymphocytes, macrophages (including, e.g., Kupffer cells, stellate macrophages, M1 or M2 macrophages), (myeloid or lymphoid) dendritic cells (including, e.g., Langerhans cells, conventional or myeloid dendritic cells, plasmacytoid dendritic cells, mDC-1, mDC-2, Mo-DC, HP-DC, veiled cells), granulocytes, polymorphonuclear cells, antigen-presenting cells (APC), etc.

[0271] As used throughout this specification, “immune response” refers to a response by a cell of the immune system, such as a B cell, T cell (CD4⁺ or CD⁸⁺), regulatory T cell, antigen-presenting cell, dendritic cell, monocyte, macrophage, NKT cell, NK cell, basophil, eosinophil, or neutrophil, to a stimulus. In some embodiments, the response is specific for a particular antigen (an “antigen-specific response”), and refers to a response by a CD4 T cell, CD8 T cell, or B cell via their antigen-specific receptor. In some embodiments, an immune response is a T cell response, such as a CD4⁺ response or a CD8⁺ response. Such responses by these cells can include, for example, cytotoxicity, proliferation, cytokine or chemokine production, trafficking, or phagocytosis, and can be dependent on the nature of the immune cell undergoing the response.

[0272] T cell response refers more specifically to an immune response in which T cells directly or indirectly mediate or otherwise contribute to an immune response in a subject. T cell-mediated response may be associated with cell mediated effects, cytokine mediated effects, and even effects associated with B cells if the B cells are stimulated, for example, by cytokines secreted by T cells. By means of an example but without limitation, effector functions of MHC class I restricted Cytotoxic T lymphocytes (CTLs), may include cytokine and/or cytolytic capabilities, such as lysis of target cells presenting an antigen peptide recognized by the T cell receptor (naturally-occurring TCR or genetically engineered TCR, e.g., chimeric antigen receptor, CAR), secretion of cytokines, preferably IFN gamma, TNF alpha and/or or more immunostimulatory cytokines, such as IL-2, and/or antigen peptide-induced secretion of cytotoxic effector molecules, such as granzymes, perforins or granulysin. By means of example but without limitation, for MHC class II restricted T helper (Th) cells, effector functions may be antigen peptide-induced secretion of cytokines, preferably, IFN gamma, TNF alpha, IL-4, IL5, IL-10, and/or IL-2. By means of example but without limitation, for T regulatory (Treg) cells, effector functions may be antigen peptide-induced secretion of cytokines, preferably, IL-10, IL-35, and/or TGF-beta. B cell response refers more specifically to an immune response in which B cells directly or indirectly mediate or otherwise contribute to an immune response in a subject. Effector functions of B cells may include in particular production and secretion of antigen-specific antibodies by B cells (e.g., polyclonal B cell response to a plurality of the epitopes of an antigen (antigen-specific antibody response)), antigen presentation, and/or cytokine secretion.

[0273] During persistent immune activation, such as during uncontrolled tumor growth or chronic infections, subpopulations of immune cells, particularly of CD8+ or CD4+ T cells, become compromised to different extents with respect to their cytokine and/or cytolytic capabilities. Such immune cells, particularly CD8+ or CD4+ T cells, are commonly referred to as “dysfunctional” or as “functionally exhausted” or “exhausted”. As used herein, the term “dysfunctional” or “functional exhaustion” refer to a state of a cell where the cell does not perform its usual function or activity in response to normal input signals, and includes refractivity of immune cells to stimulation, such as stimulation via an activating receptor or a cytokine. Such a function or activity includes, but is not limited to, proliferation (e.g., in response to a cytokine, such as IFN-gamma) or cell division, entrance into the cell cycle, cytokine production, cytotoxicity, migration and trafficking, phagocytotic activity, or any combination thereof. Normal input signals can include, but are not limited to, stimulation via a receptor (e.g., T cell receptor, B cell receptor, co-stimulatory receptor). Unresponsive immune cells can have a reduction of at least 10%, 20%, 30%, 40%, 50%, 60%, 70%, 80%, 90%, 95%, or even 100% in cytotoxic activity, cytokine production, proliferation, trafficking, phagocytotic activity, or any combination thereof, relative to a corresponding control immune cell of the same type. In some particular embodiments of the aspects described herein, a cell that is dysfunctional is a CD8+ T cell that expresses the CD8+ cell surface marker. Such CD8+ cells normally proliferate and produce cell killing enzymes, e.g., they can release the cytotoxins perforin, granzymes, and granulysin. However, exhausted/dysfunctional T cells do not respond adequately to TCR stimulation, and display poor effector function, sustained expression of inhibitory receptors and a transcriptional state distinct from that of functional effector or memory T cells. Dysfunction/exhaustion of T cells thus prevents optimal control of infection and tumors. Exhausted/dysfunctional immune cells, such as T cells, such as CD8+ T cells, may produce reduced amounts of IFN-gamma, TNF-alpha and/or one or more immunostimulatory cytokines, such as IL-2, compared to functional immune cells. Exhausted/dysfunctional immune cells, such as T cells, such as CD8+ T cells, may further produce (increased amounts of) one or more immunosuppressive transcription factors or cytokines, such as IL-10 and/or Foxp3, compared to functional immune cells, thereby contributing to local immunosuppression. Dysfunctional CD8+ T cells can be both protective and detrimental against disease control. As used herein, a “dysfunctional immune state” refers to an overall suppressive immune state in a subject or microenvironment of the subject (e.g., tumor microenvironment). For example, increased IL-10 production leads to suppression of other immune cells in a population of immune cells.

[0274] CD8+ T cell function is associated with their cytokine profiles. It has been reported that effector CD8+ T cells with the ability to simultaneously produce multiple cytokines (polyfunctional CD8+ T cells) are associated with protective immunity in patients with controlled chronic viral infections as well as cancer patients responsive to immune therapy (Spranger et al., 2014, J. Immunother. Cancer, vol. 2, 3). In the presence of persistent antigen CD8+ T cells were found to have lost cytolytic activity completely over time (Moskophidis et al., 1993, Nature, vol. 362, 758-761). It was subsequently found that dysfunctional T cells can differentially produce IL-2, TNFa and IFNg in a hierarchical order (Wherry et al., 2003, J. Virol., vol. 77, 4911-4927). Decoupled dysfunctional and activated CD8+ cell states have also been described (see, e.g., Singer, et al. (2016). A Distinct Gene Module for Dysfunction Uncoupled from Activation in Tumor-Infiltrating T Cells. Cell 166, 1500-1511 e1509; WO/2017/075478; and WO/2018/049025).

[0275] As used herein, terms such as “Th17 cell” and/or “Th17 phenotype” and all grammatical variations thereof refer to a differentiated T helper cell that expresses one or more cytokines selected from the group the consisting of interleukin 17A (IL-17A), interleukin 17F (IL-17F), and interleukin 17A/F heterodimer (IL17-AF). As used herein, terms such as “Th1 cell” and/or “Th1 phenotype” and all grammatical variations thereof refer to a differentiated T helper cell that expresses interferon gamma (IFNγ). As used herein, terms such as “Th2 cell” and/or “Th2 phenotype” and all grammatical variations thereof refer to a differentiated T helper cell that expresses one or more cytokines selected from the group the consisting of interleukin 4 (IL-4), interleukin 5 (IL-5) and interleukin 13 (IL-13). As used herein, terms such as “Treg cell” and/or “Treg phenotype” and all grammatical variations thereof refer to a differentiated T cell that expresses Foxp3.

[0276] Depending on the cytokines used for differentiation, in vitro polarized Th17 cells can either cause severe autoimmune responses upon adoptive transfer (‘pathogenic Th17 cell state’) or have little or no effect in inducing autoimmune disease (‘non-pathogenic cell state’) (Ghoreschi et al., 2010; and Lee et al., 2012 “Induction and molecular signature of pathogenic Th17 cells,” Nature Immunology, vol. 13(10): 991-999). A dynamic regulatory network controls Th17 differentiation (See e.g., Yosef et al., Dynamic regulatory network controlling Th17 cell differentiation, Nature, vol. 496: 461-468 (2013); Wang et al., CD5L/AIM Regulates Lipid Biosynthesis and Restrains Th17 Cell Pathogenicity, Cell Volume 163, Issue 6, p 1413-1427, 3 Dec. 2015; Gaublomme et al., Single-Cell Genomics Unveils Critical Regulators of Th17 Cell Pathogenicity, Cell Volume 163, Issue 6, p 1400-1412, 3 Dec. 2015; and International publication numbers WO2016138488A2, WO2015130968, WO/2012/048265, WO/2014/145631 and WO/2014/134351, the contents of which are hereby incorporated by reference in their entirety).

[0277] Markers specific for the cell state can be determined for each TF as described previously (e.g., activated, quiescent, exhausted cell state markers). Markers can be determined, for example, by scRNA-seq (e.g., entire programs), flow FISH, reporters, etc.

### Therapeutic Compositions and Uses

[0278] In certain embodiment, the cells produced according to the present invention are used for treatment, to model a disease, or to screen for therapeutic agents. In certain embodiments, target cells obtained according to the methods described herein may be used for the treatment of a subject in need thereof. In certain embodiments, target cells transdifferentiated according to the methods described herein may be used for the treatment of a subject in need thereof. In certain embodiments, target cells are transferred to a subject to repair, regenerate, replace or replenish a target tissue or cell type. In certain embodiments, transcription factors or agents capable of modulating expression or activity of the transcription factors or downstream pathways are introduced in vivo to generate target cells. In certain embodiments, the TFs or agents are introduced to a specific target region requiring the target cells.

[0279] As used herein, a “subject” is a vertebrate, including any member of the class mammalia. As used herein, a “mammal” refers to any mammal including but not limited to human, mouse, rat, sheep, monkey, goat, rabbit, hamster, horse, cow or pig.

[0280] In certain embodiments, a cell-based therapeutic includes engraftment of the cells of the present invention. As used herein, the term “engraft” or “engraftment” refers to the process of cell incorporation into a tissue of interest in vivo through contact with existing cells of the tissue.

[0281] In certain embodiments, the cell based therapy may comprise adoptive cell transfer (ACT). As used herein adoptive cell transfer and adoptive cell therapy are used interchangeably. In certain embodiments, the target cells differentiated according to the methods described herein may be transferred to a subject in need thereof. If possible, use of autologous cells helps the recipient by minimizing GVHD issues. In certain embodiments, autologous stem cells are harvested from a subject and the cells are modulated to overexpress the transcription factor(s) to differentiate the stem cells into target cells.

[0282] In certain embodiments, the target cells are used as a cell-based therapy to treat a subject suffering from a disease. In certain embodiments, the disease may be treated by infusion of target cell types (see, e.g., US Patent Publication No. 20110091433A1 and Table 2 of application). In certain embodiments, a disease may be treated by inducing target cells in vivo. Target cells may be induced by expressing transcription factors at a specific site of the disease. Transcription factors may be provided to specific cells at a location of disease. In certain embodiments, mRNA is provided. In certain embodiments, transdifferentiation of target cells is performed in vivo.

### Diseases

[0283] In certain embodiment, the cells produced according to the present invention are used for treatment, to model a disease, or to screen for therapeutic agents. The disease may be selected from the group consisting of bone marrow failure, hematological conditions, aplastic anemia, beta-thalassemia, diabetes, neuron disease, motor neuron disease, Parkinson's disease, spinal cord injury, muscular dystrophy, kidney disease, liver disease, multiple sclerosis, congestive heart failure, head trauma, lung disease, psoriasis, liver cirrhosis, vision loss, cystic fibrosis, hepatitis C virus, human immunodeficiency virus, inflammatory bowel disease (IBD), and any disorder associated with tissue degeneration.

[0284] In certain embodiments, the neuron disease may be a disease where GABAergic neurons are implicated. In certain embodiments, the disease may be autism, schizophrenia, epilepsy, dementia, Alzheimer's disease, or anxiety disorders (e.g., depression) (Rudy, et al., Three Groups of Interneurons Account for Nearly 100% of Neocortical GABAergic Neurons, Dev Neurobiol. 2011 Jan. 1; 71(1): 45-61; Xu and Wong, GABAergic Inhibitory Neurons as Therapeutic Targets for Cognitive Impairment in Schizophrenia, Acta Pharmacol Sin. 2018 May; 39(5): 733-753; Fogaça and Duman, Cortical GABAergic Dysfunction in Stress and Depression: New Insights for Therapeutic Interventions, Front Cell Neurosci. 2019; 13: 87; Choi et al., Pathology of nNOS expressing GABAergic neurons in mouse model of Alzheimer's disease, Neuroscience. 2018 Aug. 1; 384: 41-53; Treiman, GABAergic Mechanisms in Epilepsy, Epilepsia. 2001; 42 Suppl 3:8-12; and Coghlan et al., GABA System Dysfunction in Autism and Related Disorders: From Synapse to Symptoms, Neurosci Biobehav Rev. 2012 October; 36(9): 2044-2055).

[0285] Aplastic anemia is a rare but fatal bone marrow disorder, marked by pancytopaenia and hypocellular bone marrow (Young et al. Blood 2006, 108: 2509-2519). The disorder may be caused by an immune-mediated pathophysiology with activated type I cytotoxic T cells expressing Th1 cytokine, especially y-interferon targeted towards the haematopoietic stem cell compartment, leading to bone marrow failure and hence anhaematoposis (Bacigalupo et al. Hematology 2007, 23-28). The majority of aplastic anaemia patients can be treated with stem cell transplantation obtained from HLA-matched siblings (Locasciulli et al. Haematologica. 2007; 92:11-18.).

[0286] Thalassaemia is an inherited autosomal recessive blood disease marked by a reduced synthesis rate of one of the globin chains that make up hemoglobin. Thus, there is an underproduction of normal globin proteins, often due to mutations in regulatory genes, which results in formation of abnormal hemoglobin molecules, causing anemia. Different types of thalassemia include alpha thalassemia, beta thalassemia, and delta thalassemia, which affect production of the alpha globin, beta globin, and delta globin, respectively.

[0287] Diabetes is a syndrome resulting in abnormally high blood sugar levels (hyperglycemia). Diabetes refers to a group of diseases that lead to high blood glucose levels due to defects in either insulin secretion or insulin action in the body. Diabetes is typically separated into two types: type 1 diabetes, marked by a diminished production of insulin, or type 2 diabetes, marked by a resistance to the effects of insulin. Both types lead to hyperglycemia, which largely causes the symptoms generally associated with diabetes, e.g., excessive urine production, resulting compensatory thirst and increased fluid intake, blurred vision, unexplained weight loss, lethargy, and changes in energy metabolism.

[0288] Motor neuron diseases refer to a group of neurological disorders that affect motor neurons. Such diseases include amyotrophic lateral sclerosis (ALS), primary lateral sclerosis (PLS), and progressive muscular atrophy (PMA). ALS is marked by degeneration of both the upper and lower motor neurons, which ceases messages to the muscles and results in their weakening and eventual atrophy. PLS is a rare motor neuron disease affecting upper motor neurons only, which causes difficulties with balance, weakness and stiffness in legs, spasticity, and speech problems. PMA is a subtype of ALS that affects only the lower motor neurons, which can cause muscular atrophy, fasciculations, and weakness.

[0289] Parkinson's disease (PD) is a neurodegenerative disorder marked by the loss of the nigrostriatal pathway, resulting from degeneration of dopaminergic neurons within the substantia nigra. The cause of PD is not known, but is associated with the progressive death of dopaminergic (tyrosine hydroxylase (TH) positive) mesencephalic neurons, inducing motor impairment. Hence, PD is characterized by muscle rigidity, tremor, bradykinesia, and potentially akinesia.

[0290] Spinal cord injury is characterized by damage to the spinal cord and, in particular, the nerve fibers, resulting in impairment of part or all muscles or nerves below the injury site. Such damage may occur through trauma to the spine that fractures, dislocates, crushes, or compresses one or more of the vertebrae, or through nontraumatic injuries caused by arthritis, cancer, inflammation, or disk degeneration.

[0291] Muscular dystrophy (MD) refers to a set of hereditary muscle diseases that weaken skeletal muscles. MD may be characterized by progressive muscle weakness, defects in muscle proteins, muscle cell apoptosis, and tissue atrophy. There are over 100 diseases which exhibit MD characteristics, although nine diseases in particular—Duchenne, Becker, limb girdle, congenital, facioscapulohumeral, myotonic, oculopharyngeal, distal, and Emery-Dreifuss—are classified as MD.

[0292] Kidney disease refers to conditions that damage the kidneys and decrease their ability to function, which includes removal of wastes and excess water from the blood, regulation of electrolytes, blood pressure, acid-base balance, and reabsorption of glucose and amino acids. The two main causes of kidney disease are diabetes and high blood pressure, although other causes include glomerulonephritis, lupus, and malformations and obstructions in the kidney.

[0293] Multiple sclerosis is an autoimmune condition in which the immune system attacks the central nervous system, leading to demyelination. MS affects the ability of nerve cells in the brain and spinal cord to communicate with each other, as the body's own immune system attacks and damages the myelin which enwraps the neuron axons. When myelin is lost, the axons can no longer effectively conduct signals. This can lead to various neurological symptoms which usually progresses into physical and cognitive disability. In certain embodiments, target cells may include oligodendrocytes.

[0294] Congestive heart failure refers to a condition in which the heart cannot pump enough blood to the body's other organs. This condition can result from coronary artery disease, scar tissue on the heart cause by myocardial infarction, high blood pressure, heart valve disease, heart defects, and heart valve infection. Treatment programs typically consist of rest, proper diet, modified daily activities, and drugs such as angiotensin-converting enzyme (ACE) inhibitors, beta blockers, digitalis, diuretics, vasodilators. However, the treatment program will not reverse the damage or condition of the heart.

[0295] Hepatitis C is an infectious disease in the liver, caused by hepatitis C virus. Hepatitis C can progress to scarring (fibrosis) and advanced scarring (cirrhosis). Cirrhosis can lead to liver failure and other complications such as liver cancer.

[0296] Head trauma refers to an injury of the head that may or may not cause injury to the brain. Common causes of head trauma include traffic accidents, home and occupational accidents, falls, and assaults. Various types of problems may result from head trauma, including skull fracture, lacerations of the scalp, subdural hematoma (bleeding below the dura mater), epidural hematoma (bleeding between the dura mater and the skull), cerebral contusion (brain bruise), concussion (temporary loss of function due to trauma), coma, or even death.

[0297] Lung disease is a broad term for diseases of the respiratory system, which includes the lung, pleural cavity, bronchial tubes, trachea, upper respiratory tract, and nerves and muscles for breathing. Examples of lung diseases include obstructive lung diseases, in which the bronchial tubes become narrowed; restrictive or fibrotic lung diseases, in which the lung loses compliance and causes incomplete lung expansion and increased lung stiffness; respiratory tract infections, which can be caused by the common cold or pneumonia; respiratory tumors, such as those caused by cancer; pleural cavity diseases; and pulmonary vascular diseases, which affect pulmonary circulation.

### Pharmaceutical Compositions

[0298] Target cells of the present invention may be combined with various components to produce compositions of the invention. The compositions may be combined with one or more pharmaceutically acceptable carriers or diluents to produce a pharmaceutical composition (which may be for human or animal use). Suitable carriers and diluents include, but are not limited to, isotonic saline solutions, for example phosphate-buffered saline. The composition of the invention may be administered by direct injection. The composition may be formulated for parenteral, intramuscular, intravenous, subcutaneous, intraocular, oral, transdermal administration, or injection into the spinal fluid.

[0299] Compositions comprising target cells may be delivered by injection or implantation. Cells may be delivered in suspension or embedded in a support matrix such as natural and/or synthetic biodegradable matrices. Natural matrices include, but are not limited to, collagen matrices. Synthetic biodegradable matrices include, but are not limited to, polyanhydrides and polylactic acid. These matrices may provide support for fragile cells in vivo.

[0300] The compositions may also comprise the target cells of the present invention, and at least one pharmaceutically acceptable excipient, carrier, or vehicle.

[0301] Delivery may also be by controlled delivery, i.e., delivered over a period of time which may be from several minutes to several hours or days. Delivery may be systemic (for example by intravenous injection) or directed to a particular site of interest. Cells may be introduced in vivo using liposomal transfer.

[0302] Target cells may be administered in doses of from 1×10⁵ to 1×10⁷ cells per kg. For example a 70 kg patient may be administered 1.4×10⁶ cells for reconstitution of tissues. The dosages may be any combination of the target cells listed in this application.

### Genetic Modifying Agents

[0303] In certain embodiments, the one or more modulating agents (e.g., for overexpressing transcription factors, silencing transcription factors or tagging cells with a detectable marker) may be a genetic modifying agent. The genetic modifying agent may comprise a CRISPR system, a zinc finger nuclease system, a TALEN, a meganuclease, or RNAi.

### CRISPR

[0304] In certain embodiments, a CRISPR system is used to enhance expression or activity of transcription factors. In certain embodiments, the transcription factor expression or activity is enhanced temporarily, such that the enhancement is not permanent. In certain embodiments, expression of the transcription from its endogenous gene is enhanced (e.g., by directing an activator to the gene).

[0305] In certain embodiments, modification of transcription factor mRNA by a Cas13-deaminase system can be used to modulate transcription factor activity in order to generate target cells (see, e.g., International Patent Publication No. WO 2019/084062). In certain embodiments, the modification silences ubiquitination, methylation, acetylation, succinylation, glycosylation, O-GlcNAc, O-linked glycosylation, iodination, nitrosylation, sulfation, carboxyglutamation, phosphorylation, or a combination thereof. In some embodiments, the modification increases a half-life of a target TF. In certain embodiments, the transcription activity is enhanced by modifying a phosphorylation site on the transcription factor (see, e.g., Hunter and Karin, 1992, The regulation of Transcription by Phosphorylation. Cell, Vol. 70, 375-387; and Whitmarsh and Davis, 2000, Regulation of transcription factor function by phosphorylation. CMLS, Cell. Mol. Life Sci. 57: 1172).

[0306] In general, a CRISPR-Cas or CRISPR system as used in herein and in documents, such as International Patent Publication No. WO 2014/093622 (PCT/US2013/074667), refers collectively to transcripts and other elements involved in the expression of or directing the activity of CRISPR-associated (“Cas”) genes, including sequences encoding a Cas gene, a tracr (trans-activating CRISPR) sequence (e.g. tracrRNA or an active partial tracrRNA), a tracr-mate sequence (encompassing a “direct repeat” and a tracrRNA-processed partial direct repeat in the context of an endogenous CRISPR system), a guide sequence (also referred to as a “spacer” in the context of an endogenous CRISPR system), or “RNA(s)” as that term is herein used (e.g., RNA(s) to guide Cas, such as Cas9, e.g. CRISPR RNA and transactivating (tracr) RNA or a single guide RNA (sgRNA) (chimeric RNA)) or other sequences and transcripts from a CRISPR locus. In general, a CRISPR system is characterized by elements that promote the formation of a CRISPR complex at the site of a target sequence (also referred to as a protospacer in the context of an endogenous CRISPR system). See, e.g., Shmakov et al. (2015) “Discovery and Functional Characterization of Diverse Class 2 CRISPR-Cas Systems”, Molecular Cell, DOI: dx.doi.org/10.1016/j.molcel.2015.10.008.

[0307] CRISPR-Cas systems can generally fall into two classes based on their architectures of their effector molecules, which are each further subdivided by type and subtype. The two class are Class 1 and Class 2. Class 1 CRISPR-Cas systems have effector modules composed of multiple Cas proteins, some of which form crRNA-binding complexes, while Class 2 CRISPR-Cas systems include a single, multi-domain crRNA-binding protein.

[0308] In some embodiments, the CRISPR-Cas system that can be used to modify a polynucleotide of the present invention described herein can be a Class 1 CRISPR-Cas system. In some embodiments, the CRISPR-Cas system that can be used to modify a polynucleotide of the present invention described herein can be a Class 2 CRISPR-Cas system.

[0309] In certain embodiments, a CRISPR system is used to enhance expression or activity of transcription factors (e.g., RFX4, NFIB, ASCL1, PAX6). In certain embodiments, the transcription factor expression or activity is enhanced temporarily, such that the enhancement is not permanent. In certain embodiments, expression of the transcription from its endogenous gene is enhanced (e.g., by directing an activator to the gene). In certain embodiments, genes are targeted for downregulation. In certain embodiments, genes are targeted for editing.

[0310] In certain embodiments, modification of transcription factor mRNA by a Cas13-deaminase system can be used to modulate transcription factor activity in order to generate target cells (see, e.g., International Patent Publication No. WO 2019/084062). In certain embodiments, the modification silences ubiquitination, methylation, acetylation, succinylation, glycosylation, O-GlcNAc, O-linked glycosylation, iodination, nitrosylation, sulfation, carboxyglutamation, phosphorylation, or a combination thereof. In some embodiments, the modification increases a half-life of a target TF. In certain embodiments, the transcription activity is enhanced by modifying a phosphorylation site on the transcription factor (see, e.g., Hunter and Karin, 1992, The regulation of Transcription by Phosphorylation. Cell, Vol. 70, 375-387; and Whitmarsh and Davis, 2000, Regulation of transcription factor function by phosphorylation. CMLS, Cell. Mol. Life Sci. 57: 1172).

### Class 1 CRISPR-Cas Systems

[0311] In some embodiments, the CRISPR-Cas system that can be used to modify a polynucleotide of the present invention described herein can be a Class 1 CRISPR-Cas system. Class 1 CRISPR-Cas systems are divided into types I, II, and IV. Makarova et al. 2020. Nat. Rev. 18: 67-83., particularly as described in FIG. 1. Type I CRISPR-Cas systems are divided into 9 subtypes (I-A, I-B, I-C, I-D, I-E, I-F1, I-F2, I-F3, and IG). Makarova et al., 2020. Class 1, Type I CRISPR-Cas systems can contain a Cas3 protein that can have helicase activity. Type III CRISPR-Cas systems are divided into 6 subtypes (III-A, III-B, III-C, III-D, III-E, and III-F). Type III CRISPR-Cas systems can contain a Cas10 that can include an RNA recognition motif called Palm and a cyclase domain that can cleave polynucleotides. Makarova et al., 2020. Type IV CRISPR-Cas systems are divided into 3 subtypes. (IV-A, IV-B, and IV-C). Makarova et al., 2020. Class 1 systems also include CRISPR-Cas variants, including Type I-A, I-B, I-E, I-F and I-U variants, which can include variants carried by transposons and plasmids, including versions of subtype I-F encoded by a large family of Tn7-like transposon and smaller groups of Tn7-like transposons that encode similarly degraded subtype I-B systems. Peters et al., PNAS 114 (35) (2017); DOI: 10.1073/pnas.1709035114; see also, Makarova et al. 2018. The CRISPR Journal, v. 1, n 5, FIG. 5.

[0312] The Class 1 systems typically use a multi-protein effector complex, which can, in some embodiments, include ancillary proteins, such as one or more proteins in a complex referred to as a CRISPR-associated complex for antiviral defense (Cascade), one or more adaptation proteins (e.g. Cas1, Cas2, RNA nuclease), and/or one or more accessory proteins (e.g. Cas 4, DNA nuclease), CRISPR associated Rossman fold (CARF) domain containing proteins, and/or RNA transcriptase.

[0313] The backbone of the Class 1 CRISPR-Cas system effector complexes can be formed by RNA recognition motif domain-containing protein(s) of the repeat-associated mysterious proteins (RAMPs) family subunits, e.g., Cas 5, Cas6, and/or Cas7. RAMP proteins are characterized by having one or more RNA recognition motif domains. In some embodiments, multiple copies of RAMPs can be present. In some embodiments, the Class I CRISPR-Cas system can include 1, 2, 3, 4, 5, 6, 7, 8, 9, 10, 11, 12 or more Cas5, Cas6, and/or Cas 7 proteins. In some embodiments, the Cas6 protein is an RNAse, which can be responsible for pre-crRNA processing. When present in a Class 1 CRISPR-Cas system, Cas6 can be optionally physically associated with the effector complex.

[0314] Class 1 CRISPR-Cas system effector complexes can, in some embodiments, also include a large subunit. The large subunit can be composed of or include a Cas8 and/or Cas10 protein. See, e.g., FIGS. 1 and 2. Koonin E V, Makarova K S. 2019. Phil. Trans. R. Soc. B 374: 20180087, DOI: 10.1098/rstb.2018.0087 and Makarova et al. 2020.

[0315] Class 1 CRISPR-Cas system effector complexes can, in some embodiments, include a small subunit (for example, Cas11). See, e.g., FIGS. 1 and 2. Koonin E V, Makarova K S. 2019 Origins and evolution of CRISPR-Cas systems. Phil. Trans. R. Soc. B 374: 20180087, DOI: 10.1098/rstb.2018.0087.

[0316] In some embodiments, the Class 1 CRISPR-Cas system can be a Type I CRISPR-Cas system. In some embodiments, the Type I CRISPR-Cas system can be a subtype I-A CRISPR-Cas system. In some embodiments, the Type I CRISPR-Cas system can be a subtype I-B CRISPR-Cas system. In some embodiments, the Type I CRISPR-Cas system can be a subtype I-C CRISPR-Cas system. In some embodiments, the Type I CRISPR-Cas system can be a subtype I-D CRISPR-Cas system. In some embodiments, the Type I CRISPR-Cas system can be a subtype I-E CRISPR-Cas system. In some embodiments, the Type I CRISPR-Cas system can be a subtype I-F1 CRISPR-Cas system. In some embodiments, the Type I CRISPR-Cas system can be a subtype I-F2 CRISPR-Cas system. In some embodiments, the Type I CRISPR-Cas system can be a subtype I-F3 CRISPR-Cas system. In some embodiments, the Type I CRISPR-Cas system can be a subtype I-G CRISPR-Cas system. In some embodiments, the Type I CRISPR-Cas system can be a CRISPR Cas variant, such as a Type I-A, I-B, I-E, I-F and I-U variants, which can include variants carried by transposons and plasmids, including versions of subtype I-F encoded by a large family of Tn7-like transposon and smaller groups of Tn7-like transposons that encode similarly degraded subtype I-B systems as previously described.

[0317] In some embodiments, the Class 1 CRISPR-Cas system can be a Type III CRISPR-Cas system. In some embodiments, the Type III CRISPR-Cas system can be a subtype III-A CRISPR-Cas system. In some embodiments, the Type III CRISPR-Cas system can be a subtype III-B CRISPR-Cas system. In some embodiments, the Type III CRISPR-Cas system can be a subtype III-C CRISPR-Cas system. In some embodiments, the Type III CRISPR-Cas system can be a subtype III-D CRISPR-Cas system. In some embodiments, the Type III CRISPR-Cas system can be a subtype III-E CRISPR-Cas system. In some embodiments, the Type III CRISPR-Cas system can be a subtype III-F CRISPR-Cas system.

[0318] In some embodiments, the Class 1 CRISPR-Cas system can be a Type IV CRISPR-Cas-system. In some embodiments, the Type IV CRISPR-Cas system can be a subtype IV-A CRISPR-Cas system. In some embodiments, the Type IV CRISPR-Cas system can be a subtype IV-B CRISPR-Cas system. In some embodiments, the Type IV CRISPR-Cas system can be a subtype IV-C CRISPR-Cas system.

[0319] The effector complex of a Class 1 CRISPR-Cas system can, in some embodiments, include a Cas3 protein that is optionally fused to a Cas2 protein, a Cas4, a Cas 5, a Cas6, a Cas7, a Cas8, a Cas10, a Cas11, or a combination thereof. In some embodiments, the effector complex of a Class 1 CRISPR-Cas system can have multiple copies, such as 1, 2, 3, 4, 5, 6, 7, 8, 9, 10, 11, 12, 13, or 14, of any one or more Cas proteins.

### Class 2 CRISPR-Cas Systems

[0320] The compositions, systems, and methods described in greater detail elsewhere herein can be designed and adapted for use with Class 2 CRISPR-Cas systems. Thus, in some embodiments, the CRISPR-Cas system is a Class 2 CRISPR-Cas system. Class 2 systems are distinguished from Class 1 systems in that they have a single, large, multi-domain effector protein. In certain example embodiments, the Class 2 system can be a Type II, Type V, or Type VI system, which are described in Makarova et al. “Evolutionary classification of CRISPR-Cas systems: a burst of class 2 and derived variants” Nature Reviews Microbiology, 18:67-81 (February 2020), incorporated herein by reference. Each type of Class 2 system is further divided into subtypes. See Markova et al. 2020, particularly at Figure. 2. Class 2, Type II systems can be divided into 4 subtypes: II-A, II-B, II-C1, and II-C2. Class 2, Type V systems can be divided into 17 subtypes: V-A, V-B1, V-B2, V-C, V-D, V-E, V-F1, V-FI(V-U3), V-F2, V-F3, V-G, V-H, V-I, V-K (V-U5), V-U1, V-U2, and V-U4. Class 2, Type IV systems can be divided into 5 subtypes: VI-A, VI-B1, VI-B2, VI-C, and VI-D.

[0321] The distinguishing feature of these types is that their effector complexes consist of a single, large, multi-domain protein. Type V systems differ from Type II effectors (e.g. Cas9) contain two nuclear domains that are each responsible for the cleavage of one strand of the target DNA, with the HNH nuclease inserted inside the Ruv-C like nuclease domain sequence. The Type V systems (e.g. Cas12) only contain a RuvC-like nuclease domain that cleaves both strands. Type VI (Cas13) are unrelated to the effectors of type II and V systems, contain two HEPN domains and target RNA. Cas13 proteins also display collateral activity that is triggered by target recognition. Some Type V systems have also been found to possess this collateral activity two single-stranded DNA in in vitro contexts.

[0322] In some embodiments, the Class 2 system is a Type II system. In some embodiments, the Type II CRISPR-Cas system is a II-A CRISPR-Cas system. In some embodiments, the Type II CRISPR-Cas system is a II-B CRISPR-Cas system. In some embodiments, the Type II CRISPR-Cas system is a II-C1 CRISPR-Cas system. In some embodiments, the Type II CRISPR-Cas system is a II-C2 CRISPR-Cas system. In some embodiments, the Type II system is a Cas9 system. In some embodiments, the Type II system includes a Cas9.

[0323] In some embodiments, the Class 2 system is a Type V system. In some embodiments, the Type V CRISPR-Cas system is a V-A CRISPR-Cas system. In some embodiments, the Type V CRISPR-Cas system is a V-B1 CRISPR-Cas system. In some embodiments, the Type V CRISPR-Cas system is a V-B2 CRISPR-Cas system. In some embodiments, the Type V CRISPR-Cas system is a V-C CRISPR-Cas system. In some embodiments, the Type V CRISPR-Cas system is a V-D CRISPR-Cas system. In some embodiments, the Type V CRISPR-Cas system is a V-E CRISPR-Cas system. In some embodiments, the Type V CRISPR-Cas system is a V-F1 CRISPR-Cas system. In some embodiments, the Type V CRISPR-Cas system is a V-F1 (V-U3) CRISPR-Cas system. In some embodiments, the Type V CRISPR-Cas system is a V-F2 CRISPR-Cas system. In some embodiments, the Type V CRISPR-Cas system is a V-F3 CRISPR-Cas system. In some embodiments, the Type V CRISPR-Cas system is a V-G CRISPR-Cas system. In some embodiments, the Type V CRISPR-Cas system is a V-H CRISPR-Cas system. In some embodiments, the Type V CRISPR-Cas system is a V-I CRISPR-Cas system. In some embodiments, the Type V CRISPR-Cas system is a V-K (V-U5) CRISPR-Cas system. In some embodiments, the Type V CRISPR-Cas system is a V-U1 CRISPR-Cas system. In some embodiments, the Type V CRISPR-Cas system is a V-U2 CRISPR-Cas system. In some embodiments, the Type V CRISPR-Cas system is a V-U4 CRISPR-Cas system. In some embodiments, the Type V CRISPR-Cas system includes a Cas12a (Cpf1), Cas12b (C2c1), Cas12c (C2c3), CasX, and/or Cas14.

[0324] In some embodiments the Class 2 system is a Type VI system. In some embodiments, the Type VI CRISPR-Cas system is a VI-A CRISPR-Cas system. In some embodiments, the Type VI CRISPR-Cas system is a VI-B1 CRISPR-Cas system. In some embodiments, the Type VI CRISPR-Cas system is a VI-B2 CRISPR-Cas system. In some embodiments, the Type VI CRISPR-Cas system is a VI-C CRISPR-Cas system. In some embodiments, the Type VI CRISPR-Cas system is a VI-D CRISPR-Cas system. In some embodiments, the Type VI CRISPR-Cas system includes a Cas13a (C2c2), Cas13b (Group 29/30), Cas13c, and/or Cas13d.

### Specialized Cas-Based Systems

[0325] In some embodiments, the system is a Cas-based system that is capable of performing a specialized function or activity. For example, the Cas protein may be fused, operably coupled to, or otherwise associated with one or more functionals domains. In certain example embodiments, the Cas protein may be a catalytically dead Cas protein (“dCas”) and/or have nickase activity. A nickase is a Cas protein that cuts only one strand of a double stranded target. In such embodiments, the dCas or nickase provide a sequence specific targeting functionality that delivers the functional domain to or proximate a target sequence. Example functional domains that may be fused to, operably coupled to, or otherwise associated with a Cas protein can be or include, but are not limited to a nuclear localization signal (NLS) domain, a nuclear export signal (NES) domain, a translational activation domain, a transcriptional activation domain (e.g., VP64, p65, MyoD1, HSF1, RTA, and SET7/9), a translation initiation domain, a transcriptional repression domain (e.g., a KRAB domain, NuE domain, NcoR domain, and a SID domain such as a SID4X domain), a nuclease domain (e.g., FokI), a histone modification domain (e.g., a histone acetyltransferase), a light inducible/controllable domain, a chemically inducible/controllable domain, a transposase domain, a homologous recombination machinery domain, a recombinase domain, an integrase domain, and combinations thereof. Methods for generating catalytically dead Cas9 or a nickase Cas9 (WO 2014/204725, Ran et al. Cell. 2013 Sep. 12; 154(6):1380-1389), Cas12 (Liu et al. Nature Communications, 8, 2095 (2017), and Cas13 (International Patent Publication Nos. WO 2019/005884, WO2019/060746) are known in the art and incorporated herein by reference.

[0326] In some embodiments, the functional domains can have one or more of the following activities: methylase activity, demethylase activity, translation activation activity, translation initiation activity, translation repression activity, transcription activation activity, transcription repression activity, transcription release factor activity, histone modification activity, nuclease activity, single-strand RNA cleavage activity, double-strand RNA cleavage activity, single-strand DNA cleavage activity, double-strand DNA cleavage activity, molecular switch activity, chemical inducibility, light inducibility, and nucleic acid binding activity. In some embodiments, the one or more functional domains may comprise epitope tags or reporters. Non-limiting examples of epitope tags include histidine (His) tags, V5 tags, FLAG tags, influenza hemagglutinin (HA) tags, Myc tags, VSV-G tags, and thioredoxin (Trx) tags. Examples of reporters include, but are not limited to, glutathione-S-transferase (GST), horseradish peroxidase (HRP), chloramphenicol acetyltransferase (CAT) beta-galactosidase, beta-glucuronidase, luciferase, green fluorescent protein (GFP), HcRed, DsRed, cyan fluorescent protein (CFP), yellow fluorescent protein (YFP), and auto-fluorescent proteins including blue fluorescent protein (BFP).

[0327] The one or more functional domain(s) may be positioned at, near, and/or in proximity to a terminus of the effector protein (e.g., a Cas protein). In embodiments having two or more functional domains, each of the two can be positioned at or near or in proximity to a terminus of the effector protein (e.g., a Cas protein). In some embodiments, such as those where the functional domain is operably coupled to the effector protein, the one or more functional domains can be tethered or linked via a suitable linker (including, but not limited to, GlySer linkers) to the effector protein (e.g., a Cas protein). When there is more than one functional domain, the functional domains can be same or different. In some embodiments, all the functional domains are the same. In some embodiments, all of the functional domains are different from each other. In some embodiments, at least two of the functional domains are different from each other. In some embodiments, at least two of the functional domains are the same as each other.

[0328] Other suitable functional domains can be found, for example, in International Patent Publication No. WO 2019/018423.

### Split CRISPR-Cas Systems

[0329] In some embodiments, the CRISPR-Cas system is a split CRISPR-Cas system. See e.g. Zetche et al., 2015. Nat. Biotechnol. 33(2): 139-142, the compositions and techniques of which can be used in and/or adapted for use with the present invention. Split CRISPR-Cas proteins are set forth herein and in documents incorporated herein by reference in further detail herein. In certain embodiments, each part of a split CRISPR protein is attached to a member of a specific binding pair, and when bound with each other, the members of the specific binding pair maintain the parts of the CRISPR protein in proximity. In certain embodiments, each part of a split CRISPR protein is associated with an inducible binding pair. An inducible binding pair is one which is capable of being switched “on” or “off” by a protein or small molecule that binds to both members of the inducible binding pair. In some embodiments, CRISPR proteins may preferably split between domains, leaving domains intact. In particular embodiments, said Cas split domains (e.g., RuvC and HNH domains in the case of Cas9) can be simultaneously or sequentially introduced into the cell such that said split Cas domain(s) process the target nucleic acid sequence in the algae cell. The reduced size of the split Cas compared to the wild type Cas allows other methods of delivery of the systems to the cells, such as the use of cell penetrating peptides as described herein.

### Base Editing

[0330] In some embodiments, a polynucleotide of the present invention described elsewhere herein (e.g., RFX4, NFIB, ASCL1, PAX6) can be modified using a base editing system. In some embodiments, a Cas protein is connected or fused to a nucleotide deaminase. Thus, in some embodiments the Cas-based system can be a base editing system. As used herein “base editing” refers generally to the process of polynucleotide modification via a CRISPR-Cas-based or Cas-based system that does not include excising nucleotides to make the modification. Base editing can convert base pairs at precise locations without generating excess undesired editing byproducts that can be made using traditional CRISPR-Cas systems.

[0331] In certain example embodiments, the nucleotide deaminase may be a DNA base editor used in combination with a DNA binding Cas protein such as, but not limited to, Class 2 Type II and Type V systems. Two classes of DNA base editors are generally known: cytosine base editors (CBEs) and adenine base editors (ABEs). CBEs convert a C·G base pair into a T·A base pair (Komor et al. 2016. Nature. 533:420-424; Nishida et al. 2016. Science. 353; and Li et al. Nat. Biotech. 36:324-327) and ABEs convert an A·T base pair to a G·C base pair. Collectively, CBEs and ABEs can mediate all four possible transition mutations (C to T, A to G, T to C, and G to A). Rees and Liu. 2018.Nat. Rev. Genet. 19(12): 770-788, particularly at FIGS. 1b, 2a-2c, 3a-3f, and Table 1. In some embodiments, the base editing system includes a CBE and/or an ABE. In some embodiments, a polynucleotide of the present invention described elsewhere herein can be modified using a base editing system. Rees and Liu. 2018. Nat. Rev. Gent. 19(12):770-788. Base editors also generally do not need a DNA donor template and/or rely on homology-directed repair. Komor et al. 2016. Nature. 533:420-424; Nishida et al. 2016. Science. 353; and Gaudeli et al. 2017. Nature. 551:464-471. Upon binding to a target locus in the DNA, base pairing between the guide RNA of the system and the target DNA strand leads to displacement of a small segment of ssDNA in an “R-loop”. Nishimasu et al. Cell. 156:935-949. DNA bases within the ssDNA bubble are modified by the enzyme component, such as a deaminase. In some systems, the catalytically disabled Cas protein can be a variant or modified Cas can have nickase functionality and can generate a nick in the non-edited DNA strand to induce cells to repair the non-edited strand using the edited strand as a template. Komor et al. 2016. Nature. 533:420-424; Nishida et al. 2016. Science. 353; and Gaudeli et al. 2017. Nature. 551:464-471. Base editors may be further engineered to optimize conversion of nucleotides (e.g., A:T to G:C). Richter et al. 2020. Nature Biotechnology. doi.org/10.1038/s41587-020-0453-z.

[0332] Other Example Type V base editing systems are described in International Patent Publication Nos. WO 2018/213708 and WO 2018/213726, and International Patent Application Nos. PCT/US2018/067207, PCT/US2018/067225, and PCT/US2018/067307 which are incorporated by referenced herein.

[0333] In certain example embodiments, the base editing system may be a RNA base editing system. As with DNA base editors, a nucleotide deaminase capable of converting nucleotide bases may be fused to a Cas protein. However, in these embodiments, the Cas protein will need to be capable of binding RNA. Example RNA binding Cas proteins include, but are not limited to, RNA-binding Cas9s such as Francisella novicida Cas9 (“FnCas9”), and Class 2 Type VI Cas systems. The nucleotide deaminase may be a cytidine deaminase or an adenosine deaminase, or an adenosine deaminase engineered to have cytidine deaminase activity. In certain example embodiments, the RNA based editor may be used to delete or introduce a post-translation modification site in the expressed mRNA. In contrast to DNA base editors, whose edits are permanent in the modified cell, RNA base editors can provide edits where finer temporal control may be needed, for example in modulating a particular immune response. Example Type VI RNA-base editing systems are described in Cox et al. 2017. Science 358: 1019-1027, International Patent Publication Nos. WO 2019/005884, WO 2019/005886, and WO 2019/071048, and International Patent Application Nos. PCT/US20018/05179 and PCT/US2018/067207, which are incorporated herein by reference. An example FnCas9 system that may be adapted for RNA base editing purposes is described in International Patent Publication No. WO 2016/106236, which is incorporated herein by reference.

[0334] An example method for delivery of base-editing systems, including use of a split-intein approach to divide CBE and ABE into reconstitutable halves, is described in Levy et al. Nature Biomedical Engineering doi.org/10.1038/s41441-019-0505-5 (2019), which is incorporated herein by reference.

### Prime Editing

[0335] In some embodiments, a polynucleotide of the present invention described elsewhere herein (e.g. RFX4, NFIB, ASCL1, PAX6) can be modified using a prime editing system (See e.g. Anzalone et al. 2019. Nature. 576: 149-157). Like base editing systems, prime editing systems can be capable of targeted modification of a polynucleotide without generating double stranded breaks and does not require donor templates. Further prime editing systems can be capable of all 12 possible combination swaps. Prime editing can operate via a “search-and-replace” methodology and can mediate targeted insertions, deletions, all 12 possible base-to-base conversion, and combinations thereof. Generally, a prime editing system, as exemplified by PE1, PE2, and PE3 (Id.), can include a reverse transcriptase fused or otherwise coupled or associated with an RNA-programmable nickase, and a prime-editing extended guide RNA (pegRNA) to facility direct copying of genetic information from the extension on the pegRNA into the target polynucleotide. Embodiments that can be used with the present invention include these and variants thereof. Prime editing can have the advantage of lower off-target activity than traditional CRISPR-Cas systems along with few byproducts and greater or similar efficiency as compared to traditional CRISPR-Cas systems.

[0336] In some embodiments, the prime editing guide molecule can specify both the target polynucleotide information (e.g., sequence) and contain a new polynucleotide cargo that replaces target polynucleotides. To initiate transfer from the guide molecule to the target polynucleotide, the PE system can nick the target polynucleotide at a target side to expose a 3′hydroxyl group, which can prime reverse transcription of an edit-encoding extension region of the guide molecule (e.g. a prime editing guide molecule or peg guide molecule) directly into the target site in the target polynucleotide. See e.g. Anzalone et al. 2019. Nature. 576: 149-157, particularly at FIGS. 1b, 1c, related discussion, and Supplementary discussion.

[0337] In some embodiments, a prime editing system can be composed of a Cas polypeptide having nickase activity, a reverse transcriptase, and a guide molecule. The Cas polypeptide can lack nuclease activity. The guide molecule can include a target binding sequence as well as a primer binding sequence and a template containing the edited polynucleotide sequence. The guide molecule, Cas polypeptide, and/or reverse transcriptase can be coupled together or otherwise associate with each other to form an effector complex and edit a target sequence. In some embodiments, the Cas polypeptide is a Class 2, Type V Cas polypeptide. In some embodiments, the Cas polypeptide is a Cas9 polypeptide (e.g., is a Cas9 nickase). In some embodiments, the Cas polypeptide is fused to the reverse transcriptase. In some embodiments, the Cas polypeptide is linked to the reverse transcriptase.

[0338] In some embodiments, the prime editing system can be a PEI system or variant thereof, a PE2 system or variant thereof, or a PE3 (e.g., PE3, PE3b) system. See e.g., Anzalone et al. 2019. Nature. 576: 149-157, particularly at pgs. 2-3, FIGS. 2a, 3a-3f, 4a-4b, Extended data FIGS. 3a-3b, 4,

[0339] The peg guide molecule can be about 10 to about 200 or more nucleotides in length, such as 10 to/or 11, 12, 13, 14, 15, 16, 17, 18, 19, 20, 21, 22, 23, 24, 25, 26, 27, 28, 29, 30, 31, 32, 33, 34, 35, 36, 37, 38, 39, 40, 41, 42, 43, 44, 45, 46, 47, 48, 49, 50, 51, 52, 53, 54, 55, 56, 57, 58, 59, 60, 61, 62, 63, 64, 65, 66, 67, 68, 69, 70, 71, 72, 73, 74, 75, 76, 77, 78, 79, 80, 81, 82, 83, 84, 85, 86, 87, 88, 89, 90, 91, 92, 93, 94, 95, 96, 97, 98, 99, 100, 101, 102, 103, 104, 105, 106, 107, 108, 109, 110, 111, 112, 113, 114, 115, 116, 117, 118, 119, 120, 121, 122, 123, 124, 125, 126, 127, 128, 129, 130, 131, 132, 133, 134, 135, 136, 137, 138, 139, 140, 141, 142, 143, 144, 145, 146, 147, 148, 149, 150, 151, 152, 153, 154, 155, 156, 157, 158, 159, 160, 161, 162, 163, 164, 165, 166, 167, 168, 169, 170, 171, 172, 173, 174, 175, 176, 177, 178, 179, 180, 181, 182, 183, 184, 185, 186, 187, 188, 189, 190, 191, 192, 193, 194, 195, 196, 197, 198, 199, or 200 or more nucleotides in length. Optimization of the peg guide molecule can be accomplished as described in Anzalone et al. 2019. Nature. 576: 149-157, particularly at pg. 3, FIG. 2a-2b, and Extended Data FIGS. 5a-c.

### CAST Systems

[0340] In some embodiments, a polynucleotide of the present invention described elsewhere herein (e.g., RFX4, NFIB, ASCL1, PAX6) can be modified using a CRISPR-Associated Transposase (CAST) System, such as any of those described in PCT/US2019/066835. In some embodiments, a polynucleotide of the present invention described elsewhere herein can be modified using a CRISPR Associated Transposase (“CAST”) system. CAST system can include a Cas protein that is catalytically inactive, or engineered to be catalytically active, and further comprises a transposase (or subunits thereof) that catalyze RNA-guided DNA transposition. Such systems are able to insert DNA sequences at a target site in a DNA molecule without relying on host cell repair machinery. CAST systems can be Class 1 or Class 2 CAST systems. An example Class 1 system is described in Klompe et al. Nature, doi:10.1038/s41586-019-1323, which is in incorporated herein by reference. An example Class 2 system is described in Strecker et al. Science. 10/1126/science. aax9181 (2019), and International Patent Application No. PCT/US2019/066835, which are incorporated herein by reference.

### Guide Molecules

[0341] The CRISPR-Cas or Cas-Based system described herein can, in some embodiments, include one or more guide molecules. The terms guide molecule, guide sequence and guide polynucleotide, refer to polynucleotides capable of guiding Cas to a target genomic locus and are used interchangeably as in foregoing cited documents such as WO 2014/093622 (PCT/US2013/074667). In general, a guide sequence is any polynucleotide sequence having sufficient complementarity with a target polynucleotide sequence to hybridize with the target sequence and direct sequence-specific binding of a CRISPR complex to the target sequence. The guide molecule can be a polynucleotide.

[0342] The ability of a guide sequence (within a nucleic acid-targeting guide RNA) to direct sequence-specific binding of a nucleic acid-targeting complex to a target nucleic acid sequence may be assessed by any suitable assay. For example, the components of a nucleic acid-targeting CRISPR system sufficient to form a nucleic acid-targeting complex, including the guide sequence to be tested, may be provided to a host cell having the corresponding target nucleic acid sequence, such as by transfection with vectors encoding the components of the nucleic acid-targeting complex, followed by an assessment of preferential targeting (e.g., cleavage) within the target nucleic acid sequence, such as by Surveyor assay (Qui et al. 2004. BioTechniques. 36(4)702-707). Similarly, cleavage of a target nucleic acid sequence may be evaluated in a test tube by providing the target nucleic acid sequence, components of a nucleic acid-targeting complex, including the guide sequence to be tested and a control guide sequence different from the test guide sequence, and comparing binding or rate of cleavage at the target sequence between the test and control guide sequence reactions. Other assays are possible, and will occur to those skilled in the art.

[0343] In some embodiments, the guide molecule is an RNA. The guide molecule(s) (also referred to interchangeably herein as guide polynucleotide and guide sequence) that are included in the CRISPR-Cas or Cas based system can be any polynucleotide sequence having sufficient complementarity with a target nucleic acid sequence to hybridize with the target nucleic acid sequence and direct sequence-specific binding of a nucleic acid-targeting complex to the target nucleic acid sequence. In some embodiments, the degree of complementarity, when optimally aligned using a suitable alignment algorithm, can be about or more than about 50%, 60%, 75%, 80%, 85%, 90%, 95%, 97.5%, 99%, or more. Optimal alignment may be determined with the use of any suitable algorithm for aligning sequences, non-limiting examples of which include the Smith-Waterman algorithm, the Needleman-Wunsch algorithm, algorithms based on the Burrows-Wheeler Transform (e.g., the Burrows Wheeler Aligner), ClustalW, Clustal BLAT, Novoalign (Novocraft Technologies; available at www.novocraft.com), ELAND (Illumina, San Diego, CA), SOAP (available at soap.genomics.org.cn), and Maq (available at maq.sourceforge.net).

[0344] A guide sequence, and hence a nucleic acid-targeting guide, may be selected to target any target nucleic acid sequence. The target sequence may be DNA. The target sequence may be any RNA sequence. In some embodiments, the target sequence may be a sequence within a RNA molecule selected from the group consisting of messenger RNA (mRNA), pre-mRNA, ribosomal RNA (rRNA), transfer RNA (tRNA), micro-RNA (miRNA), small interfering RNA (siRNA), small nuclear RNA (snRNA), small nucleolar RNA (snoRNA), double stranded RNA (dsRNA), non-coding RNA (ncRNA), long non-coding RNA (lncRNA), and small cytoplasmatic RNA (scRNA). In some preferred embodiments, the target sequence may be a sequence within an RNA molecule selected from the group consisting of mRNA, pre-mRNA, and rRNA. In some preferred embodiments, the target sequence may be a sequence within an RNA molecule selected from the group consisting of ncRNA, and lncRNA. In some more preferred embodiments, the target sequence may be a sequence within an mRNA molecule or a pre-mRNA molecule.

[0345] In some embodiments, a nucleic acid-targeting guide is selected to reduce the degree secondary structure within the nucleic acid-targeting guide. In some embodiments, about or less than about 75%, 50%, 40%, 30%, 25%, 20%, 15%, 10%, 5%, 1%, or fewer of the nucleotides of the nucleic acid-targeting guide participate in self-complementary base pairing when optimally folded. Optimal folding may be determined by any suitable polynucleotide folding algorithm. Some programs are based on calculating the minimal Gibbs free energy. An example of one such algorithm is mFold, as described by Zuker and Stiegler (Nucleic Acids Res. 9 (1981), 133-148). Another example folding algorithm is the online webserver RNAfold, developed at Institute for Theoretical Chemistry at the University of Vienna, using the centroid structure prediction algorithm (see e.g., A. R. Gruber et al., 2008, Cell 106(1): 23-24; and PA Carr and G M Church, 2009, Nature Biotechnology 27(12): 1151-62).

[0346] In certain embodiments, a guide RNA or crRNA may comprise, consist essentially of, or consist of a direct repeat (DR) sequence and a guide sequence or spacer sequence. In certain embodiments, the guide RNA or crRNA may comprise, consist essentially of, or consist of a direct repeat sequence fused or linked to a guide sequence or spacer sequence. In certain embodiments, the direct repeat sequence may be located upstream (i.e., 5′) from the guide sequence or spacer sequence. In other embodiments, the direct repeat sequence may be located downstream (i.e., 3′) from the guide sequence or spacer sequence.

[0347] In certain embodiments, the crRNA comprises a stem loop, preferably a single stem loop. In certain embodiments, the direct repeat sequence forms a stem loop, preferably a single stem loop.

[0348] In certain embodiments, the spacer length of the guide RNA is from 15 to 35 nt. In certain embodiments, the spacer length of the guide RNA is at least 15 nucleotides. In certain embodiments, the spacer length is from 15 to 17 nt, e.g., 15, 16, or 17 nt, from 17 to 20 nt, e.g., 17, 18, 19, or 20 nt, from 20 to 24 nt, e.g., 20, 21, 22, 23, or 24 nt, from 23 to 25 nt, e.g., 23, 24, or 25 nt, from 24 to 27 nt, e.g., 24, 25, 26, or 27 nt, from 27 to 30 nt, e.g., 27, 28, 29, or 30 nt, from 30-35 nt, e.g., 30, 31, 32, 33, 34, or 35 nt, or 35 nt or longer.

[0349] The “tracrRNA” sequence or analogous terms includes any polynucleotide sequence that has sufficient complementarity with a crRNA sequence to hybridize. In some embodiments, the degree of complementarity between the tracrRNA sequence and crRNA sequence along the length of the shorter of the two when optimally aligned is about or more than about 25%, 30%, 40%, 50%, 60%, 70%, 80%, 90%, 95%, 97.5%, 99%, or higher. In some embodiments, the tracr sequence is about or more than about 5, 6, 7, 8, 9, 10, 11, 12, 13, 14, 15, 16, 17, 18, 19, 20, 25, 30, 40, 50, or more nucleotides in length. In some embodiments, the tracr sequence and crRNA sequence are contained within a single transcript, such that hybridization between the two produces a transcript having a secondary structure, such as a hairpin.

[0350] In general, degree of complementarity is with reference to the optimal alignment of the sca sequence and tracr sequence, along the length of the shorter of the two sequences. Optimal alignment may be determined by any suitable alignment algorithm, and may further account for secondary structures, such as self-complementarity within either the sca sequence or tracr sequence. In some embodiments, the degree of complementarity between the tracr sequence and sca sequence along the length of the shorter of the two when optimally aligned is about or more than about 25%, 30%, 40%, 50%, 60%, 70%, 80%, 90%, 95%, 97.5%, 99%, or higher.

[0351] In some embodiments, the degree of complementarity between a guide sequence and its corresponding target sequence can be about or more than about 50%, 60%, 75%, 80%, 85%, 90%, 95%, 97.5%, 99%, or 100%; a guide or RNA or sgRNA can be about or more than about 5, 10, 11, 12, 13, 14, 15, 16, 17, 18, 19, 20, 21, 22, 23, 24, 25, 26, 27, 28, 29, 30, 35, 40, 45, 50, 75, or more nucleotides in length; or guide or RNA or sgRNA can be less than about 75, 50, 45, 40, 35, 30, 25, 20, 15, 12, or fewer nucleotides in length; and tracr RNA can be 30 or 50 nucleotides in length. In some embodiments, the degree of complementarity between a guide sequence and its corresponding target sequence is greater than 94.5% or 95% or 95.5% or 96% or 96.5% or 97% or 97.5% or 98% or 98.5% or 99% or 99.5% or 99.9%, or 100%. Off target is less than 100% or 99.9% or 99.5% or 99% or 99% or 98.5% or 98% or 97.5% or 97% or 96.5% or 96% or 95.5% or 95% or 94.5% or 94% or 93% or 92% or 91% or 90% or 89% or 88% or 87% or 86% or 85% or 84% or 83% or 82% or 81% or 80% complementarity between the sequence and the guide, with it advantageous that off target is 100% or 99.9% or 99.5% or 99% or 99% or 98.5% or 98% or 97.5% or 97% or 96.5% or 96% or 95.5% or 95% or 94.5% complementarity between the sequence and the guide.

[0352] In some embodiments according to the invention, the guide RNA (capable of guiding Cas to a target locus) may comprise (1) a guide sequence capable of hybridizing to a genomic target locus in the eukaryotic cell; (2) a tracr sequence; and (3) a tracr mate sequence. All (1) to (3) may reside in a single RNA, i.e., an sgRNA (arranged in a 5′ to 3′ orientation), or the tracr RNA may be a different RNA than the RNA containing the guide and tracr sequence. The tracr hybridizes to the tracr mate sequence and directs the CRISPR/Cas complex to the target sequence. Where the tracr RNA is on a different RNA than the RNA containing the guide and tracr sequence, the length of each RNA may be optimized to be shortened from their respective native lengths, and each may be independently chemically modified to protect from degradation by cellular RNase or otherwise increase stability.

[0353] Many modifications to guide sequences are known in the art and are further contemplated within the context of this invention. Various modifications may be used to increase the specificity of binding to the target sequence and/or increase the activity of the Cas protein and/or reduce off-target effects. Example guide sequence modifications are described in International Patent Application No. PCT US2019/045582, specifically paragraphs [0178]-[0333]. which is incorporated herein by reference.

### Target Sequences, PAMs, and PFSs

### Target Sequences

[0354] In the context of formation of a CRISPR complex, “target sequence” refers to a sequence to which a guide sequence is designed to have complementarity, where hybridization between a target sequence and a guide sequence promotes the formation of a CRISPR complex. A target sequence may comprise RNA polynucleotides. The term “target RNA” refers to a RNA polynucleotide being or comprising the target sequence. In other words, the target polynucleotide can be a polynucleotide or a part of a polynucleotide to which a part of the guide sequence is designed to have complementarity to and to which the effector function mediated by the complex comprising the CRISPR effector protein and a guide molecule is to be directed to. In some embodiments, a target sequence is located in the nucleus or cytoplasm of a cell.

[0355] The guide sequence can specifically bind a target sequence in a target polynucleotide. The target polynucleotide may be DNA. The target polynucleotide may be RNA. The target polynucleotide can have one or more (e.g., 1, 2, 3, 4, 5, 6, 7, 8, 9, 10, etc. or more) target sequences. The target polynucleotide can be on a vector. The target polynucleotide can be genomic DNA. The target polynucleotide can be episomal. Other forms of the target polynucleotide are described elsewhere herein.

[0356] The target sequence may be DNA. The target sequence may be any RNA sequence. In some embodiments, the target sequence may be a sequence within a RNA molecule selected from the group consisting of messenger RNA (mRNA), pre-mRNA, ribosomal RNA (rRNA), transfer RNA (tRNA), micro-RNA (miRNA), small interfering RNA (siRNA), small nuclear RNA (snRNA), small nucleolar RNA (snoRNA), double stranded RNA (dsRNA), non-coding RNA (ncRNA), long non-coding RNA (lncRNA), and small cytoplasmatic RNA (scRNA). In some preferred embodiments, the target sequence (also referred to herein as a target polynucleotide) may be a sequence within a RNA molecule selected from the group consisting of mRNA, pre-mRNA, and rRNA. In some preferred embodiments, the target sequence may be a sequence within a RNA molecule selected from the group consisting of ncRNA, and lncRNA. In some more preferred embodiments, the target sequence may be a sequence within an mRNA molecule or a pre-mRNA molecule.

### PAM and PFS Elements

[0357] PAM elements are sequences that can be recognized and bound by Cas proteins. Cas proteins/effector complexes can then unwind the dsDNA at a position adjacent to the PAM element. It will be appreciated that Cas proteins and systems that include them that target RNA do not require PAM sequences (Marraffini et al. 2010. Nature. 463:568-571). Instead, many rely on PFSs, which are discussed elsewhere herein. In certain embodiments, the target sequence should be associated with a PAM (protospacer adjacent motif) or PFS (protospacer flanking sequence or site); that is, a short sequence recognized by the CRISPR complex. Depending on the nature of the CRISPR-Cas protein, the target sequence should be selected such that its complementary sequence in the DNA duplex (also referred to herein as the non-target sequence) is upstream or downstream of the PAM. In the embodiments, the complementary sequence of the target sequence is downstream or 3′ of the PAM or upstream or 5′ of the PAM. The precise sequence and length requirements for the PAM differ depending on the Cas protein used, but PAMs are typically 2-5 base pair sequences adjacent the protospacer (that is, the target sequence). Examples of the natural PAM sequences for different Cas proteins are provided herein below and the skilled person will be able to identify further PAM sequences for use with a given Cas protein.

[0358] The ability to recognize different PAM sequences depends on the Cas polypeptide(s) included in the system. See e.g. Gleditzsch et al. 2019. RNA Biology. 16(4):504-517. Table 15 below shows several Cas polypeptides and the PAM sequence they recognize.

TABLE 15
Example PAM Sequences

| | |
|---|---|
| Cas Protein | PAM Sequence |
| SpCas9 | NGG/NRG |
| SaCas9 | NGRRT or NGRRN |
| NmeCas9 | NNNNGATT |
| CjCas9 | NNNNRYAC |
| StCas9 | NNAGAAW |
| Cas12a (Cpf1) (including | TTTV |
| LbCpf1 and AsCpf1) | |
| Cas12b (C2c1) | TTT, TTA, and TTC |
| Cas12c (C2c3) | TA |
| Cas12d (CasY) | TA |
| Cas12e (CasX) | 5′-TTCN-3′ |

[0359] In a preferred embodiment, the CRISPR effector protein may recognize a 3′ PAM. In certain embodiments, the CRISPR effector protein may recognize a 3′ PAM which is 5′H, wherein H is A, C or U.

[0360] Further, engineering of the PAM Interacting (PI) domain on the Cas protein may allow programing of PAM specificity, improve target site recognition fidelity, and increase the versatility of the CRISPR-Cas protein, for example as described for Cas9 in Kleinstiver B P et al. Engineered CRISPR-Cas9 nucleases with altered PAM specificities. Nature. 2015 Jul. 23; 523(7561):481-5. doi: 10.1038/nature14592. As further detailed herein, the skilled person will understand that Cas13 proteins may be modified analogously. Gao et al, “Engineered Cpf1 Enzymes with Altered PAM Specificities,” bioRxiv 091611; doi: http://dx.doi.org/10.1101/091611 (Dec. 4, 2016). Doench et al. created a pool of sgRNAs, tiling across all possible target sites of a panel of six endogenous mouse and three endogenous human genes and quantitatively assessed their ability to produce null alleles of their target gene by antibody staining and flow cytometry. The authors showed that optimization of the PAM improved activity and also provided an on-line tool for designing sgRNAs.

[0361] PAM sequences can be identified in a polynucleotide using an appropriate design tool, which are commercially available as well as online. Such freely available tools include, but are not limited to, CRISPRFinder and CRISPRTarget. Mojica et al. 2009. Microbiol. 155(Pt. 3):733-740; Atschul et al. 1990. J. Mol. Biol. 215:403-410; Biswass et al. 2013 RNA Biol. 10:817-827; and Grissa et al. 2007. Nucleic Acid Res. 35:W52-57. Experimental approaches to PAM identification can include, but are not limited to, plasmid depletion assays (Jiang et al. 2013. Nat. Biotechnol. 31:233-239; Esvelt et al. 2013. Nat. Methods. 10:1116-1121; Kleinstiver et al. 2015. Nature. 523:481-485), screened by a high-throughput in vivo model called PAM-SCNAR (Pattanayak et al. 2013. Nat. Biotechnol. 31:839-843 and Leenay et al. 2016.Mol. Cell. 16:253), and negative screening (Zetsche et al. 2015. Cell. 163:759-771).

[0362] As previously mentioned, CRISPR-Cas systems that target RNA do not typically rely on PAM sequences. Instead such systems typically recognize protospacer flanking sites (PFSs) instead of PAMs Thus, Type VI CRISPR-Cas systems typically recognize protospacer flanking sites (PFSs) instead of PAMs. PFSs represents an analogue to PAMs for RNA targets. Type VI CRISPR-Cas systems employ a Cas13. Some Cas13 proteins analyzed to date, such as Cas13a (C2c2) identified from Leptotrichia shahii (LShCAs13a) have a specific discrimination against G at the 3′end of the target RNA. The presence of a C at the corresponding crRNA repeat site can indicate that nucleotide pairing at this position is rejected. However, some Cas13 proteins (e.g., LwaCAs13a and PspCas13b) do not seem to have a PFS preference. See e.g., Gleditzsch et al. 2019. RNA Biology. 16(4):504-517.

[0363] Some Type VI proteins, such as subtype B, have 5′-recognition of D (G, T, A) and a 3′-motif requirement of NAN or NNA. One example is the Cas13b protein identified in Bergeyella zoohelcum (BzCas13b). See e.g., Gleditzsch et al. 2019. RNA Biology. 16(4):504-517.

[0364] Overall Type VI CRISPR-Cas systems appear to have less restrictive rules for substrate (e.g. target sequence) recognition than those that target DNA (e.g., Type V and type II).

### Zinc Finger Nucleases

[0365] In some embodiments, the polynucleotide is modified using a Zinc Finger nuclease or system thereof. One type of programmable DNA-binding domain is provided by artificial zinc-finger (ZF) technology, which involves arrays of ZF modules to target new DNA-binding sites in the genome. Each finger module in a ZF array targets three DNA bases. A customized array of individual zinc finger domains is assembled into a ZF protein (ZFP).

[0366] ZFPs can comprise a functional domain. The first synthetic zinc finger nucleases (ZFNs) were developed by fusing a ZF protein to the catalytic domain of the Type IIS restriction enzyme FokI. (Kim, Y. G. et al., 1994, Chimeric restriction endonuclease, Proc. Natl. Acad. Sci. U.S.A. 91, 883-887; Kim, Y. G. et al., 1996, Hybrid restriction enzymes: zinc finger fusions to Fok I cleavage domain. Proc. Natl. Acad. Sci. U.S.A. 93, 1156-1160). Increased cleavage specificity can be attained with decreased off target activity by use of paired ZFN heterodimers, each targeting different nucleotide sequences separated by a short spacer. (Doyon, Y. et al., 2011, Enhancing zinc-finger-nuclease activity with improved obligate heterodimeric architectures. Nat. Methods 8, 74-79). ZFPs can also be designed as transcription activators and repressors and have been used to target many genes in a wide variety of organisms. Exemplary methods of genome editing using ZFNs can be found for example in U.S. Pat. Nos. 6,534,261, 6,607,882, 6,746,838, 6,794,136, 6,824,978, 6,866,997, 6,933,113, 6,979,539, 7,013,219, 7,030,215, 7,220,719, 7,241,573, 7,241,574, 7,585,849, 7,595,376, 6,903,185, and 6,479,626, all of which are specifically incorporated by reference.

### TALE Nucleases

[0367] In some embodiments, a TALE nuclease or TALE nuclease system can be used to modify a polynucleotide. In some embodiments, the methods provided herein use isolated, non-naturally occurring, recombinant or engineered DNA binding proteins that comprise TALE monomers or TALE monomers or half monomers as a part of their organizational structure that enable the targeting of nucleic acid sequences with improved efficiency and expanded specificity.

[0368] Naturally occurring TALEs or “wild type TALEs” are nucleic acid binding proteins secreted by numerous species of proteobacteria. TALE polypeptides contain a nucleic acid binding domain composed of tandem repeats of highly conserved monomer polypeptides that are predominantly 33, 34 or 35 amino acids in length and that differ from each other mainly in amino acid positions 12 and 13. In advantageous embodiments the nucleic acid is DNA. As used herein, the term “polypeptide monomers”, “TALE monomers” or “monomers” will be used to refer to the highly conserved repetitive polypeptide sequences within the TALE nucleic acid binding domain and the term “repeat variable di-residues” or “RVD” will be used to refer to the highly variable amino acids at positions 12 and 13 of the polypeptide monomers. As provided throughout the disclosure, the amino acid residues of the RVD are depicted using the IUPAC single letter code for amino acids. A general representation of a TALE monomer which is comprised within the DNA binding domain is X1-11-(X12X13)-X14-33 or 34 or 35, where the subscript indicates the amino acid position and X represents any amino acid. X12X13 indicate the RVDs. In some polypeptide monomers, the variable amino acid at position 13 is missing or absent and in such monomers, the RVD consists of a single amino acid. In such cases the RVD may be alternatively represented as X*, where X represents X12 and (*) indicates that X13 is absent. The DNA binding domain comprises several repeats of TALE monomers and this may be represented as (X1-11-(X12X13)-X14-33 or 34 or 35) z, where in an advantageous embodiment, z is at least 5 to 40. In a further advantageous embodiment, z is at least 10 to 26.

[0369] The TALE monomers can have a nucleotide binding affinity that is determined by the identity of the amino acids in its RVD. For example, polypeptide monomers with an RVD of NI can preferentially bind to adenine (A), monomers with an RVD of NG can preferentially bind to thymine (T), monomers with an RVD of HD can preferentially bind to cytosine (C) and monomers with an RVD of NN can preferentially bind to both adenine (A) and guanine (G). In some embodiments, monomers with an RVD of IG can preferentially bind to T. Thus, the number and order of the polypeptide monomer repeats in the nucleic acid binding domain of a TALE determines its nucleic acid target specificity. In some embodiments, monomers with an RVD of NS can recognize all four base pairs and can bind to A, T, G or C. The structure and function of TALEs is further described in, for example, Moscou et al., Science 326:1501 (2009); Boch et al., Science 326:1509-1512 (2009); and Zhang et al., Nature Biotechnology 29:149-153 (2011).

[0370] The polypeptides used in methods of the invention can be isolated, non-naturally occurring, recombinant or engineered nucleic acid-binding proteins that have nucleic acid or DNA binding regions containing polypeptide monomer repeats that are designed to target specific nucleic acid sequences.

[0371] As described herein, polypeptide monomers having an RVD of HN or NH preferentially bind to guanine and thereby allow the generation of TALE polypeptides with high binding specificity for guanine containing target nucleic acid sequences. In some embodiments, polypeptide monomers having RVDs RN, NN, NK, SN, NH, KN, HN, NQ, HH, RG, KH, RH and SS can preferentially bind to guanine. In some embodiments, polypeptide monomers having RVDs RN, NK, NQ, HH, KH, RH, SS and SN can preferentially bind to guanine and can thus allow the generation of TALE polypeptides with high binding specificity for guanine containing target nucleic acid sequences. In some embodiments, polypeptide monomers having RVDs HH, KH, NH, NK, NQ, RH, RN and SS can preferentially bind to guanine and thereby allow the generation of TALE polypeptides with high binding specificity for guanine containing target nucleic acid sequences. In some embodiments, the RVDs that have high binding specificity for guanine are RN, NH RH and KH. Furthermore, polypeptide monomers having an RVD of NV can preferentially bind to adenine and guanine. In some embodiments, monomers having RVDs of H*, HA, KA, N*, NA, NC, NS, RA, and S* bind to adenine, guanine, cytosine and thymine with comparable affinity.

[0372] The predetermined N-terminal to C-terminal order of the one or more polypeptide monomers of the nucleic acid or DNA binding domain determines the corresponding predetermined target nucleic acid sequence to which the polypeptides of the invention will bind. As used herein the monomers and at least one or more half monomers are “specifically ordered to target” the genomic locus or gene of interest. In plant genomes, the natural TALE-binding sites always begin with a thymine (T), which may be specified by a cryptic signal within the non-repetitive N-terminus of the TALE polypeptide; in some cases, this region may be referred to as repeat 0. In animal genomes, TALE binding sites do not necessarily have to begin with a thymine (T) and polypeptides of the invention may target DNA sequences that begin with T, A, G or C. The tandem repeat of TALE monomers always ends with a half-length repeat or a stretch of sequence that may share identity with only the first 20 amino acids of a repetitive full-length TALE monomer and this half repeat may be referred to as a half-monomer. Therefore, it follows that the length of the nucleic acid or DNA being targeted is equal to the number of full monomers plus two.

[0373] As described in Zhang et al., Nature Biotechnology 29:149-153 (2011), TALE polypeptide binding efficiency may be increased by including amino acid sequences from the “capping regions” that are directly N-terminal or C-terminal of the DNA binding region of naturally occurring TALEs into the engineered TALEs at positions N-terminal or C-terminal of the engineered TALE DNA binding region. Thus, in certain embodiments, the TALE polypeptides described herein further comprise an N-terminal capping region and/or a C-terminal capping region.

[0374] An exemplary amino acid sequence of a N-terminal capping region is:

(SEQ ID NO: 10788)
M D P I R S R T P S P A R E L L S G P Q
P D G V Q P T A D R G V S P P A G G P L
D G L P A R R T M S R T R L P S P P A P
S P A F S A D S F S D L L R Q F D P S L
F N T S L F D S L P P F G A H H T E A A
T G E W D E V Q S G L R A A D A P P P T
M R V A V T A A R P P R A K P A P R R R
A A Q P S D A S P A A Q V D L R T L G Y
S Q Q Q Q E K I K P K V R S T V A Q H H
E A L V G H G F T H A H I V A L S Q H P
A A L G T V A V K Y Q D M I A A L P E A
T H E A I V G V G K Q W S G A R A L E A
L L T V A G E L R G P P L Q L D T G Q L
L K I A K R G G V T A V E A V H A W R N
A L T G A P L N

[0375] An exemplary amino acid sequence of a C-terminal capping region is:

(SEQ ID NO: 10789)
R P A L E S I V A Q L S R P D P A L A A
L T N D H L V A L A C L G G R P A L D A
V K K G L P H A P A L I K R T N R R I P
E R T S H R V A D H A Q V V R V L G F F
Q C H S H P A Q A F D D A M T Q F G M S
R H G L L Q L F R R V G V T E L E A R S
G T L P P A S Q R W D R I L Q A S G M K
R A K P S P T S T Q T P D Q A S L H A F
A D S L E R D L D A P S P M H E G D Q T
R A S

[0376] As used herein the predetermined “N-terminus” to “C terminus” orientation of the N-terminal capping region, the DNA binding domain comprising the repeat TALE monomers and the C-terminal capping region provide structural basis for the organization of different domains in the d-TALEs or polypeptides of the invention.

[0377] The entire N-terminal and/or C-terminal capping regions are not necessary to enhance the binding activity of the DNA binding region. Therefore, in certain embodiments, fragments of the N-terminal and/or C-terminal capping regions are included in the TALE polypeptides described herein.

[0378] In certain embodiments, the TALE polypeptides described herein contain a N-terminal capping region fragment that included at least 10, 20, 30, 40, 50, 54, 60, 70, 80, 87, 90, 94, 100, 102, 110, 117, 120, 130, 140, 147, 150, 160, 170, 180, 190, 200, 210, 220, 230, 240, 250, 260 or 270 amino acids of an N-terminal capping region. In certain embodiments, the N-terminal capping region fragment amino acids are of the C-terminus (the DNA-binding region proximal end) of an N-terminal capping region. As described in Zhang et al., Nature Biotechnology 29:149-153 (2011), N-terminal capping region fragments that include the C-terminal 240 amino acids enhance binding activity equal to the full length capping region, while fragments that include the C-terminal 147 amino acids retain greater than 80% of the efficacy of the full length capping region, and fragments that include the C-terminal 117 amino acids retain greater than 50% of the activity of the full-length capping region.

[0379] In some embodiments, the TALE polypeptides described herein contain a C-terminal capping region fragment that included at least 6, 10, 20, 30, 37, 40, 50, 60, 68, 70, 80, 90, 100, 110, 120, 127, 130, 140, 150, 155, 160, 170, 180 amino acids of a C-terminal capping region. In certain embodiments, the C-terminal capping region fragment amino acids are of the N-terminus (the DNA-binding region proximal end) of a C-terminal capping region. As described in Zhang et al., Nature Biotechnology 29:149-153 (2011), C-terminal capping region fragments that include the C-terminal 68 amino acids enhance binding activity equal to the full-length capping region, while fragments that include the C-terminal 20 amino acids retain greater than 50% of the efficacy of the full-length capping region.

[0380] In certain embodiments, the capping regions of the TALE polypeptides described herein do not need to have identical sequences to the capping region sequences provided herein. Thus, in some embodiments, the capping region of the TALE polypeptides described herein have sequences that are at least 50%, 60%, 70%, 80%, 85%, 90%, 91%, 92%, 93%, 94%, 95%, 96%, 97%, 98% or 99% identical or share identity to the capping region amino acid sequences provided herein. Sequence identity is related to sequence homology. Homology comparisons may be conducted by eye, or more usually, with the aid of readily available sequence comparison programs. These commercially available computer programs may calculate percent (%) homology between two or more sequences and may also calculate the sequence identity shared by two or more amino acid or nucleic acid sequences. In some preferred embodiments, the capping region of the TALE polypeptides described herein have sequences that are at least 95% identical or share identity to the capping region amino acid sequences provided herein.

[0381] Sequence homologies can be generated by any of a number of computer programs known in the art, which include but are not limited to BLAST or FASTA. Suitable computer programs for carrying out alignments like the GCG Wisconsin Bestfit package may also be used. Once the software has produced an optimal alignment, it is possible to calculate % homology, preferably % sequence identity. The software typically does this as part of the sequence comparison and generates a numerical result.

[0382] In some embodiments described herein, the TALE polypeptides of the invention include a nucleic acid binding domain linked to the one or more effector domains. The terms “effector domain” or “regulatory and functional domain” refer to a polypeptide sequence that has an activity other than binding to the nucleic acid sequence recognized by the nucleic acid binding domain. By combining a nucleic acid binding domain with one or more effector domains, the polypeptides of the invention may be used to target the one or more functions or activities mediated by the effector domain to a particular target DNA sequence to which the nucleic acid binding domain specifically binds.

[0383] In some embodiments of the TALE polypeptides described herein, the activity mediated by the effector domain is a biological activity. For example, in some embodiments the effector domain is a transcriptional inhibitor (i.e., a repressor domain), such as an mSin interaction domain (SID). SID4X domain or a Krüppel-associated box (KRAB) or fragments of the KRAB domain. In some embodiments the effector domain is an enhancer of transcription (i.e. an activation domain), such as the VP16, VP64 or p65 activation domain. In some embodiments, the nucleic acid binding is linked, for example, with an effector domain that includes but is not limited to a transposase, integrase, recombinase, resolvase, invertase, protease, DNA methyltransferase, DNA demethylase, histone acetylase, histone deacetylase, nuclease, transcriptional repressor, transcriptional activator, transcription factor recruiting, protein nuclear-localization signal or cellular uptake signal.

[0384] In some embodiments, the effector domain is a protein domain which exhibits activities which include but are not limited to transposase activity, integrase activity, recombinase activity, resolvase activity, invertase activity, protease activity, DNA methyltransferase activity, DNA demethylase activity, histone acetylase activity, histone deacetylase activity, nuclease activity, nuclear-localization signaling activity, transcriptional repressor activity, transcriptional activator activity, transcription factor recruiting activity, or cellular uptake signaling activity. Other preferred embodiments of the invention may include any combination of the activities described herein.

### Meganucleases

[0385] In some embodiments, a meganuclease or system thereof can be used to modify a polynucleotide. Meganucleases, which are endodeoxyribonucleases characterized by a large recognition site (double-stranded DNA sequences of 12 to 40 base pairs). Exemplary methods for using meganucleases can be found in U.S. Pat. Nos. 8,163,514, 8,133,697, 8,021,867, 8,119,361, 8,119,381, 8,124,369, and 8,129,134, which are specifically incorporated by reference.

### Sequences Related to Nucleus Targeting and Transportation

[0386] In some embodiments, one or more components (e.g., the Cas protein and/or deaminase, Zn Finger protein, TALE, or meganuclease) in the composition for engineering cells may comprise one or more sequences related to nucleus targeting and transportation. Such sequence may facilitate the one or more components in the composition for targeting a sequence within a cell. In order to improve targeting of the CRISPR-Cas protein and/or the nucleotide deaminase protein or catalytic domain thereof used in the methods of the present disclosure to the nucleus, it may be advantageous to provide one or both of these components with one or more nuclear localization sequences (NLSs).

[0387] In some embodiments, the NLSs used in the context of the present disclosure are heterologous to the proteins. Non-limiting examples of NLSs include an NLS sequence derived from: the NLS of the SV40 virus large T-antigen, having the amino acid sequence PKKKRKV (SEQ ID NO: 10790) or PKKKRKVEAS (SEQ ID NO: 10791); the NLS from nucleoplasmin (e.g., the nucleoplasmin bipartite NLS with the sequence KRPAATKKAGQAKKKK (SEQ ID NO: 10792)); the c-myc NLS having the amino acid sequence PAAKRVKLD (SEQ ID NO: 10793) or RQRRNELKRSP (SEQ ID NO: 10794); the hRNPA1 M9 NLS having the sequence NQSSNFGPMKGGNFGGRSSGPYGGGGQYFAKPRNQGGY (SEQ ID NO: 10795); the sequence RMRIZFKNKGKDTAELRRRRVEVSVELRKAKKDEQILKRRNV (SEQ ID NO: 10796) of the IBB domain from importin-alpha; the sequences VSRKRPRP (SEQ ID NO: 10797) and PPKKARED (SEQ ID NO: 10798) of the myoma T protein; the sequence PQPKKKPL (SEQ ID NO: 10799) of human p53; the sequence SALIKKKKKMAP (SEQ ID NO: 10800) of mouse c-abl IV; the sequences DRLRR (SEQ ID NO: 10801) and PKQKKRK (SEQ ID NO: 10802) of the influenza virus NS1; the sequence RKLKKKIKKL (SEQ ID NO: 10803) of the Hepatitis virus delta antigen; the sequence REKKKFLKRR (SEQ ID NO; 10804) of the mouse Mx1 protein; the sequence KRKGDEVDGVDEVAKKKSKK (SEQ ID NO: 10805) of the human poly(ADP-ribose) polymerase; and the sequence RKCLQAGMNLEARKTKK (SEQ ID NO: 10806) of the steroid hormone receptors (human) glucocorticoid. In general, the one or more NLSs are of sufficient strength to drive accumulation of the DNA-targeting Cas protein in a detectable amount in the nucleus of a eukaryotic cell. In general, strength of nuclear localization activity may derive from the number of NLSs in the CRISPR-Cas protein, the particular NLS(s) used, or a combination of these factors. Detection of accumulation in the nucleus may be performed by any suitable technique. For example, a detectable marker may be fused to the nucleic acid-targeting protein, such that location within a cell may be visualized, such as in combination with a means for detecting the location of the nucleus (e.g., a stain specific for the nucleus such as DAPI). Cell nuclei may also be isolated from cells, the contents of which may then be analyzed by any suitable process for detecting protein, such as immunohistochemistry, Western blot, or enzyme activity assay. Accumulation in the nucleus may also be determined indirectly, such as by an assay for the effect of nucleic acid-targeting complex formation (e.g., assay for deaminase activity) at the target sequence, or assay for altered gene expression activity affected by DNA-targeting complex formation and/or DNA-targeting), as compared to a control not exposed to the CRISPR-Cas protein and deaminase protein, or exposed to a CRISPR-Cas and/or deaminase protein lacking the one or more NLSs.

[0388] The CRISPR-Cas and/or nucleotide deaminase proteins may be provided with 1 or more, such as with, 2, 3, 4, 5, 6, 7, 8, 9, 10, or more heterologous NLSs. In some embodiments, the proteins comprises about or more than about 1, 2, 3, 4, 5, 6, 7, 8, 9, 10, or more NLSs at or near the amino-terminus, about or more than about 1, 2, 3, 4, 5, 6, 7, 8, 9, 10, or more NLSs at or near the carboxy-terminus, or a combination of these (e.g., zero or at least one or more NLS at the amino-terminus and zero or at one or more NLS at the carboxy terminus). When more than one NLS is present, each may be selected independently of the others, such that a single NLS may be present in more than one copy and/or in combination with one or more other NLSs present in one or more copies. In some embodiments, an NLS is considered near the N- or C-terminus when the nearest amino acid of the NLS is within about 1, 2, 3, 4, 5, 10, 15, 20, 25, 30, 40, 50, or more amino acids along the polypeptide chain from the N- or C-terminus. In preferred embodiments of the CRISPR-Cas proteins, an NLS attached to the C-terminal of the protein.

[0389] In certain embodiments, the CRISPR-Cas protein and the deaminase protein are delivered to the cell or expressed within the cell as separate proteins. In these embodiments, each of the CRISPR-Cas and deaminase protein can be provided with one or more NLSs as described herein. In certain embodiments, the CRISPR-Cas and deaminase proteins are delivered to the cell or expressed with the cell as a fusion protein. In these embodiments one or both of the CRISPR-Cas and deaminase protein is provided with one or more NLSs. Where the nucleotide deaminase is fused to an adaptor protein (such as MS2) as described above, the one or more NLS can be provided on the adaptor protein, provided that this does not interfere with aptamer binding. In particular embodiments, the one or more NLS sequences may also function as linker sequences between the nucleotide deaminase and the CRISPR-Cas protein.

[0390] In certain embodiments, guides of the disclosure comprise specific binding sites (e.g., aptamers) for adapter proteins, which may be linked to or fused to an nucleotide deaminase or catalytic domain thereof. When such a guide forms a CRISPR complex (e.g., CRISPR-Cas protein binding to guide and target) the adapter proteins bind and, the nucleotide deaminase or catalytic domain thereof associated with the adapter protein is positioned in a spatial orientation which is advantageous for the attributed function to be effective.

[0391] The skilled person will understand that modifications to the guide which allow for binding of the adapter+nucleotide deaminase, but not proper positioning of the adapter+nucleotide deaminase (e.g., due to steric hindrance within the three dimensional structure of the CRISPR complex) are modifications which are not intended. The one or more modified guide may be modified at the tetra loop, the stem loop 1, stem loop 2, or stem loop 3, as described herein, preferably at either the tetra loop or stem loop 2, and in some cases at both the tetra loop and stem loop 2.

[0392] In some embodiments, a component (e.g., the dead Cas protein, the nucleotide deaminase protein or catalytic domain thereof, or a combination thereof) in the systems may comprise one or more nuclear export signals (NES), one or more nuclear localization signals (NLS), or any combinations thereof. In some cases, the NES may be an HIV Rev NES. In certain cases, the NES may be MAPK NES. When the component is a protein, the NES or NLS may be at the C terminus of component. Alternatively or additionally, the NES or NLS may be at the N terminus of component. In some examples, the Cas protein and optionally said nucleotide deaminase protein or catalytic domain thereof comprise one or more heterologous nuclear export signal(s) (NES(s)) or nuclear localization signal(s) (NLS(s)), preferably an HIV Rev NES or MAPK NES, preferably C-terminal.

### Templates

[0393] In some embodiments, the composition for engineering cells comprises a template, e.g., a recombination template. A template may be a component of another vector as described herein, contained in a separate vector, or provided as a separate polynucleotide. In some embodiments, a recombination template is designed to serve as a template in homologous recombination, such as within or near a target sequence nicked or cleaved by a nucleic acid-targeting effector protein as a part of a nucleic acid-targeting complex.

[0394] In an embodiment, the template nucleic acid alters the sequence of the target position. In an embodiment, the template nucleic acid results in the incorporation of a modified, or non-naturally occurring base into the target nucleic acid.

[0395] The template sequence may undergo a breakage mediated or catalyzed recombination with the target sequence. In an embodiment, the template nucleic acid may include sequence that corresponds to a site on the target sequence that is cleaved by a Cas protein mediated cleavage event. In an embodiment, the template nucleic acid may include sequence that corresponds to both, a first site on the target sequence that is cleaved in a first Cas protein mediated event, and a second site on the target sequence that is cleaved in a second Cas protein mediated event.

[0396] In certain embodiments, the template nucleic acid can include sequence which results in an alteration in the coding sequence of a translated sequence, e.g., one which results in the substitution of one amino acid for another in a protein product, e.g., transforming a mutant allele into a wild type allele, transforming a wild type allele into a mutant allele, and/or introducing a stop codon, insertion of an amino acid residue, deletion of an amino acid residue, or a nonsense mutation. In certain embodiments, the template nucleic acid can include sequence which results in an alteration in a non-coding sequence, e.g., an alteration in an exon or in a 5′ or 3′ non-translated or non-transcribed region. Such alterations include an alteration in a control element, e.g., a promoter, enhancer, and an alteration in a cis-acting or trans-acting control element.

[0397] A template nucleic acid having homology with a target position in a target gene may be used to alter the structure of a target sequence. The template sequence may be used to alter an unwanted structure, e.g., an unwanted or mutant nucleotide. The template nucleic acid may include sequence which, when integrated, results in: decreasing the activity of a positive control element; increasing the activity of a positive control element; decreasing the activity of a negative control element; increasing the activity of a negative control element; decreasing the expression of a gene; increasing the expression of a gene; increasing resistance to a disorder or disease; increasing resistance to viral entry; correcting a mutation or altering an unwanted amino acid residue conferring, increasing, abolishing or decreasing a biological property of a gene product, e.g., increasing the enzymatic activity of an enzyme, or increasing the ability of a gene product to interact with another molecule.

[0398] The template nucleic acid may include sequence which results in: a change in sequence of 1, 2, 3, 4, 5, 6, 7, 8, 9, 10, 1 1, 12 or more nucleotides of the target sequence.

[0399] A template polynucleotide may be of any suitable length, such as about or more than about 10, 15, 20, 25, 50, 75, 100, 150, 200, 500, 1000, or more nucleotides in length. In an embodiment, the template nucleic acid may be 20+/−10, 30+/−10, 40+/−10, 50+/−10, 60+/−10, 70+/−10, 80+/−10, 90+/−10, 100+/−10, 1 10+/−10, 120+/−10, 130+/−10, 140+/−10, 150+/−10, 160+/−10, 170+/−10, 1 80+/−10, 190+/−10, 200+/−10, 210+/−10, of 220+/−10 nucleotides in length. In an embodiment, the template nucleic acid may be 30+/−20, 40+/−20, 50+/−20, 60+/−20, 70+/−20, 80+/−20, 90+/−20, 100+/−20, 1 10+/−20, 120+/−20, 130+/−20, 140+/−20, 150+/−20, 160+/−20, 170+/−20, 180+/−20, 190+/−20, 200+/−20, 210+/−20, of 220+/−20 nucleotides in length. In an embodiment, the template nucleic acid is 10 to 1,000, 20 to 900, 30 to 800, 40 to 700, 50 to 600, 50 to 500, 50 to 400, 50 to 300, 50 to 200, or 50 to 100 nucleotides in length.

[0400] In some embodiments, the template polynucleotide is complementary to a portion of a polynucleotide comprising the target sequence. When optimally aligned, a template polynucleotide might overlap with one or more nucleotides of a target sequences (e.g., about or more than about 1, 5, 10, 15, 20, 25, 30, 35, 40, 45, 50, 60, 70, 80, 90, 100 or more nucleotides). In some embodiments, when a template sequence and a polynucleotide comprising a target sequence are optimally aligned, the nearest nucleotide of the template polynucleotide is within about 1, 5, 10, 15, 20, 25, 50, 75, 100, 200, 300, 400, 500, 1000, 5000, 10000, or more nucleotides from the target sequence.

[0401] The exogenous polynucleotide template comprises a sequence to be integrated (e.g., a mutated gene). The sequence for integration may be a sequence endogenous or exogenous to the cell. Examples of a sequence to be integrated include polynucleotides encoding a protein or a non-coding RNA (e.g., a microRNA). Thus, the sequence for integration may be operably linked to an appropriate control sequence or sequences. Alternatively, the sequence to be integrated may provide a regulatory function.

[0402] An upstream or downstream sequence may comprise from about 20 bp to about 2500 bp, for example, about 50, 100, 200, 300, 400, 500, 600, 700, 800, 900, 1000, 1100, 1200, 1300, 1400, 1500, 1600, 1700, 1800, 1900, 2000, 2100, 2200, 2300, 2400, or 2500 bp. In some methods, the exemplary upstream or downstream sequence have about 200 bp to about 2000 bp, about 600 bp to about 1000 bp, or more particularly about 700 bp to about 1000.

[0403] An upstream or downstream sequence may comprise from about 20 bp to about 2500 bp, for example, about 50, 100, 200, 300, 400, 500, 600, 700, 800, 900, 1000, 1100, 1200, 1300, 1400, 1500, 1600, 1700, 1800, 1900, 2000, 2100, 2200, 2300, 2400, or 2500 bp. In some methods, the exemplary upstream or downstream sequence have about 200 bp to about 2000 bp, about 600 bp to about 1000 bp, or more particularly about 700 bp to about 1000

[0404] In certain embodiments, one or both homology arms may be shortened to avoid including certain sequence repeat elements. For example, a 5′ homology arm may be shortened to avoid a sequence repeat element. In other embodiments, a 3′ homology arm may be shortened to avoid a sequence repeat element. In some embodiments, both the 5′ and the 3′ homology arms may be shortened to avoid including certain sequence repeat elements.

[0405] In some methods, the exogenous polynucleotide template may further comprise a marker. Such a marker may make it easy to screen for targeted integrations. Examples of suitable markers include restriction sites, fluorescent proteins, or selectable markers. The exogenous polynucleotide template of the disclosure can be constructed using recombinant techniques (see, for example, Sambrook et al., 2001 and Ausubel et al., 1996).

[0406] In certain embodiments, a template nucleic acid for correcting a mutation may be designed for use as a single-stranded oligonucleotide. When using a single-stranded oligonucleotide, 5′ and 3′ homology arms may range up to about 200 base pairs (bp) in length, e.g., at least 25, 50, 75, 100, 125, 150, 175, or 200 bp in length.

[0407] In certain embodiments, a template nucleic acid for correcting a mutation may be designed for use with a homology-independent targeted integration system. Suzuki et al. describe in vivo genome editing via CRISPR/Cas9 mediated homology-independent targeted integration (2016, Nature 540:144-149). Schmid-Burgk, et al. describe use of the CRISPR-Cas9 system to introduce a double-strand break (DSB) at a user-defined genomic location and insertion of a universal donor DNA (Nat Commun. 2016 Jul. 28; 7:12338). Gao, et al. describe “Plug-and-Play Protein Modification Using Homology-Independent Universal Genome Engineering” (Neuron. 2019 Aug. 21; 103(4):583-597).

### RNAi

[0408] In certain embodiments, the genetic modifying agent is RNAi (e.g., shRNA). As used herein, “gene silencing” or “gene silenced” in reference to an activity of an RNAi molecule, for example a siRNA or miRNA refers to a decrease in the mRNA level in a cell for a target gene by at least about 5%, about 10%, about 20%, about 30%, about 40%, about 50%, about 60%, about 70%, about 80%, about 90%, about 95%, about 99%, about 100% of the mRNA level found in the cell without the presence of the miRNA or RNA interference molecule. In one preferred embodiment, the mRNA levels are decreased by at least about 70%, about 80%, about 90%, about 95%, about 99%, about 100%.

[0409] As used herein, the term “RNAi” refers to any type of interfering RNA, including but not limited to, siRNAi, shRNAi, endogenous microRNA and artificial microRNA. For instance, it includes sequences previously identified as siRNA, regardless of the mechanism of down-stream processing of the RNA (i.e., although siRNAs are believed to have a specific method of in vivo processing resulting in the cleavage of mRNA, such sequences can be incorporated into the vectors in the context of the flanking sequences described herein). The term “RNAi” can include both gene silencing RNAi molecules, and also RNAi effector molecules which activate the expression of a gene.

[0410] As used herein, a “siRNA” refers to a nucleic acid that forms a double stranded RNA, which double stranded RNA has the ability to reduce or inhibit expression of a gene or target gene when the siRNA is present or expressed in the same cell as the target gene. The double stranded RNA siRNA can be formed by the complementary strands. In one embodiment, a siRNA refers to a nucleic acid that can form a double stranded siRNA. The sequence of the siRNA can correspond to the full-length target gene, or a subsequence thereof. Typically, the siRNA is at least about 15-50 nucleotides in length (e.g., each complementary sequence of the double stranded siRNA is about 15-50 nucleotides in length, and the double stranded siRNA is about 15-50 base pairs in length, preferably about 19-30 base nucleotides, preferably about 20-25 nucleotides in length, e.g., 20, 21, 22, 23, 24, 25, 26, 27, 28, 29, or 30 nucleotides in length).

[0411] As used herein “shRNA” or “small hairpin RNA” (also called stem loop) is a type of siRNA. In one embodiment, these shRNAs are composed of a short, e.g., about 19 to about 25 nucleotide, antisense strand, followed by a nucleotide loop of about 5 to about 9 nucleotides, and the analogous sense strand. Alternatively, the sense strand can precede the nucleotide loop structure and the antisense strand can follow.

[0412] The terms “microRNA” or “miRNA” are used interchangeably herein are endogenous RNAs, some of which are known to regulate the expression of protein-coding genes at the posttranscriptional level. Endogenous microRNAs are small RNAs naturally present in the genome that are capable of modulating the productive utilization of mRNA. The term artificial microRNA includes any type of RNA sequence, other than endogenous microRNA, which is capable of modulating the productive utilization of mRNA. MicroRNA sequences have been described in publications such as Lim, et al., Genes & Development, 17, p. 991-1008 (2003), Lim et al Science 299, 1540 (2003), Lee and Ambros Science, 294, 862 (2001), Lau et al., Science 294, 858-861 (2001), Lagos-Quintana et al, Current Biology, 12, 735-739 (2002), Lagos Quintana et al, Science 294, 853-857 (2001), and Lagos-Quintana et al, RNA, 9, 175-179 (2003), which are incorporated by reference. Multiple microRNAs can also be incorporated into a precursor molecule. Furthermore, miRNA-like stem-loops can be expressed in cells as a vehicle to deliver artificial miRNAs and short interfering RNAs (siRNAs) for the purpose of modulating the expression of endogenous genes through the miRNA and or RNAi pathways.

[0413] As used herein, “double stranded RNA” or “dsRNA” refers to RNA molecules that are comprised of two strands. Double-stranded molecules include those comprised of a single RNA molecule that doubles back on itself to form a two-stranded structure. For example, the stem loop structure of the progenitor molecules from which the single-stranded miRNA is derived, called the pre-miRNA (Bartel et al. 2004. Cell 1 16:281-297), comprises a dsRNA molecule.

### Delivery

[0414] The programmable nucleic acid modifying agents and other modulating agents, or components thereof, or nucleic acid molecules thereof (including, for instance HDR template), or nucleic acid molecules encoding or providing components thereof, may be delivered by a delivery system herein described.

[0415] Vector delivery, e.g., plasmid, viral delivery: the modulating agents, can be delivered using any suitable vector, e.g., plasmid or viral vectors, such as adeno associated virus (AAV), lentivirus, adenovirus or other viral vector types, or combinations thereof. In some embodiments, the vector, e.g., plasmid or viral vector is delivered to the tissue of interest by, for example, an intramuscular injection, while other times the delivery is via intravenous, transdermal, intranasal, oral, mucosal, or other delivery methods. Such delivery may be either via a single dose, or multiple doses. One skilled in the art understands that the actual dosage to be delivered herein may vary greatly depending upon a variety of factors, such as the vector choice, the target cell, organism, or tissue, the general condition of the subject to be treated, the degree of transformation/modification sought, the administration route, the administration mode, the type of transformation/modification sought, etc.

[0416] In certain embodiments, mRNA encoding the transcription factors are delivered to a subject in need thereof. In certain embodiments, the mRNA is modified mRNA (see, e.g., U.S. Pat. No. 9,428,535 B2)

[0417] In certain embodiments, proteins, mRNA or cells are administered via targeted injection (e.g., the tissue to be repaired), intravenous, infusion, or other delivery methods. Such delivery may be either via a single dose, or multiple doses. One skilled in the art understands that the actual dosage to be delivered herein may vary greatly depending upon a variety of factors, such as the target cell, or tissue, the general condition of the subject to be treated, the degree of modification sought, the administration route, the administration mode, the type of modification sought, etc.

[0418] In certain embodiment, transcription factors are expressed in target tissue cells temporarily. In certain embodiments, the time of transcription factor expression or enhancement is only the time required to differentiate or transdifferentiate cells into target cells. In certain embodiments, transcription factors are expressed or enhanced for 1 to 14 days, preferably, about 2 days. In certain embodiments, the means of delivery does not result in integration of a sequence encoding transcription factors in the genome of target cells.

[0419] The invention is further described in the following examples, which do not limit the scope of the invention described in the claims.

### EXAMPLES

### Example 1—Identification of Transcription Factors that Differentiate hESCs into Radial Glia

[0420] Radial glia are neural progenitors of the developing mammalian brain capable of generating neurons, astrocytes, and oligodendrocytes. The two most established methods for producing neural progenitors, embryoid body formation and dual SMAD inhibition, are not high-throughput and produce non-homogenous neural progenitor populations (Chambers S M, et al., Highly efficient neural conversion of human ES and iPS cells by dual inhibition of SMAD signaling. Nat Biotechnol. 2009; 27(3):275-80; and Pankratz M T, et al., Directed neural differentiation of human embryonic stem cells via an obligated primitive anterior stage. Stem Cells. 2007; 25(6):1511-20). Applicants developed a stepwise method for differentiating hESCs into neural progenitors. Although previous studies have shown that overexpression of the TFs ASCL1 and PAX6 can drive differentiation of embryonic stem cells into neural progenitors and neurons, the TFs that direct human radial glia differentiation remain unknown (Chanda S, et al., Generation of induced neuronal cells by the single reprogramming factor ASCL1. Stem Cell Reports. 2014; 3(2):282-96; and Zhang X, et al., Pax6 is a human neuroectoderm cell fate determinant. Cell Stem Cell. 2010; 7(1):90-100). Applicants individually overexpressed candidate TFs that are specifically expressed in radial glia based on available RNA-sequencing (RNA-seq) datasets, and selected those that generate cells expressing radial glia-specific marker genes and presenting associated morphology. Identification of novel TFs that direct radial glia differentiation can enable better understanding of neural development and provide positive controls for establishing a TF screening platform.

[0421] To establish a system for TF-directed differentiation, Applicants compared two overexpression methods, cDNA and CRISPR activation (Konermann S, et al., Genome-scale transcriptional activation by an engineered CRISPR-Cas9 complex. Nature. 2015; 517(7536):583-8), to upregulate known TFs that direct differentiation of hESCs to neurons, NEUROD1 and NEUROG2, in the HUES66 hESC line (Zhang Y, et al., 2013). Applicants chose the HUES66 line because of its ability to generate brain organoids efficiently and maintain karyotype stability (Quadrato G, et al., Cell diversity and network dynamics in photosensitive human brain organoids. Nature. 2017; 545(7652):48-53). Applicants found that in this system only cDNA overexpression successfully and efficiently differentiated hESCs into neurons by immunostaining for MAP2, a neuronal marker (specifically, the TF ORF without UTR as described further herein). Based on the results of the comparison, Applicants used cDNA to overexpress TFs individually in a targeted arrayed screen to identify those that could differentiate hESCs into radial glia (FIG. 1a). Applicants selected a set of 73 TFs shown to be specifically expressed in radial glia or neural progenitors in 6 published RNA-seq datasets (Camp J G, et al., Human cerebral organoids recapitulate gene expression programs of fetal neocortex development. Proc Natl Acad Sci USA. 2015; 112(51):15672-7; Johnson M B, et al., Single-cell analysis reveals transcriptional heterogeneity of neural progenitors in human cortex. Nat Neurosci. 2015; 18(5):637-46; Pollen A A, et al., Molecular identity of human outer radial glia during cortical development. Cell. 2015; 163(1):55-67; Thomsen E R, et al., Fixed single-cell transcriptomic characterization of human radial glial diversity. Nat Methods. 2016; 13(1):87-93; Wu J Q, et al., Dynamic transcriptomes during neural differentiation of human embryonic stem cells revealed by short, long, and paired-end sequencing. Proc Natl Acad Sci USA. 2010; 107(11):5254-9; and Zhang Y, et al., Purification and Characterization of Progenitor and Mature Human Astrocytes Reveals Transcriptional and Functional Differences with Mouse. Neuron. 2016; 89(1):37-53). For each TF, Applicants included isoforms that comprised >25% of the expressed transcript, resulting in a total of 90 TF isoforms (Table 1). Applicants chose to synthesize the targeted TF library to avoid potential sequence errors commonly found in existing cDNA libraries, and cloned the library into a vector with a constitutive EF1a promoter. Applicants included a V5 epitope tag and unique 24-nucleotide DNA barcode on each TF to facilitate downstream assessment of protein expression and TF abundance in the cell population respectively (SEQ ID NO: 1-90). Applicants packaged the targeted library into lentivirus for delivery into hESCs and screened the targeted library in an arrayed format, where hESCs in each well of a 96-well plate express a different TF (FIG. 1a). The barcode is transcribed but not translated (i.e., because it is not part of the ORF). The barcode is lentivirally integrated with the cDNA in the genomic DNA. Applicants PCR amplify the barcode from the genomic DNA to identify which cDNA constructs were integrated. At 4 and 7 days after transduction, Applicants evaluated the TFs using imaging for radial glia-like morphology and qPCR for two radial glia marker genes, SLC1A3 and VIM, identified in published RNA-seq datasets (Id). Applicants identified 7 candidate TFs: ASCL1, EOMES, FOS, NFIB, OTX1, PAX6, and RFX4 (FIG. 1b, c).

[0422] Applicants next evaluated the fidelity of radial glia differentiated from each candidate. First, Applicants performed RNA-seq on radial glia derived from overexpressing each candidate for 7 and 12 days. Gene signature analysis of the RNA-seq data suggested similarities (e.g., EOMES and RFX4) and differences (e.g., NFIB and ASCL1) in the transcriptomes between the candidates. To determine how closely the differentiated radial glia resembled their in vivo counterparts, Applicants computationally generated gene expression signatures based on the 1,000 most differentially expressed genes compared to the GFP overexpression control and quantified enrichment of these signatures in human fetal radial glia and other neural cell types from the Pollen et al. dataset (FIG. 2) (Pollen A A, et al., 2015; and Barbie D A, et al., Systematic RNA interference reveals that oncogenic KRAS-driven cancers require TBK1. Nature. 2009; 462(7269): 108-12). Applicants found that candidates NFIB and RFX4 produced radial glia that were most similar to radial glia in vivo. Second, Applicants immunostained for radial glia markers NES and VIM, and found that all of the radial glia differentiated by these candidates expressed these markers (FIG. 3a). Finally, Applicants spontaneously differentiated the radial glia to determine if they could produce neurons, astrocytes, and oligodendrocytes. Applicants cloned the candidates into a different vector under a dox-inducible promoter and induced expression of the candidates for 5, 7, and 12 days and then withdrew growth factors EGF and bFGF from the media (which maintain the progenitor state) and allowed cells to differentiate for 1, 2, and 4 weeks. Applicants immunostained for markers identifying neurons (MAP2), astrocytes (GFAP), and oligodendrocyte precursors (NG2 and PDGFRA). Similar to neural development in vivo, Applicants observed that neurogenesis occurred before gliogenesis. By 4 weeks of differentiation, radial glia differentiated from 3 of the 7 candidates (FOS, NFIB, and OTX1) produced only neurons and 3 (ASCL1, PAX6, and RFX4) produced both neurons and astrocytes (FIG. 3b). Applicants, further show that the 4 candidates (ASCL1, NFIB, PAX6, and RFX4) differentiate into both neurons and astrocytes by week 4 (FIGS. 4-7). Transcription factors were induced with doxycycline for 6 days and cells were stained at the indicated time points.

### Discussion of Methods for Selection and Characterization of TFs Driving Optimal Radial Glia Differentiation

[0423] Applicants can continue to validate the candidate TFs. Applicants have already identified and selected the most promising TFs for further characterization to understand their role in radial glia differentiation. In particular, because some of the candidates did not produce neurons until after 4 weeks of differentiation, Applicants can spontaneously differentiate radial glia derived by candidate TF overexpression for a total of 6-8 weeks to observe additional astrocytes and oligodendrocytes. Applicants can immunostain the cells that have been differentiated for 6 and 8 weeks to determine which candidates generate radial glia that can differentiate into all 3 cell types at this time point. After pinpointing the ideal TF induction and differentiation timeline, Applicants can perform single-cell RNA-seq on the cells spontaneously differentiated from the top 4 candidates to more precisely characterize the types of differentiated cells. Due to the morphology of neural cells and difficulty in dissociating single neural cell types, single nuclei can be isolated from neural cells and sequenced as previously described (see e.g., WO/2017/164936). Applicants can compare the anatomical location of the cell types that the differentiated cells correspond to in vivo to the TF expression pattern in the human brain using the Allen Human Brain Atlas (Sunkin S M, et al., Allen Brain Atlas: an integrated spatio-temporal portal for exploring the central nervous system. Nucleic Acids Res. 2013; 41(Database issue):D996-D1008). To better understand the regulatory pathways through which the TFs drive differentiation, Applicants can also perform chromatin immunoprecipitation followed by sequencing (ChIP-seq) using the epitope tag (e.g., V5) on the TF cDNA constructs and identify target genes for the top 4 candidates. Applicants can integrate differentially expressed genes and TF target genes from the RNA-seq and ChIP-seq results respectively to better understand potential pathway similarities and differences between the top 4 TFs. Finally, Applicants can combine 2 or 3 of the top 4 candidates and assess any potential synergistic improvement in radial glia fidelity using RNA-seq and spontaneous differentiation.

[0424] Given the data described herein, Applicants expect to find several candidate TFs whose overexpression can differentiate hESCs into radial glia that closely resemble primary cells. Applicants can also uncover multiple candidate TFs that each produce different subtypes of radial glia. Some of these candidates might upregulate the radial glia marker genes without exhibiting other properties associated with radial glia, such as ability to differentiate into different neural cell types. Since the candidate TFs likely have different downstream gene targets, the radial glia produced can have different transcriptome signatures and spontaneously differentiate into varying proportions of different downstream neural cell types. Applicants expect that the types of downstream cell types identified by single-nuclei RNA-seq can correlate with the expression pattern of the TF in the human brain.

[0425] A number of directed differentiation protocols require overexpression of two or more TFs for successful cell type conversion. It is possible that one TF can be insufficient for generating radial glia that can maintain multipotency and spontaneously differentiate into neurons, astrocytes, and oligodendrocytes. In this case, Applicants can select 5-10 candidates that produce cell types with transcriptome signatures that are most similar to human fetal radial glia and overexpress different combinations of these candidates. Applicants can also combine the top 5-10 TFs that are most specifically and highly expressed in radial glia based on available RNA-seq datasets (Camp J G, et al., 2015; Johnson M B, et al., 2015; Pollen A A, et al., 2015; Thomsen E R, et al., 2016; Wu J Q, et al., 2010; and Zhang Y, et al., 2016).

### Example 2—Arrayed TF Screen for iNP Differentiation

[0426] As described in example 1, Applicants compared two methods for overexpressing TFs to direct differentiation, ORF (open reading frame, cDNA) and synergistic activation mediators (SAM) CRISPR-Cas9 activation¹⁶. Applicants used these methods to stably upregulate NEUROD1 or NEUROG2, two TFs that have been previously shown to induce neuronal differentiation, in the HUES66 hESC line (FIG. 18a)¹². For both TFs, Applicants found that expression of the TF ORF effectively induced neuronal differentiation (FIG. 18b-f). However, overexpression of the TFs using the ORF with endogenous UTRs or SAM CRISPR-Cas9 activator did not efficiently differentiate hESCs into neurons despite robust transcriptional upregulation, potentially due to endogenous post-transcriptional regulatory mechanisms that limit protein expression (FIG. 18b-f). The results suggest that cell fate pathways are tightly regulated and that using the most artificial overexpression method, TF ORF, would be advantageous for cellular engineering.

[0427] Based on the results of the comparison, Applicants used TF ORF overexpression to screen for TFs that could differentiate hESCs into iNPs first in an arrayed format to identify optimal parameters and candidate TFs that could guide the development of pooled TF screens (FIG. 19a,b). To select a subset of TFs for the arrayed screen, Applicants examined eight RNA-seq datasets¹⁷⁻²⁴ that were available at the time and identified 70 TFs that were shown to be specifically expressed in NPs. For each TF, Applicants included isoforms that comprised >25% of the expressed transcript, resulting in a total of 90 TF isoforms (FIG. 19a and Table 1). Applicants synthesized the TF isoforms and packaged each TF individually into lentivirus for delivery into hESCs in an arrayed format (FIG. 19b). During the screen, Applicants incrementally shifted the stem cell culture media to NP media (FIG. 19c) and measured expression of two NP marker genes selected using published RNA-seq datasets, SLC1A3 and VIM, at 4 and 7 days after transduction (FIG. 19b)¹⁷⁻²⁴. The arrayed TF screen identified eight candidate TFs whose isoforms ranked in the top 10% for SLC1A3 and VIM upregulation in the screen (FIG. 19d-g; Table 1).

### Example 3—Development of a Pooled TF Screening Platform

[0428] Pooled screens are less expensive and time-intensive than arrayed screens because they do not require individually preparing each perturbation (e.g., overexpression of TFs) in the library. Pooled screening involves transducing pooled lentiviral libraries at a low multiplicity of infection (MOI) to ensure that most cells only receive one stably integrated construct. At the end of the screen, deep sequencing of DNA barcodes contained in the constructs integrated in the bulk genomic DNA can be used to identify changes in the construct distribution resulting from the applied screening selection pressure. In certain embodiments, cells having characteristic markers for the cell type of interest (e.g., radial glia) are sorted and the DNA barcodes corresponding to TFs are determined, thus identifying TFs required for differentiation into the cell type of interest.

[0429] Applicants provide a generalizable TF screening platform based on pooled screening for further identification of regulators driving cellular differentiation (FIG. 8a). Applicants can develop the pooled screen based on the findings differentiating hESCs into radial glia. The pooled screening platform further comprises engineered hESC reporter lines that fluoresce upon differentiation into radial glia by genetically tagging radial glia marker genes with GFP. The pooled screening platform provides a more cost-effective, versatile, and reliable approach compared to antibody staining. In addition, the use of reporter lines for marker genes found through RNA-seq of target cell types increases the versatility of the platform; for any cell type of interest, one can collect RNA-seq data, identify marker genes, and screen for TFs that upregulate the marker genes. Applicants can overexpress pooled TF libraries in the hESC reporter lines, and select for candidates using flow cytometry followed by deep sequencing of the barcodes associated with the cDNAs (FIG. 8a). Applicants can validate the pooled screening approach by pooling the 90 TFs from Examples 1-2 and performing a pooled screen with this targeted TF library. To develop a generalizable platform for differentiating hESCs into any desired cell type, Applicants can scale up the pooled screen first with an available >1300 TF library from the Broad Genomics Perturbations Platform (GPP) and then with a synthesized >3500 TF library consisting of all annotated TFs. The genome-scale TF library can be a valuable resource for constructing a directed differentiation cell atlas that can be helpful for the scientific community.

[0430] Applicants have engineered two different HUES66 hESC reporter lines that express the fluorescent protein EGFP upon upregulation of an endogenous radial glia marker gene, either VIM or SLC1A3. Screening in two different marker gene reporter lines can more specifically pinpoint which TFs direct radial glia differentiation rather than upregulate one gene that may also be expressed in other cell types. For each marker gene, Applicants used CRISPR-Cas9 to precisely edit the endogenous locus such that the EGFP is expressed under the same promoter as the marker gene, followed by a ribosomal skipping site P2A and the marker gene (Cong L, et al., Multiplex genome engineering using CRISPR/Cas systems. Science. 2013; 339(6121):819-23; and Mali P, et al., RNA-guided human genome engineering via Cas9. Science. 2013; 339(6121):823-6). Applicants chose to insert EGFP at the N-terminus of the proteins because its location was consistent across the isoforms. The P2A ribosomal skipping site separates the EGFP and marker gene proteins and prevents the EGFP insertion from potentially interfering with protein folding of the endogenous gene. For each marker gene, Applicants generated three clonal hESC lines to reduce the possibility that candidate TFs identified only have an effect in a particular clonal line. Applicants evaluated the ability of the reporter lines to fluoresce upon marker gene upregulation by targeting CRISPR activators to the marker gene promoter as well as by overexpressing a candidate TF from Example 1 to differentiate the hESCs into radial glia (Konermann S, et al., 2015). In both cases, Applicants detected EGFP fluorescence in both marker lines by imaging. For TF overexpression, Applicants also observed morphological changes consistent with radial glia differentiation.

[0431] Applicants validated the pooled screening system by pooling the targeted 90 TF library in Examples 1-2 and performing a targeted pooled screen (FIG. 8a). Applicants amplified and packaged the pooled library into lentiviral vectors and transduced each hESC reporter line at MOI<0.3. After 7 days, Applicants used flow cytometry to isolate live cells expressing fluorescent EGFP, indicating upregulation of the radial glia marker gene, and live cells with the lowest 15% fluorescence for baseline TF distribution. Applicants isolated genomic DNA from each population, PCR amplified the DNA barcodes associated with the TFs, and deep sequenced the barcodes to identify TFs that were more enriched in the fluorescent population compared to control in the VIM and SLC1A3 reporter cell lines (FIG. 8b). Applicants found that the candidates identified in Example 1 were significantly enriched in the pooled screens. Six of 7 TFs were in the top 15 candidates. ASCL1 was not enriched in the fluorescent population in the pooled screens, potentially because ASCL1-driven differentiation relies on early formation of neural rosettes (FIG. 1c), or radial arrangements of neural stem cells, which are less likely to form in a pooled screen because nearby cells can be overexpressing different TFs rather than ASCL1. FIG. 9 is a scatterplot of the 1,387 TF screening results, showing that the 7 TF candidates (ASCL1, EOMES, FOS, NFIB, OTX1, PAX6, and RFX4) are enriched and also show additional candidates for differentiating stem cells into radial glia (FANCD2, NOTCH1, SMARCC1, ESR2, ESR1, and MESP1).

### Development of a Versatile Genome-Scale TF Screen

[0432] To scale up the pooled TF screen to include all annotated TF isoforms, Applicants can use the >1,300 TF library from the Broad GPP and then synthesize a >3,500 genome-scale TF library that includes all annotated TFs (see, e.g., Table 3). The Broad GPP library is a convenient intermediate because it is readily available at a lower cost. Applicants added the candidates identified in Examples 1-2 to the Broad GPP library as positive controls. Applicants amplified the pooled Broad GPP library and verified even distribution of the TFs with deep sequencing. Applicants can package the Broad GPP library into lentivirus for transducing the hESC radial glia reporter lines. As in the targeted pooled screen, Applicants can isolate the fluorescent and control cell populations and deep sequence the barcodes to compare the TF distribution between the two populations. Applicants can evaluate the results of the Broad GPP library using the candidates identified in Examples 1-2. If the TF screen using the Broad GPP library is successful, Applicants can synthesize the complete >3,500 genome-scale TF library and screen for radial glia differentiation using the genome-scale library.

### Validation of Novel TFs

[0433] Applicants can validate any additional TFs identified in the pooled screens using the arrayed methods described in Examples 1-2. If any of the candidate TFs produce radial glia that are comparable with the top 3 candidates identified in Examples 1-2, Applicants can combine the TF(s) from the pooled screens with those from the arrayed screens to potentially improve radial glia fidelity.

### Discussion

[0434] By starting with a targeted pooled library and incrementally scaling up to a genome-scale library using known positive controls, Applicants can establish a generalizable TF screening platform. As Applicants increase the TF library size, Applicants expect that the proportion of fluorescent cells in the screening population can decrease. Applicants can adjust the screening parameters, such as increasing flow cytometry time and number of PCR cycles for barcode amplification, to detect the rarer positive population. Performing the pooled screening platform with the genome-scale TF library may provide additional novel TFs that can drive radial glia differentiation.

[0435] As shown in Examples 1-2, it is possible that radial glia differentiation can require upregulation of multiple TFs. To screen for combinations of TFs, Applicants can transduce the TF libraries at high MOI such that each cell potentially overexpresses multiple TFs. Applicants can validate the candidates most enriched for radial glia marker gene expression both individually and combinatorically. Multiple barcodes in single cells can be determined by any single cell sequencing method described herein.

[0436] Since current neural progenitor differentiation protocols often require formation of neural rosettes, it is possible that pooled screening cannot recover some candidates found in the arrayed screen in Examples 1-2. Applicants can recover these candidates by constructing an inducible TF library (e.g., dox inducible), transducing the library at low cell density, allowing the cells to multiply in small colonies, and then inducing TF overexpression.

[0437] Compared to short hairpin RNAs and guide RNAs, cDNAs contain longer variable sequences, which can increase the skew in the distribution of pooled cDNA libraries. If the pooled cDNA libraries are significantly more skewed, Applicants can increase the screening coverage such that more cells are expressing each cDNA.

### Example 4—Development of a Pooled TF Screening Platform Using Flow-FISH

[0438] Applicants have further developed a pooled transcription factor screening platform that does not require generating clonal cell lines that express a marker gene. Applicants have used Flow FISH to read out transcription factor screens. The method provides for detecting marker genes for indicating differentiation of target cells using gene specific probes and sorting the cells. In certain embodiments, multiple markers are used to increase specificity. Selecting for multiple reporter genes at the same time can narrow down target cell types because usually one gene is not specific enough depending on the target cell type. Additionally, the assay is versatile in that reporter genes can be added or changed by applying different probes. Flow FISH combines FISH to fluorescently label mRNA of reporter genes and flow cytometry (see, e.g., Arrigucci et al., FISH-Flow, a protocol for the concurrent detection of mRNA and protein in single cells using fluorescence in situ hybridization and flow cytometry, Nat Protoc. 2017 June; 12(6):1245-1260. doi:10.1038/nprot.2017.039). Specifically, Applicants fluorescently label mRNA of reporter genes, select for target cell types by flow cytometry, and then amplify TF barcodes to identify TFs enriched in the target cells. In certain embodiments, the marker genes are selected, such that they are specifically expressed only in the target cell. In this way, false positive selection or background is avoided. The assay is also optimized to remove background fluorescence and to select for true positive cells.

[0439] Applicants used the 90 TF library to screen for TFs that differentiate into radial glia by combining both SLC1A3 and VIM probes for those reporter genes (Table 4). The data shows that Applicants were able to selectively enrich for TFs that were identified in the arrayed and reporter gene screens to differentiate radial glia described in Examples 1-3.

### Example 5—Identification of Candidate TFs Using the Pooled TF Screening Platform

[0440] Having optimized parameters and identified candidate TFs in the arrayed screen, Applicants generated a pooled TF screening approach, as described herein. The pooled screening platform is less expensive and laborious than arrayed screening, making it more high-throughput. Applicants simplified TF identification in pooled screens by pairing a unique DNA barcode with each of the 90 TF ORF isoforms synthesized for the arrayed screen (FIG. 20a; Table 1). Applicants pooled the barcoded TFs and packaged the TFs into a pooled lentiviral library for delivery (FIG. 13a). To determine the ideal strategy for selecting TFs that drive iNP differentiation, Applicants explored three different methods that can simultaneously assay different numbers of marker genes to select for target cell types: reporter cell line (1 gene), flow-FISH (up to 10 genes), and single-cell RNA-seq (scRNA-seq; up to ˜2,000 genes; FIG. 13a and FIG. 20b).

[0441] For the reporter cell line method, Applicants generated clonal reporter cell lines with EGFP inserted downstream of an endogenous NP marker gene, either SLC1A3 or VIM as described. Applicants transduced the SLCIA3 or VIM reporter cell line with the pooled TF library, differentiated the cells for 7 days, and sorted for high and low EGFP-expressing cells (FIG. 13a and FIG. 20b, c). Deep sequencing of the TF barcodes in each population identified nine candidate TFs that were ranked in the top 10% for enrichment in the high EGFP-expressing cell population, indicating upregulation of SLC1A3 or VIM (FIG. 20d, e and Table 1). Five of the nine candidate TFs were identified in the arrayed screen (FIG. 20d, e and Table 1).

[0442] For the flow-FISH method, Applicants transduced hESCs with the pooled TF library, differentiated the cells for 7 days, and labeled 2 or 10 NP marker gene transcripts using pooled FISH probes (FIG. 13a and FIG. 20b). By pooling the FISH probes, Applicants could sort for cells expressing high or low levels of 2-10 marker genes at the same time (FIG. 20f, g). Similar to the reporter cell line method, Applicants deep sequenced the TF barcodes and identified eight candidate TFs whose isoforms ranked in the top 10% for enrichment in cells expressing higher levels of marker genes (FIG. 13b, c and Table 1). Applicants found that for some TFs, such as EOMES and RFX4, the choice of TF isoform can produce very different differentiation results (FIG. 13c). Six of the eight candidate TFs from the flow-FISH screen overlapped with those from the arrayed screen (FIG. 20d, e and Table 1).

[0443] For the scRNA-seq method, Applicants transduced hESCs with the pooled TF library, differentiated the cells for 7 days, and performed scRNA-seq to profile 59,640 single cells (FIG. 13a and FIG. 20b). In the barcoded TF ORF vector design, the TF barcode is expressed in the TF mRNA, which is captured by scRNA-seq and can be mapped to cell barcodes (FIG. 20a). After assigning TFs to cells, Applicants found that the number of cells that had each TF overexpressed was very skewed, with the top 10% of TFs having 92 times more cells than the bottom 10% of TFs, potentially due to TF-dependent effects on cell death and proliferation (FIG. 21a). Cluster analysis of the scRNA-seq results suggested that overexpression of several TFs, for instance ASCL1 and FEZF2, generated distinct transcriptome signatures that clustered together, while overexpression of most TFs did not produce distinct transcriptome signatures (FIG. 21b-d). By correlating the TF transcriptome signatures with those of radial glia from published datasets^{20,25,26}, which represent NPs in the developing cortex, Applicants identified eight candidate TFs whose isoforms ranked in the top 10% for highest correlation (FIG. 21d and Table 1). Three of the eight candidate TFs were candidates identified in the arrayed screen, potentially because scRNA-seq samples provide expression of more genes (FIG. 21d and Table 1).

[0444] Overall, the arrayed and pooled screens nominated overlapping sets of candidate TFs for iNP differentiation (FIG. 13d, and Table 1). Out of the pooled screening methods, flow-FISH identified the highest number (6 out of 8) of candidate TFs that overlapped with other screens (FIG. 13d and FIG. 20h). Flow-FISH is also more versatile than reporter cell lines and more accessible than the scRNA-seq, suggesting that it may be the ideal screening method for other cell types.

### Example 6—Validation of Candidate TFs

[0445] To validate the screening results, Applicants chose to focus on the eight candidate TFs from the flow-FISH screen as well as two additional candidates that were enriched in the other screens and previously suggested to mediate iNP differentiation, ASCL127 and PAX628 (FIG. 13d). Applicants individually overexpressed the top isoform of each TF in hESCs and verified TF expression (FIG. 22a). Immunostaining the iNPs for NP markers showed that all iNPs expressed higher levels of VIM, a gene used to select target cells in the pooled screen, compared to hESCs and exhibited diverse morphologies (FIG. 14a and FIG. 22b). Five candidate TFs (OTX1, EOMES, RFX4, PAX6, and ASCL1) produced iNPs that were morphologically distinct from hESCs overexpressing GFP control, two candidate TFs (HES1 and LHX2) produced iNPs with similar morphologies to hESCs, and three candidate TFs (NFIC, FOS, and NFIB) produced iNPs with morphologies that were in between the two groups. Applicants then compared bulk RNA-seq signatures of iNPs to different cell types in the human fetal cortex or brain organoids^{20,25,26}. Applicants found that transcriptome signatures of iNPs derived using RFX4, ASCL1, and PAX6 were the most similar to NPs, whereas those produced by EOMES and FOS were the most different (FIG. 14b and FIG. 22d, e). The validation results suggest that although overexpression of all candidate TFs upregulated NP marker genes, not all candidate TFs generated cells with transcriptome signatures that resembled those of NPs.

### Example 7—Spontaneous Differentiation of iNPs

[0446] Next, Applicants functionally validated the candidate TFs by spontaneously differentiating the iNPs produced by each candidate. Applicants transiently overexpressed candidate TFs for 1 week to produce iNPs and removed growth factors from the media to allow the iNPs to spontaneously differentiate (FIG. 15a). Functional iNPs, like NPs, should spontaneously differentiate into cell types in the central nervous system (CNS) such as neurons and astrocytes. Out of the ten candidate TFs, four (RFX4, NFIB, PAX6, and ASCL1) produced iNPs that spontaneously differentiated into neurons, astrocytes, and, more rarely, oligodendrocyte precursor cells (FIG. 15b and FIG. 23). Spontaneous differentiation of iNPs generated by these four TFs followed the natural developmental progression of neurogenesis starting at week 1 followed by gliogenesis at week 4 (FIG. 15b and FIG. 23). RFX4 iNPs patterned into neural rosettes prior to neurogenesis (FIG. 15b and FIG. 23).

[0447] Applicants validated these four TFs in two additional pluripotent stem cell lines, iPSC11a and H1. For both cell lines, overexpression of the four TFs produced iNPs that expressed higher levels of NP marker genes relative to GFP control (FIG. 24a, b). Using spontaneous differentiation to functionally characterize iNPs, Applicants found that RFX4 and NFIB consistently produced functional iNPs in iPSC11a (FIG. 24c), and RFX4 produced functional iNPs in H1 (FIG. 24d). These results indicate that the effects of some TFs are cell line-dependent, while others, like RFX4, are cell line-independent and more likely to play critical roles in NP specification during development.

[0448] Applicants further characterized the cells spontaneously differentiated from iNPs produced by these four TFs using scRNA-seq. Cluster analysis of 52,364 cells revealed that the iNPs generated a broad range of cell types that are produced by NPs during development, such as cell types from the retina, CNS, epithelium, and neural crest (FIG. 16a, b, FIG. 25a, and Tables 5 and 6). Applicants found that the spontaneously differentiated cell types were generally consistent between biological replicates and distinct between TFs (FIG. 16c, d). RFX4 produced more CNS cell types; NFIB produced more epithelium and neural crest cell types; PAX6 generated cell types in all regions; and ASCL1 produced more retina cell types (FIG. 16c, d). The distributions of cell types generated by TF-iNPs are similar to those of human brain organoids generated with NP embryoid bodies (FIG. 16d and FIG. 25b). Together, the spontaneous differentiation results show that four of the candidate TFs produce functional iNPs.

[0449] Applicants sought to better understand the transcriptional networks that lead to iNP production by profiling the transcriptional targets of the four TFs using chromatin immunoprecipitation with sequencing (ChIP-seq). Motif analysis generated distinct motifs for each TF and suggested potential transcription coregulators, some of which have been previously shown to interact with the TF (FIG. 26a)^{29,30}. Applicants assigned TFs as potential regulators of a NP marker gene if the TF had a ChIP-seq peak within 10 kb of the gene's transcriptional start site (FIG. 26b-d). For each TF, Applicants identified NP marker genes with TF ChIP-seq peaks that were also differentially expressed upon TF overexpression. Comparison of these NP marker genes between TFs suggested candidate genes that could contribute to the potential mechanisms by which each TF produced iNPs (FIG. 26e). In addition, Applicants found that each of the four TFs had ChIP-seq peaks that were proximal to its own promoter, indicating that each TF positively regulates its own expression to sustain the high expression levels required for differentiation (FIG. 26e).

### Example 8—Modeling Neurodevelopmental Disorders Using iNPs

[0450] To demonstrate that iNPs can be used to model neurological disorders, Applicants knocked out and overexpressed DYRK1A, perturbations which have been implicated in autism spectrum disorder³¹ and Down syndrome³² respectively, in iPSC11a (FIG. 17a-c and FIG. 27a, b). Applicants transiently overexpressed RFX4 to differentiate the iPSCs into iNPs to study the effects of DYRK1A perturbation on NPs during neural development. Applicants characterized iNPs using bulk RNA-seq and identified genes that were significantly differentially expressed as a result of DYRK1A perturbation (FIG. 17d, FIG. 27c-f, and Table 7). Applicants identified 42 genes that showed DYRK1A dosage-dependent expression changes, some of which are known to be involved in cellular proliferation, neuronal migration, and synapse formation (FIG. 17d).

[0451] Applicants then spontaneously differentiated the iNPs to further profile the effects of DYRK1A perturbation on neurogenesis and neural development. Applicants found that knockout of DYRK1A increased, whereas overexpression of DYRK1A decreased, the proportion of proliferating iNPs (FIG. 17e, f), consistent with results from previous studies of DYRK1A perturbation in different model systems³³⁻³⁷. At week 0 of spontaneous differentiation, DYRK1A knockout iNPs showed reduced proliferation, potentially due to toxicity of DNA double-strand breaks introduced by Cas9 (FIG. 17e). However, at weeks 2 and 4, DYRK1A knockout iNPs showed significantly increased proportions of proliferating cells, indicating that more iNPs were actively dividing instead of undergoing neurogenesis (FIG. 17e). As a result, at weeks 2 and 4, Applicants observed a significant reduction in neuronal MAP2 staining (FIG. 17g and FIG. 27g). In contrast, at weeks 0 and 2, DYRK1A overexpression iNPs showed lower proportions of proliferating cells (FIG. 17f). Since there are fewer iNPs due to lower initial proliferation, Applicants observed significant reductions in neuronal MAP2 staining at weeks 0 and 1 (FIG. 17h). Collectively, the DYRK1A perturbation experiments demonstrate that RFX4-iNPs can be used to model effects of perturbations on neural development and neurogenesis, advancing our understanding of complex neurological disorders.

### Example 9—Genome-Scale TF Screen to Identify Drivers of Astrocyte Differentiation

[0452] Astrocytes are the most abundant cell type in the vertebrate central nervous system. Although previously thought to be passive responders of neuronal damage, growing evidence suggests that astrocytes actively signal to neurons to influence synaptic development, transmission, and plasticity through secreted and contact-dependent signals (Chung W S, et al., 2015). Current protocols to differentiate astrocytes from hESCs are labor-intensive, requiring the production of embryoid bodies, and take several months to produce mature astrocytes (Krencik R, et al., 2011). Identification of TFs that direct astrocyte differentiation can enable better understanding of astrocyte development and contribute to more complete models of the brain amenable to high-throughput studies. Therefore, Applicants can apply the genome-scale TF screens described herein to identify candidates that can differentiate radial glia into astrocytes (FIG. 10). In addition, performing the astrocyte differentiation screen using the radial glia developed in Examples 1 and 2, 3, 4 can validate the radial glia as a robust model for high-throughput screening.

[0453] Using the methods described in Example 2, Applicants have engineered two different HUES66 hESC reporter lines that express the fluorescent protein EGFP upon upregulation of an astrocyte marker gene, either ALDH1L1 or GFAP. For each reporter line, Applicants generated three clonal lines and verified fluorescence upon marker gene upregulation using CRISPR activation. Flow-FISH using astrocyte markers and scRNA-seq may also be used as described.

### Genome-Scale TF Screen for Astrocyte Differentiation

[0454] Applicants can differentiate both the GFAP and ALDH1L1 hESC reporter lines or hESCs into radial glia using dox-inducible overexpression of the top radial glia candidate TF(s) found in Examples 1-9. Once the hESC cells have differentiated into radial glia, Applicants can withdraw dox to turn off overexpression and transduce the cells with the genome-scale TF library. Since neurogenesis precedes gliogenesis in the developing brain, Applicants hypothesize that astrocyte differentiation might require signaling from neurons. Applicants can thus perform the TF screen in the presence of neurons differentiated through NEUROG2 overexpression (Zhang Y, et al., 2013). Astrocyte differentiation might also require more time than radial glia differentiation, so Applicants can perform small-scale screens to determine the optimal time point. After 1, 2, and 4 weeks of differentiation, Applicants can use flow cytometry to quantify the percentage of fluorescent cells. Applicants can then perform the genome-scale screen and, at the time point with the highest percentage of fluorescent cells, Applicants can isolate fluorescent cells indicating upregulation of the marker gene and cells with the lowest 15% of fluorescence as controls. Applicants can deep sequence the TF barcodes in both populations to identify TFs enriched in the fluorescent population.

### Validation of Candidate TFs

[0455] After identifying candidate TFs for astrocyte differentiation, Applicants can evaluate the fidelity of astrocytes differentiated from these candidates using RNA-seq, immunostaining, and functional studies on synapse formation and elimination. Applicants can perform RNA-seq on the differentiated astrocytes at two different time points determined by enrichment of fluorescent cells during the screen. Applicants can compare the RNA-seq results from differentiated astrocytes to those from human astrocytes using methods described in Example 1-2. Applicants can also immunostain the differentiated astrocytes for astrocyte markers SOX9, AQP4, and GFAP. Finally, Applicants can assess the ability of differentiated astrocytes to promote synapse formation and elimination. For synapse formation, Applicants can culture isolated mouse neurons or differentiated human neurons with and without the differentiated astrocytes and quantify the number of synapses in each condition by immunostaining for pre- and post-synaptic markers bassoon and homer1, respectively, and imaging. Applicants can quantify synapse elimination with an in vitro assay used in previous studies where Applicants conjugate a pH-sensitive fluorescent dye (pHrodo) to isolated synaptosomes that fluoresce upon incorporation into lysosomes through phagocytosis (Chung W S, et al., Astrocytes mediate synapse elimination through MEGF10 and MERTK pathways. Nature. 2013; 504(7480):394-400).

### Discussion

[0456] Like radial glia, astrocytes in the human brain are very diverse, and Applicants therefore expect to find multiple TFs that direct differentiation into different subtypes of astrocytes. These TFs can likely regulate cellular pathways that are important for astrocyte function. Like in vivo astrocytes, the differentiated astrocytes can potentially increase synapse formation and phagocytose synaptosomes.

[0457] Since astrocytes arise at a later time point than radial glia during development, Applicants may extend the differentiation time of the pooled screen accordingly. In addition, it is possible that astrocyte differentiation requires exogenous factors beyond those provided by NEUROG2-differentiated neurons. Applicants can screen in the presence of isolated mouse neurons or mouse cortical brain slices to provide additional factors. If astrocyte differentiation requires upregulation of more than one TF, Applicants can transduce the TF library at high MOI. Applicants can also combine TF upregulation with downregulation by generating a TF CRISPR knockdown library and transducing cells with both the cDNA and CRISPR knockdown libraries.

### Example 10—Discussion

[0458] In summary, Applicants have developed a systematic method to identify TFs for iNP differentiation that could be applied to any cell type of interest. Applicants showed that Applicants could start with NP RNA-seq data to select TFs and marker genes for unbiased pooled screening. Applicants demonstrated feasibility of using reporter cell line, flow-FISH, or scRNA-seq methods to select candidate TFs. Applicants found four novel TFs that could individually differentiate hESCs and iPSCs into iNPs that resemble the morphology, transcriptome signature, and functionality of human fetal radial glia. Out of the four candidate TFs, RFX4-derived iNPs spontaneously differentiated into the highest proportion of CNS cell types, although relative to the other candidates RFX4 has not been extensively studied in CNS development^{38,39}. The findings thus highlight the importance of performing unbiased TF screens. By knocking out and overexpressing DYRK1A in iNPs to model neurodevelopmental disorders, Applicants demonstrated the potential of iNPs to advance our understanding of complex processes in development and disease.

[0459] The screening approach could be extended to generate other cell types that may require more than one TF. To identify combinations of TFs, Applicants could screen TFs at a higher MOI to increase the probability of introducing more than one TF in the same cell. Iterative TF screens, for instance performing TF screens in iNPs for differentiation into neurons or glia, may more closely mimic the natural developmental trajectory and facilitate generation of mature cell types. Other factors, such as mechanical stress or signaling from other cell types that are naturally present during development, may also be necessary in TF screens for some cell types.

[0460] Beyond cellular programming, TF screening enables identification of factors involved in cellular reprogramming and trans-differentiation, as well as cancer progression and senescence. The demonstration that barcoding of ORFs allows for a variety of screening selection methods could also apply to pooled ORF screening of other protein families of interest. Future application of this TF screening platform for cellular engineering has the potential to expand the number of available cellular models that will help elucidate complex regulatory mechanisms behind development and disease.

### Example 11—TF Screen to Identify Drivers of Cardiomyocyte Differentiation

[0461] Using the described screens, Applicants have identified that the transcription factor EOMES generates cardiomyocytes. Overexpression of EOMES for 2 days differentiates stem cells into beating cardiomyocytes by 8 days. This differentiation method produces much higher percentages of cardiomyocytes (˜75% vs ˜30%) than the published mouse method (see, e.g., Van den Ameele J, Tiberi L, Bondue A, et al. Eomesodermin induces Mesp1 expression and cardiac differentiation from embryonic stem cells in the absence of Activin. EMBO Reports. 2012; 13(4):355-362. doi:10.1038/embor.2012.23; and WO2013010965A1). The present invention has demonstrates using human EOMES for differentiating human stem cells. For the cardiomyocytes, Applicants have observed the cells beating after 2 weeks of differentiation and have made a video recording. Applicants have also further identified MESP1 and ESR1 as candidates that drive cardiomyocyte differentiation. In certain embodiments, the cardiomyocytes generated according to the present invention may be used for transplant into patients suffering from heart disease. The present methods also allow for generating cardiomyocytes in a method requiring the expression of a single transcription factor as opposed to previous methods requiring fibroblasts to be differentiated into cardiomyocytes by expressing three transcription factors. In certain embodiments, the cardiomyocytes of the present invention may be used for screening drugs. For example, drugs that are toxic to cardiomyocytes can be screened.

[0462] Conditions for generating cardiomyocytes according to the present invention include the following. Culturing ES cells in RPMI+1X B27(without insulin)+50 ug/ml ascorbic acid; switch to RPMI+1×B27 at day 7. The seeding density is high (about 500,000 cells/mL). Dox (about 500 ng/ml) is added to induce expression of the transcription factor (e.g., EOMES) between or at days 0-2. This method results in about 75% of the cells expressing the cardiomyocyte marker TNNT2.

[0463] FIG. 11 shows an experiment differentiating cardiomyocytes with different concentrations of Dox to express two different EOMES isoforms. Applicants measured the percentage of cells expressing TNNT2 (Troponin T, cardiomyocyte marker) by fixing cells, staining with TNNT2 antibodies, and quantifying using flow cytometry at 10 days after the start of dox induction. As used herein, 263 refers to EOMES isoform NM_005442 (SEQ ID NO: 10807) and 312 refers to EOMES isoform NM_001278182 (SEQ ID NO: 10808). As used herein, d2, d4, and d6 refers to 2 days, 4 days, and 6 days of dox induction respectively. As used herein, and refer to cell seeding density at 300,000 cells/mL and 500,000 cells/mL. In conclusion, FIG. 11 shows that 2 days of dox induction at 500,000 cells/mL are required for high efficiency differentiation of cardiomyocytes for the 263 and 312 isoforms.

(SEQ ID NO: 10807
MQLGEQLLVSSVNLPGAHFYPLESARGGSGGSAGHLPSAAPSPQK
LDLDKASKKFSGSLSCEAVSGEPAAASAGAPAAMLSDTDAGDAFA
SAAAVAKPGPPDGRKGSPCGEEELPSAAAAAAAAAAAAAATARYS
MDSLSSERYYLQSPGPQGSELAAPCSLFPYQAAAGAPHGPVYPAP
NGARYPYGSMLPPGGFPAAVCPPGRAQFGPGAGAGSGAGGSSGGG
GGPGTYQYSQGAPLYGPYPGAAAAGSCGGLGGLGVPGSGFRAHVY
LCNRPLWLKFHRHQTEMIITKQGRRMFPFLSFNINGLNPTAHYNV
FVEVVLADPNHWRFQGGKWVTCGKADNNMQGNKMYVHPESPNTGS
HWMRQEISFGKLKLTNNKGANNNNTQMIVLQSLHKYQPRLHIVEV
TEDGVEDLNEPSKTQTFTFSETQFIAVTAYQNTDITQLKIDHNPF
AKGFRDNYDSSHQIVPGGRYGVQSFFPEPFVNTLPQARYYNGERT
VPQTNGLLSPQQSEEVANPPQRWLVTPVQQPGTNKLDISSYESEY
TSSTLLPYGIKSLPLQTSHALGYYPDPTFPAMAGWGGRGSYORKM
AAGLPWTSRTSPTVFSEDQLSKEKVKEEIGSSWIETPPSIKSLDS
NDSGVYTSACKRRRLSPSNSSNENSPSIKCEDINAEEYSKDTSKG
MGGYYAFYTTP
(SEQ ID NO: 10808)
MQLGEQLLVSSVNLPGAHFYPLESARGGSGGSAGHLPSAAPSPQK
LDLDKASKKFSGSLSCEAVSGEPAAASAGAPAAMLSDTDAGDAFA
SAAAVAKPGPPDGRKGSPCGEEELPSAAAAAAAAAAAAAATARYS
MDSLSSERYYLQSPGPQGSELAAPCSLFPYQAAAGAPHGPVYPAP
NGARYPYGSMLPPGGFPAAVCPPGRAQFGPGAGAGSGAGGSSGGG
GGPGTYQYSQGAPLYGPYPGAAAAGSCGGLGGLGVPGSGFRAHVY
LCNRPLWLKFHRHQTEMIITKQGRRMFPFLSFNINGLNPTAHYNV
FVEVVLADPNHWRFQGGKWVTCGKADNNMQGNKMYVHPESPNTGS
HWMRQEISFGKLKLTNNKGANNNNTQMIVLQSLHKYQPRLHIVEV
TEDGVEDLNEPSKTQTFTFSETQFIAVTAYQNTDITQLKIDHNPF
AKGFRDNYDSMYTASENDRLTPSPTDSPRSHQIVPGGRYGVQSFF
PEPFVNTLPQARYYNGERTVPQTNGLLSPQQSEEVANPPQRWLVT
PVQQPGTNKLDISSYESEYTSSTLLPYGIKSLPLQTSHALGYYPD
PTFPAMAGWGGRGSYQRKMAAGLPWTSRTSPTVFSEDQLSKEKVK
EEIGSSWIETPPSIKSLDSNDSGVYTSACKRRRLSPSNSSNENSP
SIKCEDINAEEYSKDTSKGMGGYYAFYTTP

[0464] FIG. 12 shows an experiment comparing the differentiating cardiomyocytes by the methods according to the present invention and differentiation by using a small molecule method. Applicants measured the percentage of cells expressing TNNT2 by fixing cells, antibody staining, and quantifying using flow cytometry at 10 days after the start of dox induction. TF refers to adding dox and over expressing the transcription factor EOMES for 2 days. SM refers to an optimized version of a published small molecule differentiation method (Lian et al., Directed cardiomyocyte differentiation from human pluripotent stem cells by modulating Wnt/β-catenin signaling under fully defined conditions, Nature Protocols volume 8, pages 162-175 (2013) doi:10.1038/nprot.2012.150). Applicants determined that the method according to the present invention using the 263 TF conditions is comparable to 263 SM method. Further studies also show differentiation of human pluripotent stem cells (hPSCs) to cardiomyocytes using small molecules (see, e.g., Karakikes, et al., Small molecule-mediated directed differentiation of human embryonic stem cells toward ventricular cardiomyocytes, Stem Cells Transl Med. (2014); Sharma, et al., Derivation of highly purified cardiomyocytes from human induced pluripotent stem cells using small molecule-modulated differentiation and subsequent glucose starvation, J Vis Exp. (2015); and Burridge, et al., Chemically Defined Culture and Cardiomyocyte Differentiation of Human Pluripotent Stem Cells. Curr Protoc Hum Genet. (2015)).

### Example 12—A Multiplexed Transcription Factor Screening Platform for Directed Differentiation

[0465] Directed differentiation of human pluripotent stem cells into diverse cell types has the potential to realize a broad array of cellular replacement therapies and provides a tractable model that can be perturbed, genetically or chemically, to assess effects in a cell type-specific context (Cohen and Melton, 2011; Colman and Dreesen, 2009; Keller, 2005; Kiskinis and Eggan, 2010; Robinton and Daley, 2012). However, it remains challenging or impossible to generate many cell types (Cohen and Melton, 2011; Colman and Dreesen, 2009; Keller, 2005; Kiskinis and Eggan, 2010; Robinton and Daley, 2012). The best differentiation methods are often labor-intensive and can require months to produce even heterogenous or immature cell populations. Many of these methods rely on exogenous growth factors or small molecules, which are often dosage-sensitive and difficult to identify in a scalable manner. Alternatively, overexpression of transcription factors (TFs) has been shown to rapidly and efficiently generate many different cell types, including neurons and skeletal muscle cells (Furuyama et al., 2019; Pang et al., 2011; Song et al., 2012; Sugimura et al., 2017; Takahashi and Yamanaka, 2006; Weintraub et al., 1989; Zhang et al., 2013). As TFs use endogenous regulatory pathways to drive differentiation, mimicking natural development, this approach to engineering cell fate may produce higher fidelity models while illuminating aspects of development. However, the process of discovering TFs for directed differentiation relies on time-intensive and low-throughput arrayed screens. Arrayed screens, in which each perturbation must be performed and tested individually, are challenging to carry out at large scale, typically limited to 5-25 TFs (Furuyama et al., 2019; Pang et al., 2011; Song et al., 2012; Sugimura et al., 2017; Takahashi and Yamanaka, 2006; Weintraub et al., 1989; Zhang et al., 2013). By contrast, pooled screening approaches, which make use of barcodes to enable multiple perturbations to be tested in parallel, are more scalable, both in terms of time and cost.

[0466] To unlock the potential of this promising approach, Applicants sought to develop a multiplexed TF screening platform to identify TFs that can drive specific cell fates in a high-throughput manner. Applicants explored two requirements for pooled screening to identify TFs that drive differentiation. First, perturbations can be introduced into cells via a single copy to drive sufficient TF expression to induce cellular programing. Second, target cell types can be enriched from a diverse cell population, and the TF perturbations that produce the target cell types can be identified.

[0467] Applicants first compared different TF overexpression methods and found that ORF overexpression most effectively differentiated human embryonic stem cells (hESCs) into neurons. To establish a generalizable platform for systematic identification of TFs for cellular programming, Applicants created a barcoded human TF library, which Applicants named Multiplexed Overexpression of Regulatory Factors (MORF). The MORF library consists of all known TFs from the human genome, with 3,548 isoforms covering 1,836 genes, and used this library to assay 90 TF isoforms for differentiation of hESCs into neural progenitors (NPs). Applicants chose NPs as the target cell type because induced NPs (iNPs) offer a tractable model for studying complex disorders of the central nervous system (CNS), but current methods for producing iNPs, namely embryoid body formation (Schafer et al., 2019; Zhang et al., 2001) or dual SMAD inhibition (Chambers et al., 2009; Shi et al., 2012a), are low-throughput or produce variable differentiation results depending on the cell line (Hu et al., 2010), respectively. Applicants selected for TFs that drive iNP differentiation using various methods to enrich for target cell types based on marker gene combinations. The pooled screens identified four TFs (RFX4, NFIB, PAX6, and ASCL1), each of which produced multipotent iNPs that could spontaneously differentiate into CNS cell types. Addition of dual SMAD inhibitors to RFX4-overexpressing cells produced homogenous iNPs that preferentially differentiated into GABAergic neurons. RFX4-iNPs can be used to model neurodevelopmental disorders. Using iNPs as a demonstration, Applicants show that pooled TF screening is a scalable and generalizable approach for systematically identifying TFs that drive differentiation of desired cell types.

### Example 13—TF ORF Overexpression Effectively Drives Differentiation

[0468] Recently, the microbial CRISPR-Cas9 system has been adapted for large-scale gene activation screening, which provides a rapid and efficient method for elucidating complex biology at the genome scale (Gilbert et al., 2014; Konermann et al., 2015). Applicants therefore first sought to leverage the ease and scalability of CRISPR activation (CRISPRa) to screen 1,965 annotated TF genes (Zhang et al., 2012) for their ability to drive differentiation of HUES66 hESCs toward NP cell fates. However, the initial screen did not lead to significant differentiation (data not shown), in contrast to previous observations in mouse embryonic stem cells (Liu et al., 2018).

[0469] Although CRISPRa has been used in a range of biological contexts (Gilbert et al., 2014; Joung et al., 2017a; Konermann et al., 2015), the particular regulatory environment of hESCs may be uniquely buffered against TF overexpression. Therefore, Applicants next compared the ability of CRISPRa and ORF-based methods to overexpress NEUROD1 or NEUROG2, two TFs that have been previously shown to induce neuronal differentiation (Zhang et al., 2013), at single copy in HUES66 hESCs (FIG. 35A). In order to pinpoint whether expression level or endogenous UTRs were responsible for limiting TF expression, Applicants included ORFs with endogenous UTRs in the comparison with CRISPRa. For both NEUROD1 and NEUROG2, Applicants found that expression of the TF ORF effectively induced neuronal differentiation (FIGS. 35B-F). Surprisingly, Applicants found that overexpression of the TFs using the ORF with endogenous UTRs did not efficiently differentiate hESCs into neurons, despite robust transcriptional upregulation. As Applicants had observed for the large-scale screen, CRISPRa upregulation of NEUROD1 and NEUROG2 did not effectively induce differentiation. These results suggest that there may be endogenous post-transcriptional regulatory mechanisms in hESCs that buffer against TF protein expression (FIGS. 35B-F). Applicants therefore proceeded with TF ORF overexpression for screening.

### Example 14—a Barcoded Human TF Library for Directed Differentiation

[0470] To enable high-throughput, systematic identification of TFs for directed differentiation of any desired cell type, Applicants created a barcoded human TF library, MORF (FIG. 28 and Table 3). The library consists of 1,836 genes, including histone modifiers, and covers 3,548 isoforms that overlap between the RefSeq and GENCODE annotations. Applicants also included two control vectors in the library. All vectors in the library contain unique barcodes that facilitate pooled screening. MORF is provided in an arrayed format that can be readily subpooled for targeted TF screens, followed by characterization of individual candidate TFs. MORF enables a generalizable approach for TF screening that will expand the ability to generate desired cell types.

### Example 15—Development of a Pooled TF ORF Screening Platform for iNP Differentiation

[0471] As a demonstration, Applicants performed a targeted TF screen for differentiation of hESCs into iNPs. To select a subset of TFs for the screen, Applicants examined eight RNA-sequencing (RNA-seq) datasets (Camp et al., 2015; Johnson et al., 2015; Llorens-Bobadilla et al., 2015; Pollen et al., 2015; Shin et al., 2015; Thomsen et al., 2016; Wu et al., 2010; Zhang et al., 2016) and identified 70 TFs that were found to be specifically expressed in NPs in at least two datasets. For each TF, Applicants included isoforms that comprised >25% of the expressed transcript in NPs, resulting in a total of 90 TF isoforms (see Methods; Table 1). Applicants pooled the barcoded TFs and packaged them into a lentiviral library for delivery in hESCs (FIG. 29A). Applicants differentiated the cells for 7 days before selecting TFs that drive iNP differentiation (FIG. 36A). To determine the ideal strategy for selecting TFs, Applicants explored three different methods that can simultaneously assay different numbers of marker genes: reporter cell line (1 gene), flow-FISH (2-10 genes), and single-cell RNA-sequencing (scRNA-seq; 10-2,000 genes; FIG. 29A).

[0472] For the reporter cell line method, Applicants generated clonal reporter cell lines with EGFP inserted downstream of an endogenous NP marker gene, either SLC1A3 or VIM, which were selected based on convergence across published RNA-seq datasets and high expression levels (Camp et al., 2015; Johnson et al., 2015; Llorens-Bobadilla et al., 2015; Pollen et al., 2015; Shin et al., 2015; Thomsen et al., 2016; Wu et al., 2010; Zhang et al., 2016). Applicants transduced the SLC1A3 or VIM reporter cell line with the pooled TF library, differentiated the cells for 7 days, and sorted for high and low EGFP-expressing cells (FIGS. 29A and 36B). Deep sequencing of the TF barcodes in each population identified candidate TFs that were enriched in the high EGFP-expressing cell population, indicating upregulation of SLC1A3 or VIM (FIGS. 29B and 36C; Table 1).

[0473] For the flow-FISH method, Applicants transduced hESCs with the pooled TF library, differentiated the cells for 7 days, and labeled either 2 or 10 NP marker gene transcripts using pooled FISH probes (FIG. 29A). By pooling the FISH probes, Applicants could sort for cells expressing high or low levels of 2-10 marker genes at the same time (FIGS. 36D and 36E). Similar to the reporter cell line method, Applicants deep sequenced the TF barcodes and identified candidate TFs that were enriched in cells expressing higher levels of marker genes (FIGS. 29C and 36F; Table 1). Applicants found that for some TFs, such as EOMES and RFX4, the choice of TF isoform can produce very different differentiation results (FIGS. 29C and 36F). Both the flow-FISH and reporter cell line methods to assay SLC1A3 and VIM expression produced comparable TF enrichment profiles (FIG. 36G).

[0474] For the scRNA-seq method, Applicants transduced hESCs with the pooled TF library, differentiated the cells for 7 days, and performed scRNA-seq to profile 53,560 single cells (FIG. 29A). In the barcoded TF ORF vector design, the TF barcode is expressed in the TF mRNA, which is captured by scRNA-seq and can be mapped to cell barcodes (FIG. 28). After assigning TFs to cells, Applicants found that the number of cells that had each TF overexpressed was very skewed, with the top 10% of the TFs having 92 times more cells than the bottom 10% of TFs, potentially due to TF-dependent effects on cell death and proliferation (FIG. 36H). Cluster analysis of the scRNA-seq results suggested that overexpression of several TFs, for instance ASCL1 and EOMES, generated distinct transcriptome signatures that clustered together and were more distant to those of other TFs, while overexpression of most TFs did not produce distinct transcriptome signatures (FIGS. 29D, 361, and 36J). By comparing the TF transcriptome signatures with those published for radial glia (Nowakowski et al., 2017; Pollen et al., 2015; Quadrato et al., 2017), which represent NPs in the developing cortex, Applicants identified candidate TFs with the highest transcriptome signature correlation (FIG. 29E and Table 1). Applicants also compared TF transcriptome signatures to other cell types from the mouse organogenesis cell atlas (Cao et al., 2019) to nominate TFs for additional cell types, such as FOXN4 for early mesenchyme or SOX9 for Schwann cell precursors (FIG. 36K).

[0475] To verify the results from the pooled screen, Applicants performed an arrayed screen on the same 90 TF isoforms, packaging each TF individually into lentivirus for delivery into hESCs (FIG. 37A-C). The arrayed and pooled screens nominated overlapping sets of candidate TFs for iNP differentiation (FIG. 29F and Table 1), some of which (NFIB (Steele-Perkins et al., 2005), OTX1 (Frantz et al., 1994), PAX6 (Englund et al., 2005; Gotz et al., 1998), EOMES (Bulfone et al., 1999; Englund et al., 2005), and ASCL1 (Casarosa et al., 1999)) are known to be involved in neural development, further supporting the screening results. Out of the pooled screening methods, flow-FISH identified the highest number (6 out of 8) of candidate TFs that overlapped with other screens (FIG. 29F). Compared to using reporter cell lines, flow-FISH is more versatile, because the marker gene combinations can be easily exchanged or combined without generating another clonal reporter cell line. Flow-FISH is also more accessible than scRNA-seq and can measure a greater dynamic range of transcript expression. Together, these results suggest that flow-FISH may be an ideal screening method for other cell types.

### Example 16—Validation of Candidate TFs for iNP Differentiation

[0476] For downstream analysis, Applicants chose to focus on the eight candidate TFs from the flow-FISH screen as well as two additional candidates that were enriched in the other screens and previously suggested to mediate iNP differentiation, ASCL1 (Casarosa et al., 1999) and PAX6 (Zhang et al., 2010) (FIG. 29F). Applicants individually overexpressed the top isoform of each TF in hESCs and verified TF expression (FIG. 37D). Immunostaining the iNPs for NP markers showed that, compared to hESCs, all iNPs expressed higher levels of VIM, a marker used to select target cells in the pooled screen, and exhibited diverse morphologies (FIGS. 30 and 37E). Five candidate TFs (OTX1, EOMES, RFX4, PAX6, and ASCL1) produced iNPs that appear morphologically distinct from hESCs overexpressing GFP control, two candidate TFs (HES1 and LHX2) produced iNPs with similar morphologies to hESCs, and three candidate TFs (NFIC, FOS, and NFIB) produced iNPs with morphologies that were in between the two groups. Applicants then compared bulk RNA-seq signatures of iNPs to different cell types in the human fetal cortex and in brain organoids (Nowakowski et al., 2017; Pollen et al., 2015; Quadrato et al., 2017). Applicants found that transcriptome signatures of iNPs derived using RFX4, ASCL1, and PAX6 were the most similar to NPs, whereas those produced by EOMES and FOS were the most different (FIGS. 30 and 37E; Table 7). Thus, Applicants have validated the pooled screening approach by confirming that overexpression of all candidate TFs upregulated marker genes that are used to enrich for NPs.

### Example 17—Functional Evaluation of iNP Multipotency Using Spontaneous Differentiation

[0477] Next, Applicants evaluated the multipotency of iNPs produced by each candidate TF by spontaneously differentiating the iNPs. Applicants transiently overexpressed candidate TFs for 1 week to produce iNPs and then removed growth factors from the media to allow the iNPs to spontaneously differentiate for 8 weeks (FIG. 31A). Like NPs, iNPs should spontaneously differentiate into cell types in the CNS such as neurons and astrocytes. Out of the ten candidate TFs, four (RFX4, NFIB, PAX6, and ASCL1) produced iNPs that spontaneously differentiated into neurons, astrocytes, and, more rarely, oligodendrocyte precursor cells (FIGS. 31B and 38A). Spontaneous differentiation of iNPs generated by these four TFs followed the natural developmental progression of neurogenesis starting at week 1 and proceeding to gliogenesis at week 4 (FIGS. 31B and 38A). RFX4-iNPs patterned into neural rosettes prior to neurogenesis (FIGS. 31B and 38A).

[0478] Applicants validated these four TFs in two additional pluripotent stem cell lines, iPSC11a and H1. For both cell lines, overexpression of the four TFs produced iNPs that expressed higher levels of NP marker genes relative to GFP control (FIGS. 38B and 38C). Following spontaneous differentiation, Applicants found that RFX4 and NFIB consistently produced functional iNPs in iPSC11a (FIG. 38D), and RFX4 produced functional iNPs in H1 (FIG. 38E). These results indicate that the effects of some TFs are cell line-dependent, while others, like RFX4, are cell line-independent, which may point to a more critical role in NP specification during development.

[0479] Applicants further characterized the cells spontaneously differentiated from iNPs produced by these four TFs using scRNA-seq. Cluster analysis of 53,113 cells revealed that the iNPs generated a broad range of cell types, such as cell types from the retina, CNS, epithelium, and neural crest (FIGS. 32A-C and Table 6). For the CNS, iNPs spontaneously produced different regionally-restricted progenitors, such as radial glia and dorsal neural progenitors, as well as neurons, astrocytes, and ependyma (FIGS. 32B and 32C). Applicants found that the spontaneously differentiated cell types were generally consistent between biological replicates of the same TF, except for those from RFX4-iNPs, and distinct between TFs (FIGS. 32D-F). RFX4-iNPs produced more CNS cell types; NFIB-iNPs produced more epithelium and neural crest cell types; PAX6-iNPs generated diverse cell types; and ASCL1-iNPs produced more retina cell types (FIGS. 32D-F). Further analysis of CNS neurons spontaneously differentiated from iNPs showed that the neurons expressed marker genes representative of diverse brain regions as well as neurotransmitters and included newborn cortical excitatory neurons and cortical projection neurons (FIGS. 39A-D). RFX4-iNPs generated diverse neurons, NFIB-iNPs produced more cortical projection and excitatory neurons, PAX6-iNPs produced more forebrain neurons, and ASCL1-iNPs generated more forebrain GABAergic neurons (FIG. 39E). Together, the spontaneous differentiation results show that four of the candidate TFs produce functional iNPs.

[0480] To better understand the transcriptional networks that lead to iNP production, Applicants profiled the four TFs using chromatin immunoprecipitation with sequencing (ChIP-seq). Motif analysis generated distinct motifs for each TF and suggested potential transcriptional coregulators, some of which have been found in previous studies (FIG. 39F) (Morotomi-Yano et al., 2002; Murre et al., 1989). Applicants identified candidate genes that could contribute to the potential mechanisms behind directed iNP differentiation by examining NP marker genes with TF ChIP-seq peaks that were also differentially expressed upon TF overexpression (FIGS. 39G-I and Table 8). In addition, Applicants found that each of the four TFs had ChIP-seq peaks that were proximal to its own promoter, indicating a positive feedback mechanism that contributes to the high expression levels required for driving differentiation (FIGS. 39H and 39I).

### Example 18—Combining RFX4 with Dual SMAD Inhibition Produces Homogenous iNPs

[0481] Next, Applicants sought to improve the consistency of RFX4-iNPs. Although RFX4-iNPs produced the highest proportion of CNS cell types, the iNPs were less consistent between biological replicates (FIGS. 32D-F). Applicants overexpressed RFX4 in H1 hESCs and tested transition from stem cell media to two alternative NP media used in the embryoid body (EB) (Schafer et al., 2019) and dual SMAD inhibition (DS) (Shi et al., 2012a) NP differentiation methods (FIG. 40A). Applicants also tested addition of dual SMAD inhibitors and two different NP induction times, 5 and 7 days (FIG. 40A). By spontaneously differentiating the iNPs and measuring expression of the neuronal marker genes TUBB3 and MAP2 as a heuristic for the proportion of iNPs that underwent neurogenesis, Applicants could identify conditions that promoted differentiation of CNS iNPs and increased homogeneity of the iNP population. Applicants found that combining RFX4 overexpression with dual SMAD inhibitors in the initial NP media for 7 days produced the most homogenous iNPs (FIGS. 40A-D).

[0482] Applicants then compared iNPs generated by the optimized protocol, RFX4-DS, to those from two alternative NP differentiation methods that rely on EB (Schafer et al., 2019) and DS (Shi et al., 2012a). Applicants derived iNPs using the three differentiation methods in two batch replicates and performed scRNA-seq on 42,780 iNPs (15,211 RFX4-DS-iNPs, 11,148 EB-iNPs, and 16,421 DS-iNPs). Cluster analysis showed that, as expected, the majority of the cells were NPs (FIGS. 33A and 33B; Table 6). Applicants also observed immature neurons that have spontaneously differentiated from iNPs and cranial neural crest cells that were off-target products of NP differentiation (FIGS. 33A and 33B). Using distances between cells from the same batch replicate and cells from different batch replicates as metrics for intra- and inter-batch variability respectively, Applicants found that RFX4-DS-iNPs had lower intra- and inter-batch distances compared to EB- and DS-iNPs (FIGS. 33C and 33D). In addition, batch replicates of RFX4-DS-iNPs had more consistent percentages of cells that were grouped into each cluster than those of EB- and DS-iNPs, suggesting that the RFX4-DS protocol produces more consistent iNPs than alternative protocols (FIGS. 33E and 33F). All three protocols generated iNPs that expressed telencephalon markers such as SIX3 and LHX2, although RFX4-DS-iNPs did not express FOXG1, suggesting that there may be potential differences between RFX4-DS-iNPs and iNPs generated by existing methods that could contribute to differences in downstream cell types derived from iNPs (FIG. 40E). Applicants confirmed this observation by immunostaining iNPs for FOXG1 (FIG. 40F). Further analysis of genes that were differentially expressed between iNP differentiation methods showed that RFX4-DS-iNPs expressed higher levels of CRABP1, NR2F2, and CDH6, whereas EB- and DS-iNPs expressed EMX2, PAX6, and CNTNAP2 (FIG. 33G). These results indicate that RFX4-DS-iNPs may resemble NPs of the deep layer neocortex, rather than of the ventricular zone (Cadwell et al., 2019; Matsunaga et al., 2015).

[0483] To characterize the cells spontaneously differentiated from RFX4-DS-iNPs, Applicants performed scRNA-seq on 26,111 cells at 4 and 8 weeks of spontaneous differentiation. Cluster analysis showed that RFX4-DS-iNPs differentiated into predominantly CNS cell types, radial glia, and neurons, with a small subset differentiating into meningeal cells (FIGS. 33H-J and Table 6). At each differentiation time point, the spontaneously differentiated cell types were remarkably consistent between biological replicates (FIGS. 33K and 33L). RFX4-DS-iNPs produced 98% CNS cell types at 4 weeks and 94% at 8 weeks (FIG. 33M), suggesting that initially >98% of iNPs were capable of spontaneously differentiating into CNS cell types because differentiated neurons do not divide, unlike meningeal cells. Similar to RFX4-DS-iNPs, most of the radial glia differentiated from RFX4-DS-iNPs expressed telencephalon marker genes SIX3 and LHX2, but not FOXG1 (FIG. 40G). By contrast, differentiated neurons expressed all three marker genes (FIG. 40G). The radial glia were diverse, with some expressing markers indicative of more restricted precursors for astrocytes (CD44) and ependymal cells (FOXJ1; FIG. 40H). RFX4-DS-iNPs produced predominantly GABAergic neurons (GAD2 and SLC32A1) that expressed markers indicative of different GABAergic interneuron subtypes, such as SST, CALB1, CALB2, and PVALB (FIGS. 401 and 40J). The propensity for RFX4-DS-iNPs to spontaneously differentiate into GABAergic neurons, rather than glutamatergic neurons as previously shown for iNPs produced by alternative methods (Schafer et al., 2019; Shi et al., 2012b), may stem from initial differences observed between the iNPs (FIGS. 33G, 40E, and 40F). Specifically, RFX4-DS-iNPs expressed higher levels of NR2F2, a marker gene for cortical GABAergic interneurons originating from the ganglionic eminence and neocortex in the human fetal forebrain (Reinchisi et al., 2012). RFX4 ChIP-seq and bulk RNA-seq data further suggests that RFX4 directly regulates NR2F2, as RFX4 had a ChIP-seq peak within 5 kb of all four annotated transcriptional start sites of NR2F2 isoforms and RFX overexpression robustly upregulated expression of NR2F2 (Tables 7 and 8). Overall, the results suggest that RFX4 overexpression can be combined with dual SMAD inhibition to produce homogenous iNPs that spontaneously differentiate into GABAergic neurons.

### Example 19—RFX4-iNPs Accurately Model Effects of DYRK1A Perturbations on Neural Development

[0484] To explore the utility of the differentiation protocol Applicants developed, Applicants transiently overexpressed RFX4 to differentiate iPSC11a into iNPs to study the effects of DYRK1A perturbation on NPs during neural development (FIGS. 34A and 41A-D). DYRK1A knockout has been implicated in autism spectrum disorder (De Rubeis et al., 2014; Iossifov et al., 2014), whereas overexpression of DYRK1A has been linked to Down syndrome (Smith et al., 1997). Applicants characterized iNPs using bulk RNA-seq and identified 42 genes that were significantly differentially expressed in a DYRK1A dosage-dependent manner, some of which are known to be involved in cellular proliferation, neuronal migration, and synapse formation (FIGS. 34B-F; Table 7). Applicants spontaneously differentiated the RFX4-derived iNPs to profile the effects of DYRK1A perturbation on neurogenesis and neural development. DYRK1A knockout iNPs initially showed reduced proliferation, potentially due to toxicity of DNA double-strand breaks introduced by Cas9, but at weeks 2 and 4 of spontaneous differentiation, DYRK1A knockout iNPs showed significantly increased proportions of proliferating cells, indicating that more iNPs were actively dividing instead of undergoing neurogenesis (FIG. 34G). By contrast, DYRK1A overexpressing iNPs showed lower proportions of proliferating cells at weeks 0 and 2 (FIG. 34H). As increased iNP proliferation deters neurogenesis, Applicants immunostained spontaneously differentiating iNPs for expression of the neuronal marker MAP2. For the DYRK1A knockout iNPs, Applicants observed a significant reduction in neuronal MAP2 staining at weeks 2 and 4 (FIGS. 341 and 41E). For the DYRK1A overexpression iNPs, as there were fewer iNPs due to lower initial proliferation, Applicants observed significant reductions in neuronal MAP2 staining at weeks 0 and 1 (FIG. 34J).

[0485] Applicants further characterized neurons spontaneously differentiated from DYRK1A-perturbed iNPs using electrophysiology. Whole-cell patch-clamp recording of neurons after 12-14 weeks of spontaneous differentiation confirmed that neurons derived from unperturbed iNPs were electrophysiologically functional (FIGS. 41F and 41G). Both DYRK1A knockout and overexpression iNPs exhibited reduced proportions of neurons with properties indicative of maturation, such as presence of evoked action potentials and spontaneous excitatory postsynaptic activity (FIGS. 41F and 41G). In addition, neurons produced by DYRK1A knockout iNPs had higher resting membrane potential and membrane resistance (FIG. 41H). Applicants did not observe any significant differences in action potential properties (FIG. 41I). Together, these electrophysiology results suggest that neurons spontaneously differentiated from DYRK1A knockout and overexpression iNPs are less mature. The DYRK1A perturbation results are consistent with previous studies in other model systems (Fotaki et al., 2002; Hammerle et al., 2011; Park et al., 2010; Soppa et al., 2014; Yabut et al., 2010) and provide additional insight for how different DYRK1A expression levels can affect neural development. Thus, RFX4-iNPs can be used to model effects of perturbations on neural development and neurogenesis and may serve as a tractable system for studying complex neurological disorders.

### Example 20—Discussion

[0486] By screening TF ORFs, Applicants were able to identify four TFs that could individually differentiate hESCs and induced pluripotent stem cells into iNPs that resemble the morphology, transcriptome signature, and multipotency of NPs. Of the four candidate TFs, overexpression of RFX4, which has not been extensively studied in CNS development, resulted in the highest proportion of CNS cell types, highlighting the importance of performing large-scale, unbiased TF screens (Ashique et al., 2009; Blackshear et al., 2003). Combining RFX4 overexpression with dual SMAD inhibition produced homogenous iNPs that spontaneously differentiated into predominantly GABAergic neurons. Notably, the differentiation method produced iNPs within 7 days, compared to 11-16 days for existing differentiation methods, and is more scalable than the embryoid body method (Chambers et al., 2009; Schafer et al., 2019; Shi et al., 2012a; Zhang et al., 2001). By perturbing DYRK1A in iNPs to model neurodevelopmental disorders, Applicants found that DYRK1A modulates iNP proliferation to disrupt neurogenesis, confirming results from previous studies in other model systems (Fotaki et al., 2002; Hammerle et al., 2011; Park et al., 2010; Soppa et al., 2014; Yabut et al., 2010) and suggesting candidate genes that mediate the effect of DYRK1A on neural development.

[0487] Although Applicants focused here on 90 TF isoforms highly expressed in the target cell type (˜23% of TFs expressed in NPs and ˜2.5% of all TF isoforms), the accessibility and low-cost nature of the multiplexed screening approach lends itself to scalable extensions of the technology to additional cell types of interest. For some of these cell types, Applicants have recommended lists of marker genes and TFs based on published RNA-seq datasets (Table 9). Applicants have also provided code for aggregating gene lists from different datasets and selecting marker genes and a subset of TFs from the TF library for targeted screening (see Methods). Moreover, the approach may be applied to identify combinations of TFs by screening at a higher MOI to increase the probability of introducing more than one TF in the same cell. Iterative TF screens may also expand the landscape of cell types it is possible to generate with this platform. For instance, performing TF screens in iNPs for differentiation into neurons or glia may facilitate generation of mature cell types as iterative overexpression of TFs may mimic the natural developmental trajectory.

[0488] Beyond directed differentiation, TF screening enables identification of factors involved in cellular reprogramming (Takahashi and Yamanaka, 2006) and trans-differentiation (Pang et al., 2011; Song et al., 2012), as well as cancer progression (Darnell, 2002) and senescence (Campisi, 2001). The ORF barcoding approach allows for a variety of screening selection methods and could also be extended to pooled ORF screening of other protein families of interest. Future application of the multiplexed TF screening platform for cellular engineering has the potential to expand the number of available cellular models that will help elucidate complex regulatory mechanisms behind development and disease.

### Example 21—Methods for Examples 1-21

[0489] Sequences and cloning. The plasmids lentiMPHv2 (Addgene 89308) and lentiSAMv2 (Addgene 75112) were used for CRISPR activation. LentiCRISPRv2 (Addgene 52961) was used for CRISPR-Cas9 mediated homology-directed repair (HDR). The Puromycin resistance gene in lentiCRISPRv2 was replaced with Blasticidin resistance gene (Addgene 75112) for CRISPR-Cas9 knockout of DYRK1A. Single guide RNA (sgRNA) spacer sequences used in this study are listed in Table 10, and cloned into the respective vectors as previously described (Joung et al., 2017b). For spontaneous differentiation using a dox-inducible gene expression system, the plasmid pUltra-puro-RTTA3 (Addgene 58750) was used for rtTA. The EF1a promoter in pLX_TRC209 (Broad Genetic Perturbation Platform) was replaced with the pTight promoter (Addgene 31877). For DYRK1A overexpression, the codon-optimized DYRK1A sequence (NM_001396) was cloned into pLX_TRC209 (Broad Genetic Perturbation Platform) for expression under EF1a and the Hygromycin resistance gene was replaced with a Blasticidin resistance gene (Addgene 75112).

[0490] Cell culture and differentiation. HEK293FT cells (Thermo Fisher Scientific R70007) were maintained in high-glucose DMEM with GlutaMax and pyruvate (Thermo Fisher Scientific 10569010) supplemented with 10% fetal bovine serum (VWR 97068-085) and 1% penicillin/streptomycin (Thermo Fisher Scientific 15140122). Cells were passaged every other day at a ratio of 1:4 or 1:5 using TrypLE Express (Thermo Fisher Scientific 12604021).

[0491] Unless otherwise specified, human embryonic stem cells (hESCs) used in these experiments were from the HUES66 cell line (Harvard Stem Cell Institute iPS Core Facility). Other stem cell lines used in this study include human induced pluripotent stem cell (iPSC) 11a (gift from the Arlotta laboratory, Harvard University) and hESC H1 (WiCell). hESCs and iPSCs were maintained in cell culture dishes coated with 1% Geltrex membrane matrix (Thermo Fisher Scientific A1413202) in mTeSR1 medium (STEMCELL Technologies 85850). For routine maintenance, stem cells were passaged 1:10-1:20 using ReLeSR (STEMCELL Technologies 05873) and seeded in mTeSR with 10 μM ROCK Inhibitor Y27632 (Enzo Life Sciences ALX-270-333-M025). For lentivirus transduction and differentiation, cells were dissociated using Accutase (STEMCELL Technologies 07920). All stem cells were maintained below passage 30 and confirmed to be karyotypically normal and negative for mycoplasma within 5 passages before differentiation.

[0492] During neuronal differentiation, stem cell media was incrementally shifted towards neuronal media, consisting of Neurobasal medium (Thermo Fisher Scientific 21103049) supplemented with B-27 (Thermo Fisher Scientific 17504044), GlutaMAX (Thermo Fisher Scientific 35050061), and Normocin (Invivogen ant-nr-1). 1 day after the start of differentiation (day 1), media was changed to stem cell media with the appropriate antibiotic. Antibiotic was included in the media for a total of 5 days of selection. On day 2, media was changed to 75% stem cell media and 25% neuronal media. On day 3, media was changed to 50% stem cell media and 50% neuronal media. On day 4, media was changed to 25% stem cell media and 75% neuronal media. On day 5, media was changed to neuronal media.

[0493] During TF-driven neural progenitor (NP) differentiation, stem cell media was gradually shifted towards NP media, consisting of DMEM/F-12 with HEPES (Thermo Fisher Scientific 11330057) supplemented with B-27 (Thermo Fisher Scientific 17504044), 20 ng/ml EGF (MilliporeSigma E9644), 20 ng/mL bFGF (STEMCELL Technologies 78003), 2 ug/ml heparin (STEMCELL Technologies 07980), and Normocin (Invivogen ant-nr-1). Similar to neuronal differentiation, stem cell media was shifted by increasing the proportion of NP media 25% incrementally from day 2 to day 5. Cells were passaged at day 4 when selected with the appropriate antibiotic. For spontaneous differentiation, 2 μg/mL doxycycline (MilliporeSigma D9891) was added to the media starting from day 0 for 7 days. After 7 days, cells were maintained in NP media for 3 days before media was changed to differentiation media, which had the same components as NP media but without EGF and bFGF. During spontaneous differentiation, 40-60% of differentiation media was refreshed every other day.

[0494] For comparison to other NP differentiation methods, embryoid body (EB) (Schafer et al., 2019) and dual SMAD inhibition (DS) (Shi et al., 2012a) methods were used to differentiate hESCs into NP as previously described. To provide the best comparison between the methods, the differentiation timelines for the three methods were aligned such that the iNP differentiation ended around the same time. The iNPs produced by the three methods were dissociated for scRNA-seq at the same time. During the RFX4-iNP protocol optimization, base media from the DS and EB protocols were tested. DS media is a 1:1 mix of N-2 and B-27-containing media. N-2 medium consists of DMEM/F12 with HEPES (Thermo Fisher Scientific 11330057) supplemented with N-2 (Thermo Fisher Scientific 17502048), 5 μg/mL insulin (Millipore Sigma 19278), 100 μM nonessential amino acids (Thermo Fisher Scientific 11140050), 100 M 2-mercaptoethanol (Millipore Sigma M6250), and Normocin (Invivogen ant-nr-1). B-27 medium is the same as the neuronal medium described above. EB media consists of DMEM/F12 with HEPES (Thermo Fisher Scientific 11330057) supplemented with N-2 (Thermo Fisher Scientific 17502048), B27 minus vitamin A (Thermo Fisher Scientific 12587010), and Normocin (Invivogen ant-nr-1). SMAD inhibitors dorsomorphin (Millipore Sigma P5499) and SB-431542 (R&D Systems 1614) were added where indicated.

[0495] Lentivirus production. HEK293FT cells (Thermo Fisher Scientific R70007) were cultured as described above. 1 day prior to transfection, cells were seeded at ˜40% confluency in T25, T75, or T225 flasks (Thermo Fisher Scientific 156367, 156499, or 159934). Cells were transfected the next day at ˜90-99% confluency. For each T25 flask, 3.4 μg of plasmid containing the vector of interest, 2.6 μg of psPAX2 (Addgene 12260), and 1.7 μg of pMD2.G (Addgene 12259) were transfected using 17.5 μL of Lipofectamine 3000 (Thermo Fisher Scientific L3000150), 15 μL of P3000 Enhancer (Thermo Fisher Scientific L3000150), and 1.25 mL of Opti-MEM (Thermo Fisher Scientific 31985070). Transfection parameters were scaled up linearly with flask area for T75 and T225 flasks. Media was changed 5 h after transfection. Virus supernatant was harvested 48 h post-transfection, filtered with a 0.45 μm PVDF filter (MilliporeSigma SLHV013SL), aliquoted, and stored at −80° C.

[0496] Lentivirus transduction. For transduction, 3×106 hESCs or iPSCs were seeded in 10-cm cell culture dishes with 10 μM ROCK Inhibitor Y27632 (Enzo Life Sciences ALX-270-333-M025) and an appropriate volume of lentivirus in mTeSR. After 24 h, media was refreshed with the appropriate antibiotic. For 5 days, media with the appropriate antibiotic was refreshed every day, and cells were passaged after 3 days of selection. Concentrations for selection agents were determined using a kill curve: 150 μg/mL Hygromycin (Thermo Fisher Scientific 10687010), 3 μg/mL Blasticidin (Thermo Fisher Scientific A1113903), and 1 μg/mL Puromycin (Thermo Fisher A1113803). Lentiviral titers were calculated by transducing cells with 5 different volumes of lentivirus and determining viability after a complete selection of 3 days (Joung et al., 2017b).

[0497] qPCR quantification of transcript expression. Cells were seeded in 96-well plates and grown to 60-90% confluency before RNA was reverse transcribed for qPCR as described previously (Joung et al., 2017b). TaqMan qPCR was performed with custom or readymade probes (Tables 11 and 12). Significance testing was performed using Student's t-test.

[0498] Western blot. Protein lysates were harvested with RIPA lysis buffer (Cell Signaling Technologies 9806S) containing protease inhibitor cocktail (MilliporeSigma 05892791001). Samples were standardized for protein concentration using the Pierce BCA protein assay (VWR 23227), and 20 μg or 40 μg of the samples were incubated at 70° C. for 10 mins under reducing conditions. After denaturation, samples were separated by Bolt 4-12% Bis-Tris Plus Gels (Thermo Fisher Scientific NW04125BOX) and transferred onto a PVDF membrane using iBlot Transfer Stacks (Thermo Fisher Scientific IB401001).

[0499] For NEUROD1 and V5, blots were blocked with Odyssey Blocking Buffer (TBS; LiCOr 927-50000) for 1 h at room temperature. Blots were then probed with different primary antibodies [anti-NEUROD1 (Abcam ab60704, 1:1,000 dilution), anti-GAPDH (Cell Signaling Technologies 2118L, 1:1,000 dilution), anti-V5 (Cell Signaling Technologies 13202S, 1:1,000 dilution), anti-ACTB (MilliporeSigma A5441, 1:5,000 dilution)] in Odyssey Blocking Buffer overnight at 4° C. Blots were washed with TBST before incubation with secondary antibodies IRDye 680RD Donkey anti-Mouse IgG (LiCOr 925-68072) and IRDye 800CW Donkey anti-Rabbit IgG (LiCOr 925-32213) at 1:20,000 dilution in Odyssey Blocking Buffer for 1 h at room temperature. Blots were washed with TBST and imaged using the Odyssey CLx (LiCOr).

[0500] For DYRK1A, blots were blocked with 5% BLOT-QuickBlocker (G Biosciences 786-011) in TBST for 1 h at room temperature. Blots were then probed with different primary antibodies [anti-DYRK1A (Novus Biologicals H00001859-M01, 1:250 dilution) or anti-ACTB (Cell Signaling Technologies 4967L, 1:1,000 dilution)] in 2.5% BLOT-QuickBlocker (G Biosciences 786-011) in TBST overnight at 4° C. Blots were washed with TBST before incubation with secondary antibodies anti-mouse IgG, HRP-linked antibody (Cell Signaling Technologies 7076S) and anti-rabbit IgG, HRP-linked antibody (Cell Signaling Technologies 7074S) at 1:5,000 dilution in 2.5% BLOT-QuickBlocker (G Biosciences 786-011) in TBST for 1 h at room temperature. Blots were washed with TBST and imaged using the Pierce ECL Western Blotting Substrate (Thermo Fisher Scientific 32209) on the ChemiDox XRS+ (Bio-Rad).

[0501] Immunofluorescence and imaging. Cells were cultured on poly-D-lysine/laminin coated glass coverslips (VWR 354087) in 24-well plates as described above. Prior to staining, cells were washed with 1 mL PBS and fixed with 4% paraformaldehyde (VWR 15710) in PBS for 30 mins at room temperature. Cells were washed with PBS and blocked in PBS with 2.5% goat serum (Cell Signaling Technologies 5425S) and 0.1% Triton X-100 (MilliporeSigma 93443) for 1 h at room temperature. Cells were then stained with different primary antibodies [anti-MAP2 (MilliporeSigma M1406, 1:500 dilution), anti-PAX6 (Abcam ab5790, 1:500 dilution), anti-Nestin (MilliporeSigma MAB5326, 1:200 dilution), anti-VIM (Proteintech 10366-1-AP, 1:200 dilution), anti-GFAP (Abcam ab4674, 1:500 dilution), anti-NG2 (MilliporeSigma AB5320, 1:200 dilution), anti-PDGFRA (Cell Signaling Technologies 3164S, 1:200 dilution), or anti-FOXG1 (Abcam ab18259, 1:500 dilution] in PBS with 1.25% goat serum (Cell Signaling Technologies 5425S) and 0.1% Triton X-100 (MilliporeSigma 93443) overnight at 4° C. Cells were washed in PBS with 0.1% Triton X-100 (MilliporeSigma 93443) before staining with the appropriate secondary antibodies [goat anti-mouse IgG (Alexa Fluor 568, Thermo Fisher Scientific A-11031, 1:1,000 dilution), goat anti-chicken IgY (Alexa Fluor 488, Thermo Fisher Scientific A-11039, 1:1,000 dilution), goat anti-rabbit IgG (Alexa Fluor 647, Thermo Fisher Scientific A-21244, 1:1,000 dilution), or goat anti-rabbit IgG (Alexa Fluor 488, Thermo Fisher Scientific A-11008, 1:1,000 dilution)] in PBS with 1.25% goat serum (Cell Signaling Technologies 5425S) and 0.1% Triton X-100 (MilliporeSigma 93443) for 1 h at room temperature. Cells were washed in PBS with 0.1% Triton X-100 (MilliporeSigma 93443), mounted onto slides using ProLong Gold Antifade Mountant with DAPI (Thermo Fisher Scientific P36941), and nail polished (VWR 100491-940). Immunostained coverslips were imaged on a Zeiss Axio Observer with a Hamatsu Camera using a Plan-Apochromat 20x objective and a 1.6× Optovar.

[0502] Image quantification. Images were taken from randomly selected regions using fixed exposure times. The MeasureImageIntensity module in CellProfiler 3.1.8 was used to analyze grayscale 577 nm images (MAP2) for mean intensity units. For induced neurons, mean intensity units were normalized by the number of nuclei in each image. The IdentifyPrimaryObjects module in CellProfiler was used to identify and count nuclei in the grayscale 353 nm (DAPI) images with the following settings modified from default: Typical diameter of objects, in pixel units (Min, Max): 25, 70; Threshold strategy: Adaptive; Threshold smoothing scale: 1.5; Lower and upper bounds on threshold: 0.06, 1.0. Significance testing was performed using Student's t-test.

[0503] Design and cloning of TF ORF libraries. The barcoded human TF library (MORF) consisted of 1,836 genes that were selected based on AnimalTFDB (Zhang et al., 2015) and Uniprot (UniProt, 2015) annotations and included histone modifiers. The library included 3,548 isoforms that overlapped between RefSeq and Gencode annotations, as well as 2 control vectors expressing GFP and mCherry. 593 of the 3,548 isoforms were obtained from the Broad Genomic Perturbation Platform and sequence verified. Table 3 lists the sequences of TFs in MORF.

[0504] To design a targeted TF ORF library for NP differentiation, single-cell or bulk RNA-seq datasets of human or mouse radial glia, neural stem cells, differentiated neural progenitors from 2D cultures or brain organoids, and fetal astrocytes were used to select TFs that were shown to be specifically expressed in these cell types (Camp et al., 2015; Johnson et al., 2015; Llorens-Bobadilla et al., 2015; Pollen et al., 2015; Shin et al., 2015; Thomsen et al., 2016; Wu et al., 2010; Zhang et al., 2016). TFs that were identified in 2 or more datasets (out of 8) were included in the library. Then, bulk RNA-seq data of human fetal astrocytes (Zhang et al., 2016) was used to identify TF isoforms annotated in RefSeq that comprised >25% of the TF gene transcripts. These criteria selected 90 TF isoforms covering 70 TF genes (Table 1).

[0505] TF ORF isoforms that were not available from the Broad Genomic Perturbation Platform were synthesized with 24-bp barcodes (Genewiz) and cloned in an arrayed format into pLX_TRC317 (MORF; Broad Genetic Perturbation Platform) or pLX_TRC209 (targeted NP library; Broad Genetic Perturbation Platform) for expression under the EF1a promoter. Barcodes for each TF were selected to have a Hamming distance of at least 3 compared to all other barcodes.

[0506] Reporter cell line screen. To generate reporter cell lines, EGFP from pLX_TRC209 (Broad Genetic Perturbation Platform) followed by a T2A (GGCAGTGGAGAGGGCAGAGGAAGTCTGCTAACATGCGGTGACGTCGAGGAGAA TCCTGGCCCA (SEQ ID NO: 10809)) self-cleaving peptide was inserted at the N-terminus of endogenous SLC1A3 and VIM genomic sequences. Clonal reporter cell lines were generated using CRISPR-Cas9 mediated HDR. To construct the HDR plasmids for each gene, the HDR templates that consisted of the 850-1,000 bp genomic regions flanking the sgRNA cleavage sites were PCR amplified from HUES66 genomic DNA using KAPA HiFi HotStart Readymix (KAPA Biosystems KK2602). Then EGFP-T2A flanked by HDR templates were cloned into pUC19 (Addgene 50005). HUES66 cells were nucleofected with 10 μg of sgRNA and Cas9 plasmid (Addgene 52961) and 6 μg of HDR plasmid using the P3 Primary Cell 4D-Nucleofector X Kit (Lonza V4XP-3024) according to the manufacturer's instructions. Cells were then seeded sparsely (2 electroporation reactions per 10-cm cell culture dish) to form single-cell clones. After 18 h, cells were selected for Cas9 expression with 0.5 μg/mL Puromycin for 2 days and expanded until colonies can be picked (˜1 week).

[0507] Cell colonies were detached by replacing the media with PBS and incubating at room temperature for 15 mins. Each cell colony was removed from the Petri dish using a 200 μL pipette tip and transferred a well in a 96-well plate for expansion. Clones with EGFP insertions were identified by 2-round PCR amplification (Table 13), first with primers amplifying outside of the HDR template (HDR Fwd 1 and HDR Rev, 15 cycles) and then with primers amplifying the region of insertion (HDR Fwd 2 and HDR Rev, 15 cycles) to avoid detecting the HDR template plasmid as a false positive. Products were run on a gel to identify clones with insertions and Sanger sequencing confirmed that EGFP had been inserted at the intended site without mutations. For each reporter cell line, 3 clones with EGFP inserted into one of the two alleles were selected for further expansion and characterization.

[0508] For TF ORF screening using reporter hESC lines, SLCIA3 or VIM reporter HUES66 cell lines were transduced with the pooled TF ORF library at MOI <0.3 and differentiated into iNPs as described above. After 7 days of differentiation, 5-10×106 cells were sorted for EGFP expression using the Sony SH800S Cell Sorter. For each clonal line, the percentage of cells sorted for the control condition was matched to those expressing EGFP (˜15-20%). After sorting, TF barcodes from each population were amplified (Table 13) and deep-sequenced on the Illumina MiSeq platform as previously described (>0.5 million reads per cell population) (Joung et al., 2017b). NGS reads that perfectly matched each barcode were counted and normalized to the total number of perfectly matched NGS reads for each condition. Enrichment of each TF was calculated as the normalized barcode count in the high population divided by the count in the low population.

[0509] Flow-FISH screen. For TF ORF screening using flow-FISH, HUES66 cells were transduced with the pooled TF ORF library at MOI <0.3 and differentiated into iNPs as described above. After 7 days of differentiation, cells were labeled with the appropriate FISH probes (Table 14) using the PrimeFlow RNA assay kit (Thermo Fisher Scientific 88-18005-204) with 20 million cells in 4 reactions per biological replicate. FISH probes targeting transcripts with similar expression levels were pooled together. Once the cells were labeled, the entire cell population was sorted for high or low fluorescence (15% of cells per bin), indicating an aggregate expression level of the transcripts labeled with the pooled FISH probes for the particular wavelength. After sorting, TF barcodes from each population were amplified (Table 13) using a modified ChIP reverse cross-linking protocol as described previously (Fulco et al., 2019) and deep-sequenced on the Illumina NextSeq platform (>4 million reads per cell population). Enrichment of each TF was calculated as described above for the reporter cell line screen.

[0510] Single-cell RNA sequencing (scRNA-seq) and data analysis. Cells were dissociated with Accutase (STEMCELL Technologies 07920) for 10 mins (NP) or 50 mins (spontaneously differentiated cells) at 37° C. and filtered using a 70 μm cell strainer (MilliporeSigma CLS431751) to obtain single cells. Cells were resuspended in PBS containing 0.04% BSA, counted, and loaded in the 10× Genomics Chromium Controller. 10,000 cells were used as input for each channel of a 10× Chromium Chip. For cells from the scRNA-seq pooled screen and spontaneous differentiation of four candidate TFs, scRNA-seq libraries were prepared using the Chromium Single Cell 3′ Library & Gel Bead Kit v2 (10× Genomics 120237) according to the manufacturer's instructions. Libraries were sequenced on the NextSeq platform, aiming for a minimum coverage of 20,000 reads per single cell (paired-end; read 1: 26 cycles; i7 index: 8 cycles, i5 index: 0 cycles; read 2: 55 cycles). For cells from the NP method comparison and spontaneous differentiation of RFX4-DS-iNPs, scRNA-seq libraries were prepared using the Chromium Single Cell 3′ Library & Gel Bead Kit v3 (10x Genomics 1000075) and sequenced on the HiSeq X platform (paired-end; read 1: 28 cycles; i7 index: 8 cycles, i5 index: 0 cycles; read 2: 96 cycles).

[0511] Sequencing data were aligned and quantified using the Cell Ranger Single-Cell Software Suite v3.1.0 (10× Genomics) (Zheng et al., 2017) against the GRCh38 human reference genome provided by Cell Ranger. The Python package Scanpy v1.4.4 (Wolf et al., 2018) was used to cluster and visualize cells. Cells with 400-7,000 detected genes and less than 5% total mitochondrial gene expression were retained for analysis. Genes that were detected in fewer than 3 cells were removed. Scanpy was used to log normalize, scale, and center the data and unwanted variation was removed by regressing out the number of UMIs and percent mitochondrial reads. Next, highly variable genes were identified and used as input for dimensionality reduction via principal component analysis (PCA). The resulting principal components were then used to cluster the cells, which were visualized using Uniform manifold approximation and projection (UMAP). Clusters were identified using Louvain by fitting the top 50 principal components to compute a neighborhood graph of observations with local neighborhood number of 20 using the scanpy.pp.neighbors function. Cells were then clustered into subgroups using the Louvain algorithm implemented as the scanpy.tl.louvain function. Cluster marker genes and associated p-values were identified using the scanpy.tl.rank_gene_groups function.

[0512] For scRNA-seq analysis of the pooled 90 TF screen for NP differentiation, distance between cells with different TF perturbations was calculated using the scipy.spatial.distance.cdist function from the SciPy Python library. For each TF perturbation, the pairwise distance between cells with the TF perturbation and cells without the TF perturbation was calculated and the median of the distances was determined. The 939 highly variable genes were used in the distance calculation. To identify TFs that produced transcriptome profiles similar to radial glia from human fetal cortex or brain organoid, TF scRNA-seq signatures were correlated to available scRNA-seq datasets (Nowakowski et al., 2017; Pollen et al., 2015; Quadrato et al., 2017). The 218 most variable genes in the scRNA-seq data, which were identified using the scanpy.pp.highly_variable_genes function with the parameters “min_mean=0.075, max_mean=8 and min_disp=1.5”, were used for the correlation analysis. The Spearman correlations between expression of these genes in each TF-perturbed single cell and the average expression in radial glia scRNA-seq from human fetal cortex or organoid were calculated. Then, the average correlation of each TF was determined by taking the average of the corresponding TF-perturbed single cell correlations. Candidate TFs were ranked based on the z-score of the average correlation across all datasets. For comparing TF transcriptome signatures to other cell types from the mouse organogenesis cell atlas (Cao et al., 2019), average expression of the top 30 marker genes (ranked by p-value) for each cell type was used to assess similarity. The z-score of the average marker gene expression for cells perturbed by each TF was used to identify TF perturbations that were most similar to each cell type.

[0513] For determining consistency within batch replicates of different iNP differentiation methods, the cluster of spontaneously differentiated neurons was excluded from the analysis. Distance between cells within the same batch replicate was calculated using the scipy.spatial.distance.pdist function from the SciPy Python library. The 2,305 highly variable genes were used in the distance calculation. For determining consistency between batch replicates, distance between cells in different batch replicates of the same method was calculated using the scipy.spatial.distance.cdist function.

[0514] ScRNA-seq screen. For TF ORF screening using scRNA-seq, HUES66 cells were transduced with the pooled TF ORF library at MOI <0.3 and differentiated into iNPs. Then, iNPs were dissociated for scRNA-seq analysis as described above. To pair TF barcodes with cell barcodes, TF and cell barcodes were PCR amplified from cDNA retained following the whole transcriptome amplification step of the 10× Genomics scRNA-seq library preparation protocol (Table 13). The resulting amplicon was sequenced on the Illumina NextSeq platform, aiming for a minimum coverage of 20,000 reads per single cell (paired-end; read 1: 16 cycles; read 2: 72 cycles). For each cell, the TF whose corresponding barcode had the highest number of perfectly matching NGS reads was paired with the cell if the TF barcode had at least 2 reads and >25% more reads than the second highest TF. Otherwise, the cell was excluded from the scRNA-seq analysis.

[0515] Arrayed screen. For TF ORF screening in an arrayed format, individual TF ORF isoforms were packaged into lentivirus as described above. Cells were transduced at MOI <0.5 by seeding 1.6×104 cells in 96-well plates and adding the appropriate volume of lentivirus. Cells were differentiated into NP and harvested for qPCR at 7 days after transduction as described above.

[0516] Bulk RNA sequencing (RNA-seq) and data analysis. RNA from cells plated in 24-well plates and grown to 60-90% confluency was harvested using the RNeasy Plus Mini Kit (Qiagen 74134). RNA-seq libraries were prepared using NEBNext Ultra RNA Library Prep Kit for Illumina (NEB E7530S) and deep sequenced on the Illumina NextSeq platform (>9 million reads per biological replicate). Bowtie(Langmead et al., 2009) index was created based on the human hg38 UCSC genome and RefSeq transcriptome. Next, RSEM v1.3.1 (Li and Dewey, 2011) was run with command line options “--estimate-rspd --bowtie-chunkmbs 512 --paired-end” to align paired-end reads directly to this index using Bowtie and estimate expression levels in transcripts per million (TPM) based on the alignments.

[0517] To correlate TF ORF RNA-seq signatures to those from human fetal cortex or brain organoid (Nowakowski et al., 2017; Pollen et al., 2015; Quadrato et al., 2017), transcript measurements from each available dataset were converted to TPM. For each cell type, TPM measurements from single cells were averaged to obtain average TPM values of genes for the cell type. The top 2,000 genes that had the highest fold change between the TF ORF expression condition compared to the GFP control condition (stem cells overexpressing GFP that were cultured in mTeSR1 stem cell media) were used to define the TF ORF RNA-seq signature. Expression of these genes in TPM was used to calculate the Pearson correlation between the TF ORF and the cell type of interest from available datasets.

[0518] To identify genes that were differentially expressed as a result of TF ORF expression, RSEM's TPM estimates for each transcript were transformed to log-space by taking log 2(TPM+1). Transcripts were considered detected if their transformed expression level was equal to or above 1 (in log 2(TPM+1) scale). All genes detected in at least three libraries were used to find differentially expressed genes. The Student's t-test was performed on the TF ORF overexpression condition against GFP control condition. Only genes that were significant (p-value pass 0.05 FDR correction) were reported.

[0519] For analysis of transcriptome changes as a result of DYRK1A perturbation, transcripts were considered detected if the average TPM of either the perturbed or control conditions was greater than 1. In the DYRK1A knockout perturbations, the Student's t-test was performed on the DYRK1A-targeting sgRNA condition against both non-targeting sgRNA conditions. In the DYRK1A overexpression perturbation, the Student's t-test was performed on the DYRK1A ORF condition against the GFP control condition. Volcano plots showed genes that had p-value pass 0.01 FDR correction with fold change that was greater or less than 1. The heat map of genes with DYRK1A dosage-dependent expression changes showed genes that had p-value pass 0.05 FDR correction.

[0520] Chromatin immunoprecipitation with sequencing (ChIP-seq). Cells were plated in 10-cm cell culture dishes and grown to 60-80% confluency. For each condition, two biological replicates were harvested for ChIP-seq. Formaldehyde (MilliporeSigma 252549) was added directly to the growth media for a final concentration of 1% and cells were incubated at 37° C. for 10 mins to initiate chromatin fixation. Fixation was quenched by adding 2.5 M glycine (MilliporeSigma G7126) in PBS for a final concentration of 125 mM glycine and incubated at room temperature for 5 mins. Cells were then washed with ice-cold PBS, scraped, and pelleted at 1,000×g for 5 mins.

[0521] Cell pellets were prepared for ChIP-seq using the Epigenomics Alternative Mag Bead ChIP Protocol v2.0 (Consortium, 2004). Briefly, cell pellets were resuspended in 100 μL of lysis buffer (1% SDS, 10 mM EDTA, 50 mM Tris-HCL pH 8.1) containing protease inhibitor cocktail (MilliporeSigma 05892791001) and incubated for 10 mins at 4° C. Then 400 μL of dilution buffer (0.01% SDS, 1.1% Triton X-100, 1.2 mM EDTA, 16.7 mM Tris-HCl pH 8.1, and 167 mM NaCl) containing protease inhibitor cocktail (MilliporeSigma 05892791001) was added. Samples were pulse sonicated with 2 rounds of 10 mins (30s on-off cycles, high frequency) in a rotating water bath sonicator (Diagenode Bioruptor) with 5 mins on ice between each round. 10 μL of sonicated sample was set aside as input control. Then 500 μL of dilution buffer (0.01% SDS, 1.1% Triton X-100, 1.2 mM EDTA, 16.7 mM Tris-HCl pH 8.1, and 167 mM NaCl) containing protease inhibitor cocktail (MilliporeSigma 05892791001) and 1 μL of anti-V5 (Thermo Fisher Scientific R960-25) was added to the sonicated sample. ChIP samples were rotated end over end overnight at 4° C.

[0522] For each ChIP, 50 L of Protein A/G Magnetic Beads (Thermo Fisher Scientific 88802) was washed with 1 mL of blocking buffer (0.5% TWEEN and 0.5% BSA in PBS) containing protease inhibitor cocktail (MilliporeSigma 05892791001) twice before resuspending in 100 μL of blocking buffer. ChIP samples were transferred to the beads and rotated end over end for 1 h at 4° C. ChIP supernatant was then removed and the beads were washed twice with 200 μL of RIPA low salt buffer (0.1% SDS, 1% Triton x-100, 1 mM EDTA, 20 mM Tris-HCl pH 8.1, 140 mM NaCl, 0.1% DOC), twice with 200 μL of RIPA high salt buffer (0.1% SDS, 1% Triton x-100, 1 mM EDTA, 20 mM Tris-HCl pH 8.1, 500 mM NaCl, 0.1% DOC), twice with 200 μL of LiCl wash buffer (250 mM LiCl, 1% NP40, 1% DOC, 1 mM EDTA, 10 mM Tris-HCl pH 8.1), and twice with 200 μL of TE (10 mM Tris-HCl pH8.0, 1 mM EDTA pH 8.0). ChIP samples were eluted with 50 μL of elution buffer (10 mM Tris-HCl pH 8.0, 5 mM EDTA, 300 mM NaCl, 0.1% SDS). 40 μL of water was added to the input control samples. 8 μL of reverse cross-linking buffer (250 mM Tris-HCl pH 6.5, 62.5 mM EDTA pH 8.0, 1.25 M NaCl, 5 mg/ml Proteinase K, 62.5 μg/ml RNAse A) was added to the ChIP and input control samples and then incubated at 65° C. for 5 h. After reverse crosslinking, samples were purified using 116 μL of SPRIselect Reagent (Beckman Coulter B23318).

[0523] ChIP samples were prepared for NGS with NEBNext Ultra II DNA Library Prep Kit for Illumina (NEB E7645S) and deep-sequenced on the Illumina NextSeq platform (>60 million reads per condition). Bowtie (Langmead et al., 2009) was used to align paired-end reads to the human hg38 UCSC genome with command line options q -X 300 --sam --chunkmbs 512″. Next, biological replicates were merged and Model-based Analysis of ChIP-seq (MACS) (Feng et al., 2012) was run with command line options “-g hs -B -S --mfold 6,30” to identify TF peaks. HOMER (Heinz et al., 2010) was used to discover motifs in the TF peak regions identified by MACS. The findMotifsGenome.pl program from HOMER was run with the command line options “-size 200 -mask” and the top 3 known and de novo motifs were presented. TFs were considered potential regulators of a candidate gene if the TF peak region identified by MACS overlapped with the 20 kb region centered around the transcriptional start site of the candidate gene based on RefSeq annotations.

[0524] Indel analysis. Cells plated in 96-well plates were grown to 60-80% confluency and assessed for indel rates as previously described (Joung et al., 2017b). Genomic DNA was harvested from cells using QuickExtract DNA Extraction kit (Lucigen QE09050). The genomic region flanking the site of interest was amplified using NEBNext High Fidelity 2x PCR Master Mix (New England BioLabs M0541L), first with region-specific primers (Table 13) for 15 cycles and then with barcoded primers for 15 cycles as previously described. PCR products were sequenced on the Illumina MiSeq platform (>10,000 reads per condition), and indel analysis was performed as previously described (Joung et al., 2017b).

[0525] Click-iT EdU flow cytometry assay. Cells plated in 24-well plates were differentiated and EdU incorporation was measured using the Click-iT EdU Alexa Fluor 488 Flow Cytometry Assay Kit (Thermo Fisher Scientific C10420) according to a modified version of the manufacturer's instructions. EdU was added to the culture medium to a final concentration of 10 μM for 2 h before cells were dissociated with Accutase (STEMCELL Technologies 07920) for 15-45 mins at 37° C. Cells were transferred to a 96-well plate, pelleted at 200×g for 5 mins, and washed once with 200 μL of 1% BSA (MilliporeSigma A9418) in PBS. Cells were resuspended in 100 μL of Click-iT fixative and incubated for 15 mins at room temperature in the dark. After fixing, cells were washed with 200 μL of 1% BSA (MilliporeSigma A9418) in PBS twice, resuspended in 100 μL of Click-iT saponin-based permeabilization and wash reagent, and incubated for 15 mins in the dark. To each sample, 500 μL of Click-iT reaction cocktail was added and the reaction mixture was incubated for 30 mins at room temperature in the dark. Cells were washed with 200 μL of Click-iT saponin-based permeabilization and wash reagent twice and resuspended in 200 μL of 1% BSA (MilliporeSigma A9418) in PBS before analysis on a CytoFLEX Flow Cytometer (Beckman Coulter). For each sample, 10,000 cells were analyzed with FlowJo (FlowJo). Significance testing was performed using Student's t-test.

[0526] Electrophysiology. Whole-cell patch-clamp recordings were performed as described (doi: 10.1016/j.celrep.2018.04.066). Recording pipettes were pulled from thin-walled borosilicate glass capillary tubing (KG33, King Precision Glass, CA, USA) on a P-97 puller (Sutter Instrument, CA, USA) and had resistances of 3-5 M2 when filled with internal solution (in mM: 128 K-gluconate, 10 HEPES, 10 phosphocreatine sodium salt, 1.1 EGTA, 5 ATP magnesium salt and 0.4 GTP sodium salt, pH=7.3, 300-305 mOsm). The cultured cells were constantly perfused at a speed of 3 ml/min with the extracellular solution (119 mM NaCl, 2.3 mM KCl, 2 mM CaCl2, 1 mM MgCl2, 15 mM HEPES, 5 mM glucose, pH=7.3-7.4, Osmolarity was adjusted to 325 mOsm with sucrose). All the experiments were performed at room temperature unless otherwise specified.

[0527] Cells were visualized with a 40X water-immersion objective on an upright microscope (Olympus, Japan) equipped with IR-DIC. Recordings were made using a Multiclamp 700B amplifier (Molecular Devices, CA, USA) and Clampex 10.7 software (Molecular Devices, CA, USA). In current clamp mode, membrane potential was held at −65 mV with a Multiclamp 700B amplifier, and step currents were then injected to elicit action potentials. Subsequent analysis was performed using Clampfit 10.7 software (Molecular Devices, CA, USA). The spontaneous AMPA receptor mediated excitatory postsynaptic currents (sEPSCs) were recorded after entering whole-cell path clamp recording mode at least for 3 min. The data were stored on a computer for subsequent off-line analysis. Cells in which the series resistance (Rs) changed by >20% were excluded for data analysis. In addition, cells with Rs more than 20 MΩ at any time during the recordings were discarded.

[0528] Reagent availability. The pooled and arrayed versions of MORF have been deposited at Addgene for distribution to the scientific community.

[0529] Code availability. Applicants have provided a Python script for aggregating gene lists from different datasets and selecting marker genes and TFs from MORF on the Feng Zhang lab GitHub page (github.com/fengzhanglab/TF_screen_manuscript).

### REFERENCES

[0530] 1 Cohen, D. E. & Melton, D. Turning straw into gold: directing cell fate for regenerative medicine. Nat Rev Genet 12, 243-252, doi: 10.1038/nrg2938 (2011).
[0531] 2 Colman, A. & Dreesen, O. Pluripotent stem cells and disease modeling. Cell Stem Cell 5, 244-247, doi: 10.1016/j.stem.2009.08.010 (2009).
[0532] 3 Keller, G. Embryonic stem cell differentiation: emergence of a new era in biology and medicine. Genes Dev 19, 1129-1155, doi: 10.1101/gad.1303605 (2005).
[0533] 4 Kiskinis, E. & Eggan, K. Progress toward the clinical application of patient-specific pluripotent stem cells. J Clin Invest 120, 51-59, doi: 10.1172/JCI40553 (2010).
[0534] 5 Robinton, D. A. & Daley, G. Q. The promise of induced pluripotent stem cells in research and therapy. Nature 481, 295-305, doi: 10.1038/nature10761 (2012).
[0535] 6 Furuyama, K. et al. Diabetes relief in mice by glucose-sensing insulin-secreting human alpha-cells. Nature, doi: 10.1038/s41586-019-0942-8 (2019).
[0536] 7 Pang, Z. P. et al. Induction of human neuronal cells by defined transcription factors. Nature 476, 220-223, doi:10.1038/nature10202 (2011).
[0537] 8 Song, K. et al. Heart repair by reprogramming non-myocytes with cardiac transcription factors. Nature 485, 599-604, doi: 10.1038/nature11139 (2012).
[0538] 9 Sugimura, R. et al. Haematopoietic stem and progenitor cells from human pluripotent stem cells. Nature 545, 432-438, doi: 10.1038/nature22370 (2017).
[0539] 10 Takahashi, K. et al. Induction of pluripotent stem cells from adult human fibroblasts by defined factors. Cell 131, 861-872, doi:10.1016/j.cell.2007.11.019 (2007).
[0540] 11 Weintraub, H. et al. Activation of muscle-specific genes in pigment, nerve, fat, liver, and fibroblast cell lines by forced expression of MyoD. Proc Natl Acad Sci USA 86, 5434-5438 (1989).
[0541] 12 Zhang, Y. et al. Rapid single-step induction of functional neurons from human pluripotent stem cells. Neuron 78, 785-798, doi:10.1016/j.neuron.2013.05.029 (2013).
[0542] 13 Zhang, S. C., Wernig, M., Duncan, I. D., Brustle, O. & Thomson, J. A. In vitro differentiation of transplantable neural precursors from human embryonic stem cells. Nat Biotechnol 19, 1129-1133, doi: 10.1038/nbt1201-1129 (2001).
[0543] 14 Chambers, S. M. et al. Highly efficient neural conversion of human ES and iPS cells by dual inhibition of SMAD signaling. Nat Biotechnol 27, 275-280, doi:10.1038/nbt.1529 (2009).
[0544] 15 Hu, B. Y. et al. Neural differentiation of human induced pluripotent stem cells follows developmental principles but with variable potency. Proc Natl Acad Sci USA 107, 4335-4340, doi:10.1073/pnas.0910012107 (2010).
[0545] 16 Konermann, S. et al. Genome-scale transcriptional activation by an engineered CRISPR-Cas9 complex. Nature 517, 583-588, doi: 10.1038/nature14136 (2015).
[0546] 17 Camp, J. G. et al. Human cerebral organoids recapitulate gene expression programs of fetal neocortex development. Proc Natl Acad Sci USA 112, 15672-15677, doi:10.1073/pnas.1520760112 (2015).
[0547] 18 Johnson, M. B. et al. Single-cell analysis reveals transcriptional heterogeneity of neural progenitors in human cortex. Nat Neurosci 18, 637-646, doi:10.1038/nn.3980 (2015).
[0548] 19 Llorens-Bobadilla, E. et al. Single-Cell Transcriptomics Reveals a Population of Dormant Neural Stem Cells that Become Activated upon Brain Injury. Cell Stem Cell 17, 329-340, doi:10.1016/j.stem.2015.07.002 (2015).
[0549] 20 Pollen, A. A. et al. Molecular identity of human outer radial glia during cortical development. Cell 163, 55-67, doi:10.1016/j.cell.2015.09.004 (2015).
[0550] 21 Shin, J. et al. Single-Cell RNA-Seq with Waterfall Reveals Molecular Cascades underlying Adult Neurogenesis. Cell Stem Cell 17, 360-372, doi:10.1016/j.stem.2015.07.013 (2015).
[0551] 22 Thomsen, E. R. et al. Fixed single-cell transcriptomic characterization of human radial glial diversity. Nat Methods 13, 87-93, doi:10.1038/nmeth.3629 (2016).
[0552] 23 Wu, J. Q. et al. Dynamic transcriptomes during neural differentiation of human embryonic stem cells revealed by short, long, and paired-end sequencing. Proc Natl Acad Sci USA 107, 5254-5259, doi:10.1073/pnas.0914114107 (2010).
[0553] 24 Zhang, Y. et al. Purification and Characterization of Progenitor and Mature Human Astrocytes Reveals Transcriptional and Functional Differences with Mouse. Neuron 89, 37-53, doi:10.1016/j.neuron.2015.11.013 (2016).
[0554] 25 Quadrato, G. et al. Cell diversity and network dynamics in photosensitive human brain organoids. Nature 545, 48-53, doi: 10.1038/nature22047 (2017).
[0555] 26 Nowakowski, T. J. et al. Spatiotemporal gene expression trajectories reveal developmental hierarchies of the human cortex. Science 358, 1318-1323, doi:10.1126/science.aap8809 (2017).
[0556] 27 Casarosa, S., Fode, C. & Guillemot, F. Mash1 regulates neurogenesis in the ventral telencephalon. Development 126, 525-534 (1999).
[0557] 28 Zhang, X. et al. Pax6 is a human neuroectoderm cell fate determinant. Cell Stem Cell 7, 90-100, doi:10.1016/j.stem.2010.04.017 (2010).
[0558] 29 Murre, C. et al. Interactions between heterologous helix-loop-helix proteins generate complexes that bind specifically to a common DNA sequence. Cell 58, 537-544 (1989).
[0559] 30 Morotomi-Yano, K. et al. Human regulatory factor X 4 (RFX4) is a testis-specific dimeric DNA-binding protein that cooperates with other human RFX members. J Biol Chem 277, 836-842, doi:10.1074/jbc.M108638200 (2002).
[0560] 31 O'Roak, B. J. et al. Multiplex targeted sequencing identifies recurrently mutated genes in autism spectrum disorders. Science 338, 1619-1622, doi:10.1126/science.1227764 (2012).
[0561] 32 Smith, D. J. et al. Functional screening of 2 Mb of human chromosome 21q22.2 in transgenic mice implicates minibrain in learning defects associated with Down syndrome. Nat Genet 16, 28-36, doi:10.1038/ng0597-28 (1997).
[0562] 33 Fotaki, V. et al. Dyrk1A haploinsufficiency affects viability and causes developmental delay and abnormal brain morphology in mice. Mol Cell Biol 22, 6636-6647 (2002).
[0563] 34 Hammerle, B. et al. Transient expression of Mnb/Dyrkla couples cell cycle exit and differentiation of neuronal precursors by inducing p27KIP1 expression and suppressing NOTCH signaling. Development 138, 2543-2554, doi:10.1242/dev.066167 (2011).
[0564] 35 Park, J. et al. Dyrk1A phosphorylates p53 and inhibits proliferation of embryonic neuronal cells. J Biol Chem 285, 31895-31906, doi:10.1074/jbc.M110.147520 (2010).
[0565] 36 Yabut, O., Domogauer, J. & D'Arcangelo, G. Dyrk1A overexpression inhibits proliferation and induces premature neuronal differentiation of neural progenitor cells. J Neurosci 30, 4004-4014, doi: 10.1523/JNEUROSCI.4711-09.2010 (2010).
[0566] 37 Soppa, U. et al. The Down syndrome-related protein kinase DYRK1A phosphorylates p27(Kip1) and Cyclin D1 and induces cell cycle exit and neuronal differentiation. Cell Cycle 13, 2084-2100, doi: 10.4161/cc.29104 (2014).
[0567] 38 Ashique, A. M. et al. The Rfx4 transcription factor modulates Shh signaling by regional control of ciliogenesis. Sci Signal 2, ra70, doi: 10.1126/scisignal.2000602 (2009).
[0568] 39 Blackshear, P. J. et al. Graded phenotypic response to partial and complete deficiency of a brain-specific transcript variant of the winged helix transcription factor RFX4. Development 130, 4539-4552, doi: 10.1242/dev.00661 (2003).
[0569] 40 Joung, J. et al. Genome-scale CRISPR-Cas9 knockout and transcriptional activation screening. Nat Protoc 12, 828-863, doi:10.1038/nprot.2017.016 (2017).
[0570] 41 Fulco, C. P. et al. Activity-by-Contact model of enhancer specificity from thousands of CRISPR perturbations. bioRxiv, 529990, doi: 10.1101/529990 (2019).
[0571] 42 Zheng, G. X. et al. Massively parallel digital transcriptional profiling of single cells. Nat Commun 8, 14049, doi: 10.1038/ncomms14049 (2017).
[0572] 43 Satija, R., Farrell, J. A., Gennert, D., Schier, A. F. & Regev, A. Spatial reconstruction of single-cell gene expression data. Nat Biotechnol 33, 495-502, doi:10.1038/nbt.3192 (2015).
[0573] 44 Langmead, B., Trapnell, C., Pop, M. & Salzberg, S. L. Ultrafast and memory-efficient alignment of short DNA sequences to the human genome. Genome Biol 10, R25, doi:10.1186/gb-2009-10-3-r25 (2009).
[0574] 45 Li, B. & Dewey, C. N. RSEM: accurate transcript quantification from RNA-Seq data with or without a reference genome. BMC Bioinformatics 12, 323, doi: 10.1186/1471-2105-12-323 (2011).
[0575] 46 Consortium, E. P. The ENCODE (ENCyclopedia Of DNA Elements) Project. Science 306, 636-640, doi: 10.1126/science.1105136 (2004).
[0576] 47 Feng, J., Liu, T., Qin, B., Zhang, Y. & Liu, X. S. Identifying ChIP-seq enrichment using MACS. Nat Protoc 7, 1728-1740, doi:10.1038/nprot.2012.101 (2012).
[0577] 48 Heinz, S. et al. Simple combinations of lineage-determining transcription factors prime cis-regulatory elements required for macrophage and B cell identities. Mol Cell 38, 576-589, doi:10.1016/j.molcel.2010.05.004 (2010).
[0578] 49 Campisi, J. (2001). Cellular senescence as a tumor-suppressor mechanism. Trends Cell Biol 11, S27-31.
[0579] 50 Cao, J., Spielmann, M., Qiu, X., Huang, X., Ibrahim, D. M., Hill, A. J., Zhang, F., Mundlos, S., Christiansen, L., Steemers, F. J., et al. (2019). The single-cell transcriptional landscape of mammalian organogenesis. Nature 566, 496-502.
[0580] 51 Damell, J. E., Jr. (2002). Transcription factors as targets for cancer therapy. Nat Rev Cancer 2, 740-749.
[0581] 52 De Rubeis, S., He, X., Goldberg, A. P., Poultney, C. S., Samocha, K., Cicek, A. E., Kou, Y., Liu, L., Fromer, M., Walker, S., et al. (2014). Synaptic, transcriptional and chromatin genes disrupted in autism. Nature 515, 209-215.
[0582] 53 Englund, C., Fink, A., Lau, C., Pham, D., Daza, R. A., Bulfone, A., Kowalczyk, T., and Hevner, R. F. (2005). Pax6, Tbr2, and Tbr1 are expressed sequentially by radial glia, intermediate progenitor cells, and postmitotic neurons in developing neocortex. J Neurosci 25, 247-251.
[0583] 54 Frantz, G. D., Weimann, J. M., Levin, M. E., and McConnell, S. K. (1994). Otx 1 and Otx2 define layers and regions in developing cerebral cortex and cerebellum. J Neurosci 14, 5725-5740.
[0584] 55 Gilbert, L. A., Horlbeck, M. A., Adamson, B., Villalta, J. E., Chen, Y., Whitehead, E. H., Guimaraes, C., Panning, B., Ploegh, H. L., Bassik, M. C., et al. (2014). Genome-Scale CRISPR-Mediated Control of Gene Repression and Activation. Cell 159, 647-661.
[0585] 56 Gotz, M., Stoykova, A., and Gruss, P. (1998). Pax6 controls radial glia differentiation in the cerebral cortex. Neuron 21, 1031-1044.
[0586] 57 Liu, Y., Yu, C., Daley, T. P., Wang, F., Cao, W. S., Bhate, S., Lin, X., Still, C., 2nd, Liu, H., Zhao, D., et al. (2018). CRISPR Activation Screens Systematically Identify Factors that Drive Neuronal Fate and Reprogramming. Cell Stem Cell 23, 758-771 e758.
[0587] 58 Matsunaga, E., Nambu, S., Oka, M., and Iriki, A. (2015). Complex and dynamic expression of cadherins in the embryonic marmoset cerebral cortex. Dev Growth Differ 57, 474-483.
[0588] 59 Reinchisi, G., Ijichi, K., Glidden, N., Jakovcevski, I., and Zecevic, N. (2012). COUP-TFII expressing interneurons in human fetal forebrain. Cereb Cortex 22, 2820-2830. Schafer, S. T., Paquola, A. C. M., Stern, S., Gosselin, D., Ku, M., Pena, M., Kuret, T. J. M., 60 Liyanage, M., Mansour, A. A., Jaeger, B. N., et al. (2019). Pathological priming causes developmental gene network heterochronicity in autistic subject-derived neurons. Nat Neurosci 22, 243-255.
[0589] 61 Shi, Y., Kirwan, P., and Livesey, F. J. (2012a). Directed differentiation of human pluripotent stem cells to cerebral cortex neurons and neural networks. Nat Protoc 7, 1836-1846.
[0590] 62 Shi, Y., Kirwan, P., Smith, J., Robinson, H. P., and Livesey, F. J. (2012b). Human cerebral cortex development from pluripotent stem cells to functional excitatory synapses. Nat Neurosci 15, 477-486, S471.
[0591] 63 Steele-Perkins, G., Plachez, C., Butz, K. G., Yang, G., Bachurski, C. J., Kinsman, S. L., Litwack, E. D., Richards, L. J., and Gronostajski, R. M. (2005). The transcription factor gene Nfib is essential for both lung maturation and brain development. Mol Cell Biol 25, 685-698.
[0592] 64 UniProt, C. (2015). UniProt: a hub for protein information. Nucleic Acids Res 43, D204-212.
[0593] 65 Wolf, F. A., Angerer, P., and Theis, F. J. (2018). SCANPY: large-scale single-cell gene expression data analysis. Genome Biol 19, 15.
[0594] 66 Zhang, H. M., Chen, H., Liu, W., Liu, H., Gong, J., Wang, H., and Guo, A. Y. (2012). AnimalTFDB: a comprehensive animal transcription factor database. Nucleic Acids Res 40, D144-149.
[0595] 67 Zhang, H. M., Liu, T., Liu, C. J., Song, S., Zhang, X., Liu, W., Jia, H., Xue, Y., and Guo, A. Y. (2015). AnimalTFDB 2.0: a resource for expression, prediction and functional study of animal transcription factors. Nucleic Acids Res 43, D76-81.

### Tables

TABLE 1
TF ORF isoforms and respective ranks in the screens. The TF ORF library
consisted of 90 TF isoforms of 70 TF genes that were synthesized with a 24bp barcode
(SEQ ID NO: 1-90). Ranks of TF ORF isoforms in each NP screening method are reported.
For the arrayed screen, the median values of the SLC1A3 and VIM mRNA expression fold
changes at day 7 were averaged, and the TFs were ranked based on the average. “NA” ranks
represent cases where the SLC1A3 or VIM mRNA expression levels could not be detected.
For the reporter cell line screen, the median values of the TF barcode enrichment in the
SLC1A3 and VIM screens were averaged to determine the TF rank. For the Flow-FISH
screens, the TF ranks were determined based on the average TF barcode enrichment. For the
single-cell RNA-seq screen, TFs were ranked based on average correlation with radial glia
from human fetal cortex and organoids provided in existing datasets. “NA” indicates
that the TF barcode was not detected in the single-cell RNA-seq data.

| | | | | | | Flow- | Flow- | | |
|---|---|---|---|---|---|---|---|---|---|
| | | | | | | FISH | FISH | | |
| | | Barcode | | | | Rank | Rank | scRNA- | Perturb- |
| Gene | | (SEQ ID | Average | Arrayed | Reporter | (2 | (10 | seq | seq |
| Name | RefSeq Isoform | NO) | Rank | Rank | Rank | genes) | genes) | Rank | Rank |
| ARX | NM_139058 | 1 | NA | NA | 88 | 39 | 83 | 37 | 78 |
| ASCL1 | NM_004316 | 2 | 25 | 2 | 62 | 22 | 27 | 12 | 1 |
| BCL11A | NM_022893 | 3 | NA | NA | 9 | 61 | 38 | 21 | 17 |
| BCL11A | NM_138559 | 4 | 47.2 | 17 | 53 | 58 | 63 | 45 | 43 |
| BRIP1 | NM_032043 | 5 | NA | NA | 33 | 12 | 14 | 23 | 5 |
| CDK1 | NM_001170407 | 6 | 53.8 | 27 | 41 | 63 | 71 | 67 | 42 |
| CDK1 | NM_001786 | 7 | 45.8 | 22 | 30 | 56 | 56 | 65 | 54 |
| CENPA | NM_001042426 | 8 | 57.4 | 19 | 48 | 66 | 74 | 80 | 32 |
| CHAF1A | NM_005483 | 9 | 48.4 | 57 | 87 | 33 | 30 | 35 | 9 |
| CXXC1 | NM_014593 | 10 | NA | NA | 14 | 53 | 48 | 58 | 69 |
| E2F1 | NM_005225 | 11 | NA | NA | 86 | 90 | 90 | 26 | 29 |
| E2F2 | NM_004091 | 12 | NA | NA | 83 | 84 | 87 | 17 | 22 |
| E2F7 | NM_203394 | 13 | NA | NA | 15 | 27 | 41 | 24 | 39 |
| E2F8 | NM_001256372 | 14 | NA | NA | 84 | 14 | 15 | 42 | 12 |
| EGR1 | NM_001964 | 15 | 68.6 | 60 | 65 | 80 | 69 | 69 | 74 |
| EMX2 | NM_001165924 | 16 | 67.8 | 44 | 59 | 81 | 81 | 74 | 62 |
| EMX2 | NM_004098 | 17 | NA | NA | 46 | 50 | 88 | 43 | 8 |
| ENO1 | NM_001201483 | 18 | 53.6 | 40 | 39 | 67 | 60 | 62 | 25 |
| ENO1 | NM_001428 | 19 | 61 | 33 | 64 | 71 | 77 | 60 | 59 |
| EOMES | NM_001278183 | 20 | 61.8 | 41 | 67 | 68 | 61 | 72 | 76 |
| EOMES | NM_005442 | 21 | 11.2 | 3 | 19 | 2 | 10 | 22 | 15 |
| FANCD2 | NM_001018115 | 22 | NA | NA | 57 | 10 | 17 | NA | NA |
| FEZF2 | NM_018008 | 23 | 54.4 | 12 | 79 | 88 | 84 | 9 | 30 |
| FOS | NM_005252 | 24 | 20.8 | 6 | 4 | 7 | 9 | 78 | 86 |
| FOXG1 | NM_005249 | 25 | 59.6 | 32 | 85 | 65 | 59 | 57 | 77 |
| FOXM1 | NM_001243089 | 26 | 73.8 | 54 | 71 | 85 | 89 | 70 | 23 |
| FOXM1 | NM_202003 | 27 | 71.6 | 51 | 72 | 87 | 85 | 63 | 18 |
| FOXN4 | NM_213596 | 28 | NA | NA | 28 | 41 | 46 | 36 | 45 |
| GLI3 | NM_000168 | 29 | 42.8 | 46 | 1 | 75 | 42 | 50 | 84 |
| H2AFX | NM_002105 | 30 | 62.4 | 26 | 61 | 72 | 76 | 77 | 67 |
| HELLS | NM_001289068 | 31 | 29.4 | 39 | 7 | 25 | 24 | 52 | 37 |
| HELLS | NM_001289073 | 32 | 36.8 | 36 | 32 | 40 | 36 | 40 | 24 |
| HES1 | NM_005524 | 33 | NA | NA | 24 | 6 | 7 | 20 | 63 |
| HES5 | NM_001010926 | 34 | 63.4 | 53 | 77 | 79 | 52 | 56 | 41 |
| HMGB1 | NM_002128 | 35 | 46 | 45 | 40 | 57 | 54 | 34 | 36 |
| HMGB2 | NM_002129 | 36 | 62 | 52 | 54 | 64 | 67 | 73 | 53 |
| HOPX | NM_139212 | 37 | 67 | 30 | 63 | 78 | 80 | 84 | 52 |
| ID3 | NM_002167 | 38 | 42.2 | 20 | 45 | 43 | 39 | 64 | 81 |
| ID4 | NM_001546 | 39 | 31.4 | 14 | 47 | 35 | 20 | 41 | 50 |
| INSM1 | NM_002196 | 40 | 50 | 35 | 13 | 86 | 78 | 38 | 82 |
| KLF15 | NM_014079 | 41 | NA | NA | 34 | 26 | 28 | 47 | 80 |
| LHX2 | NM_004789 | 42 | 12.6 | 13 | 25 | 9 | 6 | 10 | 55 |
| MAZ | NM_001276275 | 43 | NA | NA | 70 | 82 | 73 | 51 | 31 |
| MAZ | NM_001276276 | 44 | 69.4 | 29 | 66 | 83 | 82 | 87 | 65 |
| MEIS1 | NM_002398 | 45 | 26.4 | 23 | 26 | 34 | 34 | 15 | 19 |
| MXD3 | NM_001142935 | 46 | 52 | 59 | 44 | 48 | 55 | 54 | 75 |
| MXD3 | NM_031300 | 47 | 44.4 | 56 | 43 | 55 | 43 | 25 | 64 |
| MYBL2 | NM_001278610 | 48 | 68.6 | 49 | 82 | 70 | 66 | 76 | 79 |
| NFATC4 | NM_001198966 | 49 | 48.4 | 15 | 78 | 89 | 44 | 16 | 14 |
| NFATC4 | NM_001288802 | 50 | 66 | 55 | 90 | 51 | 75 | 59 | 83 |
| NFIB | NM_001190737 | 51 | 5 | 1 | 5 | 8 | 8 | 3 | 16 |
| NFIB | NM_005596 | 52 | 11.6 | 5 | 18 | 17 | 12 | 6 | 11 |
| NFIC | NM_001245004 | 53 | 11.4 | 10 | 35 | 3 | 5 | 4 | 3 |
| NFIC | NM_005597 | 54 | 7.6 | 7 | 21 | 4 | 4 | 2 | 6 |
| NOTCH1 | NM_017617 | 55 | NA | NA | 75 | 28 | 31 | NA | NA |
| NOTCH2 | NM_024408 | 56 | NA | NA | 6 | 37 | 1 | NA | NA |
| NR1D1 | NM_021724 | 57 | 61.2 | 61 | 23 | 76 | 64 | 82 | 66 |
| OTX1 | NM_014562 | 58 | 12.2 | 9 | 2 | 1 | 3 | 46 | 27 |
| PAX6 | NM_000280 | 59 | 13.2 | 8 | 20 | 15 | 18 | 5 | 38 |
| PAX6 | NM_001310159 | 60 | 13.6 | 18 | 8 | 16 | 19 | 7 | 26 |
| PAX6 | NM_001310160 | 61 | 65.8 | 48 | 56 | 69 | 70 | 86 | 56 |
| PLK4 | NM_001190799 | 62 | NA | NA | 42 | 31 | 29 | 27 | 85 |
| PLK4 | NM_001190801 | 63 | NA | NA | 74 | 18 | 33 | 14 | 2 |
| POU3F2 | NM_005604 | 64 | 54.8 | 58 | 55 | 62 | 86 | 13 | 13 |
| PRMT7 | NM_001184824 | 65 | 50.6 | 37 | 51 | 44 | 68 | 53 | 21 |
| RAD54L | NM_001142548 | 66 | 32 | 16 | 31 | 24 | 21 | 68 | 58 |
| RCOR2 | NM_173587 | 67 | 39.2 | 11 | 58 | 47 | 50 | 30 | 61 |
| RFX2 | NM_000635 | 68 | 39.8 | 31 | 50 | 45 | 45 | 28 | 70 |
| RFX2 | NM_134433 | 69 | NA | NA | 11 | 46 | 35 | 71 | 34 |
| RFX4 | NM_001206691 | 70 | 6.2 | 4 | 3 | 5 | 11 | 8 | 4 |
| RFX4 | NM_032491 | 71 | 42.6 | 21 | 22 | 59 | 62 | 49 | 40 |
| SMAD1 | NM_001003688 | 72 | 56.4 | 34 | 38 | 60 | 65 | 85 | 57 |
| SMARCC1 | NM_003074 | 73 | NA | NA | 76 | 20 | 22 | 39 | 73 |
| SOX1 | NM_005986 | 74 | NA | NA | 52 | 36 | 26 | 33 | 48 |
| SOX11 | NM_003108 | 75 | NA | NA | 89 | 54 | 51 | 32 | 68 |
| SOX2 | NM_003106 | 76 | NA | NA | 12 | 13 | 13 | 44 | 44 |
| SOX4 | NM_003107 | 77 | NA | NA | 81 | 21 | 32 | 19 | 87 |
| SOX9 | NM_000346 | 78 | NA | NA | 37 | 11 | 2 | 1 | 10 |
| SSRP1 | NM_003146 | 79 | 40.2 | 38 | 17 | 38 | 47 | 61 | 49 |
| STAT3 | NM_003150 | 80 | 43 | 24 | 16 | 42 | 58 | 75 | 33 |
| STAT3 | NM_213662 | 81 | 52.2 | 43 | 68 | 32 | 37 | 81 | 47 |
| TCF12 | NM_207037 | 82 | NA | NA | 10 | 23 | 16 | 31 | 20 |
| TCF12 | NM_207038 | 83 | NA | NA | 60 | 19 | 23 | 29 | 72 |
| TCF7L2 | NM_001146286 | 84 | NA | NA | 49 | 49 | 79 | 11 | 7 |
| TEAD2 | NM_001256662 | 85 | 69.6 | 47 | 73 | 77 | 72 | 79 | 46 |
| TEAD2 | NM_003598 | 86 | 45.8 | 25 | 69 | 29 | 40 | 66 | 51 |
| TRIM28 | NM_005762 | 87 | 53.6 | 50 | 36 | 74 | 53 | 55 | 35 |
| UHRF1 | NM_001290052 | 88 | 43.8 | 42 | 29 | 73 | 57 | 18 | 71 |
| YAP1 | NM_001195045 | 89 | 47.8 | 28 | 27 | 52 | 49 | 83 | 60 |
| ZFP36L1 | NM_001244701 | 90 | NA | NA | 80 | 30 | 25 | 48 | 28 |

| SEQ ID | |
|---|---|
| NO | Barcode |
| 1 | GACGATAGGTTGTGAGACGTAGAA |
| 2 | ATCCCTCTGGATTGCGCATAGGAC |
| 3 | TCGACGACGCTCAGCGGCCTATCA |
| 4 | GGTTGGATCTTGTAGGGAGCTCGT |
| 5 | CTTTCTTGCAGTCGCACCGAGCTC |
| 6 | GGTTAGAAATTCACGTTCCTATAC |
| 7 | GACTTGGGAACTCCGCAGAGACTG |
| 8 | GACTAGTATCCTTCATAGCTCCTC |
| 9 | ACTCCCTCCAAGGTGAGCGTCCTT |
| 10 | ACGCTGAAATGACAATTTCCGGAA |
| 11 | CGTATTTCGCACCCGGAAAGGGTG |
| 12 | TCGGCCCTGCCATCACTTCATAGT |
| 13 | TGCAAGAGCCACGGAGTTTATGTC |
| 14 | GCTAATAAGTGTCCGAGCACTCAC |
| 15 | CAGTGGAAACCTGACATTTACTTA |
| 16 | AGCGCTCGCACGCGCGTATCCATC |
| 17 | TTCCCTGCTGTCATGCTCACCATG |
| 18 | ACTCAGATACTGGGCCTTCCTTCT |
| 19 | GGTAATTATTGGGCGTTATCTCCA |
| 20 | GACTTGTTACATCGTTCCATAGGC |
| 21 | TACTGGAGCCGGCTACAGATGCTC |
| 22 | TTCCTTATACGAACGCCGATTGAT |
| 23 | GCCGCCACTTTCAGCCTCCGACGC |
| 24 | ATCACATTGAAGTCATTTACACCT |
| 25 | CGTGAACCTCAAGTCAAGCCAAAC |
| 26 | CTAGCCCGAAGGACACCTATTCCC |
| 27 | TGGGTTGTTCCGTTACTCATGAAG |
| 28 | TCCGAAAGCCTTGTTATTGAAATT |
| 29 | TAGCGGAAGTCTAACTGACTTCAT |
| 30 | CGTTTCTTATACCTCCGGCCATGG |
| 31 | GGCGCCGGGTTTGCAATTTCCCTG |
| 32 | CGCATATCGATCCTGATCCCGAGC |
| 33 | ATCTCCTGGGCCCGAAGTTGACGA |
| 34 | AGTGTCGAGCTATATGCAGCCGAA |
| 35 | TTCATGGTGCTCATGTCGTATTTC |
| 36 | AGGCCATTATTGGGTCCCGTGATT |
| 37 | TGCCTGAGTTAAAGACGCAGCTGC |
| 38 | AGAAGTCCGAACTATACTTGGATC |
| 39 | ATGGCTTCGTGACTGTGATTATCG |
| 40 | CCTTAATGATGCGAAGGGAAATAT |
| 41 | AGCACCAATGATCGCCGCTAGATG |
| 42 | ACCGTAGGAGCACGTTGCGATGAA |
| 43 | ACATGAACTATTAAACGAAACGCA |
| 44 | TCCAGGTCACCGGCGCGGCAGAAA |
| 45 | GTGGTGCTAACATTTAGTCGCTAG |
| 46 | GCTCACGCGGGATTAATGCGTCGT |
| 47 | TCGCACTTCTTATTCTGAGGCCCG |
| 48 | GCTCTTTCATTTCCTAGCTCCCGA |
| 49 | GTTATTTGGAAGACATTCACCTTG |
| 50 | TTCAATCCGTTCCCTCGCACAGTG |
| 51 | ACTGGTTCACGCAGAAACTGGTTC |
| 52 | AACGGCGAACGAGACAGACCAACG |
| 53 | ATAGGCAGAATCTACGAGAGGCTA |
| 54 | CTAGCCATCTTCCGCAATGGGACC |
| 55 | CGAATTATATTTGATTAACTGTCT |
| 56 | TCGAGCAGAAGGTGAGTGTCGGAC |
| 57 | ACGCTTGGACTGCACACGGAGCGT |
| 58 | GACGAATGAAACGCAGGACCGAGA |
| 59 | GATACGTGGTCACGTCGTCCCACA |
| 60 | GGACGCCAACACCTACTGTCATAG |
| 61 | GCTTCATAAACTAGTATCGGCAGA |
| 62 | GACCGTTGCTGGTTGTACATGCGC |
| 63 | CTGAGACACGTACTCCGGGTTCAC |
| 64 | AGTAACTTCAGTGATTTAACATTC |
| 65 | TCACAAACCGGAGACTGAGATCTT |
| 66 | CCATCAGATCCTACGCCCTCGCTC |
| 67 | AGCGCGGCGCACAACATGCTAACT |
| 68 | AGCATGACATAGTACCGGAAGCCA |
| 69 | ATTATAGCACATCCGCTACTTAGT |
| 70 | GAGTCCTCGTAATGCGACACAGTC |
| 71 | CTTATTATGCTATTCGCCTGAAAG |
| 72 | CGTAGGCAGTTAGGGCTGTCTAGA |
| 73 | AGAGTTGTTGAGCTGTCATGTGCA |
| 74 | GTGCGATACTACATGTACCGTATA |
| 75 | AGTAGTCATCTTATCTGTTCAGTC |
| 76 | ACAGAAGGTCCGCCATCGTGCATA |
| 77 | GGTCCGTTACAAATCCGATCTCCC |
| 78 | TGTGACGTTTAATCGTAGAAGACA |
| 79 | CTATCGAGTGTTGGTGATGACTTG |
| 80 | GATCTAGCGCGAGACTCCGAACAT |
| 81 | CGTGGGACCAGGGATATAGGGCCA |
| 82 | AACCTTAGGTAAAGGGCCTACAGC |
| 83 | TAAACAGGGAAAGTAATTCGGTGT |
| 84 | GTAAGGTAGTTGGATCCAAATGAG |
| 85 | AATCGAGGTAGCCAACGTATCGGG |
| 86 | AGGAGACCTCCACTGCCATGCATT |
| 87 | ACCTTGGCAGACCTATGGTGAGAG |
| 88 | ATTCGGTTTGGTGGATCTCCGGAC |
| 89 | ATTATCTCCGCGAGGACCGAATGG |
| 90 | CGAGGTTGTGACCTCCTGGGAACA |

TABLE 2
Radial glial cell markers

| Gene Name 1-20 | Gene Name 21-40 |
|---|---|
| VIM | FKBP10 |
| PTN | LFNG |
| SLC1A3 | FADS2 |
| CLU | EDNRB |
| CKB | PTPRZ1 |
| NR2E1 | FAM107A |
| NCAN | OAF |
| TTYH1 | TNC |
| MLC1 | SFXN5 |
| F3 | PDLIM4 |
| FABP7 | PDLIM3 |
| ATP1A2 | HES5 |
| DBI | SPARCL1 |
| GJA1 | COL11A1 |
| FJX1 | ATP1B2 |
| RGMA | DDAH1 |
| SLC1A2 | MT3 |
| PHGDH | ALDOC |
| GPR98 | NES |
| SCARA3 | PAX6 |

TABLE 3
TF isoforms in the barcoded human TF library. The TF library consisted of 1,836 genes covering 3,548 isoforms that overlapped between RefSeq
and Gencode annotations, as well as 2 control vectors expressing GFP and mCherry. 593 of the 3,548 isoforms were obtained from the Broad
Genomic Perturbation Platform (Broad GPP) and sequence verified. The rest of the isoforms were synthesized by Genewiz. Some of the Broad
GPP TF ORFs contained V5 epitope tags. Each TF has a unique 24-bp barcode that facilitates identification in pooled screens.

| | | | | | ORF se- | Bar- | |
|---|---|---|---|---|---|---|---|
| | | RefSeq | | Insert | quence | code | Epi- |
| | | Gene | | SEQ | SEQ | SEQ | tope |
| Source | Name | Name | RefSeq and Gencode ID | ID | ID | ID | Tag |
| Genewiz | TFORF0001 | HIF3A | NM_022462, ENST00000244303 | 91 | 3641 | 7191 | None |
| Genewiz | TFORF0002 | HIF3A | NM_152796, ENST00000472815 | 92 | 3642 | 7192 | None |
| Genewiz | TFORF0003 | HIF3A | NM_152794, ENST00000300862 | 93 | 3643 | 7193 | None |
| Genewiz | TFORF0004 | HIF3A | XM_005259153, ENST00000600383 | 94 | 3644 | 7194 | None |
| Genewiz | TFORF0005 | HIF3A | NM_152795, ENST00000377670 | 95 | 3645 | 7195 | None |
| Genewiz | TFORF0006 | TULP4 | XM_017011069, XM_017011070, NM_020245, ENST00000367097 | 96 | 3646 | 7196 | None |
| Genewiz | TFORF0007 | TULP4 | XM_017011071, NM_001007466, ENST00000367094 | 97 | 3647 | 7197 | None |
| Genewiz | TFORF0008 | ZNF709 | NM_152601, ENST00000397732 | 98 | 3648 | 7198 | None |
| Genewiz | TFORF0009 | ZNF708 | NM_021269, ENST00000356929 | 99 | 3649 | 7199 | None |
| Genewiz | TFORF0010 | ZNF879 | XM_011534550, XM_011534551, NM_001136116, | 100 | 3650 | 7200 | None |
| | | | XM_005265908, ENST00000444149 | | | | |
| Genewiz | TFORF0011 | ZNF878 | NM_001080404, ENST00000547628 | 101 | 3651 | 7201 | None |
| Genewiz | TFORF0012 | ZNF700 | NM_001271848, ENST00000622593 | 102 | 3652 | 7202 | None |
| Genewiz | TFORF0013 | ZNF700 | NM_144566, ENST00000254321 | 103 | 3653 | 7203 | None |
| Genewiz | TFORF0014 | ZNF707 | NM_001100599, NM_001100598, NM_173831, | 104 | 3654 | 7204 | None |
| | | | NM_001288806, NM_001288805, XM_011516977, | | | | |
| | | | ENST00000358656, ENST00000532158, ENST00000532205, | | | | |
| | | | ENST00000418203 | | | | |
| Genewiz | TFORF0015 | DRAP1 | NM_006442, ENST00000312515 | 105 | 3655 | 7205 | None |
| Genewiz | TFORF0016 | IRX5 | NM_005853, ENST00000394636 | 106 | 3656 | 7206 | None |
| Genewiz | TFORF0017 | IRX5 | NM_001252197, ENST00000320990 | 107 | 3657 | 7207 | None |
| Genewiz | TFORF0018 | IRX4 | NM_001278635, NM_001278633, ENST00000613726, | 108 | 3658 | 7208 | None |
| | | | ENST00000622814 | | | | |
| Genewiz | TFORF0019 | IRX4 | NM_016358, NM_001278634, NM_001278632, | 109 | 3659 | 7209 | None |
| | | | ENST00000513692, ENST00000231357, ENST00000505790 | | | | |
| Genewiz | TFORF0020 | IRX6 | NM_024335, ENST00000290552 | 110 | 3660 | 7210 | None |
| Genewiz | TFORF0021 | IRX1 | NM_024337, ENST00000302006 | 111 | 3661 | 7211 | None |
| Genewiz | TFORF0022 | IRX3 | NM_024336, ENST00000329734 | 112 | 3662 | 7212 | None |
| Genewiz | TFORF0023 | IRX2 | XM_011513979, NM_033267, NM_001134222, | 113 | 3663 | 7213 | None |
| | | | ENST00000382611, ENST00000302057 | | | | |
| Genewiz | TFORF0024 | FOXQ1 | NM_033260, ENST00000296839 | 114 | 3664 | 7214 | None |
| Genewiz | TFORF0025 | DHX9 | NM_001357, ENST00000367549 | 115 | 3665 | 7215 | None |
| Genewiz | TFORF0026 | ZNF45 | NM_003425, XM_017027224, XM_017027221, | 116 | 3666 | 7216 | None |
| | | | XM_017027217, XM_017027222, XM_011527267, | | | | |
| | | | XM_017027219, XM_017027218, XM_011527269, | | | | |
| | | | XM_011527273, XM_017027223, XM_017027220, | | | | |
| | | | XM_017027225, XM_017027226, XM_017027227, | | | | |
| | | | XM_011527271, ENST00000269973, ENST00000615985, | | | | |
| | | | ENST00000589703 | | | | |
| Genewiz | TFORF0027 | ZNF44 | NM_001164276, ENST00000356109 | 117 | 3667 | 7217 | None |
| Genewiz | TFORF0028 | ZNF44 | NM_016264, ENST00000355684 | 118 | 3668 | 7218 | None |
| Genewiz | TFORF0029 | ZNF43 | NM_001256653, ENST00000357491 | 119 | 3669 | 7219 | None |
| Genewiz | TFORF0030 | ZNF43 | NM_003423, ENST00000354959 | 120 | 3670 | 7220 | None |
| Genewiz | TFORF0031 | ZNF43 | XM_011528259, XM_011528257, XM_017027214, | 121 | 3671 | 7221 | None |
| | | | NM_001256648, NM_001256649, NM_001256650, | | | | |
| | | | XM_017027209, XM_017027210, XM_017027208, | | | | |
| | | | XM_017027216, XM_017027207, XM_017027212, | | | | |
| | | | XM_017027213, XM_017027211, XM_017027215, | | | | |
| | | | ENST00000594012, ENST00000595461, ENST00000598381 | | | | |
| Genewiz | TFORF0032 | GSC2 | NM_005315, ENST00000086933 | 122 | 3672 | 7222 | None |
| Genewiz | TFORF0033 | SP1 | NM_003109, XM_011538696, ENST00000426431 | 123 | 3673 | 7223 | None |
| Genewiz | TFORF0034 | SP2 | NM_003110, ENST00000376741 | 124 | 3674 | 7224 | None |
| Genewiz | TFORF0035 | SP3 | NM_003111, ENST00000310015 | 125 | 3675 | 7225 | None |
| Genewiz | TFORF0036 | SP3 | NM_001017371, ENST00000418194, ENST00000640958 | 126 | 3676 | 7226 | None |
| Genewiz | TFORF0037 | SP5 | NM_001003845, ENST00000375281 | 127 | 3677 | 7227 | None |
| Genewiz | TFORF0038 | SP7 | NM_001300837, XM_011537900, ENST00000537210 | 128 | 3678 | 7228 | None |
| Genewiz | TFORF0039 | SP7 | NM_152860, NM_001173467, ENST00000536324, | 129 | 3679 | 7229 | None |
| | | | ENST00000303846 | | | | |
| Genewiz | TFORF0040 | ZNF676 | NM_001001411, ENST00000397121 | 130 | 3680 | 7230 | None |
| Genewiz | TFORF0041 | ZNF675 | NM_138330, ENST00000359788 | 131 | 3681 | 7231 | None |
| Genewiz | TFORF0042 | ZNF674 | NM_001146291, ENST00000414387 | 132 | 3682 | 7232 | None |
| Genewiz | TFORF0043 | ZNF674 | NM_001039891, XM_011543941, ENST00000523374 | 133 | 3683 | 7233 | None |
| Genewiz | TFORF0044 | ZNF672 | NM_024836, XM_005270336, ENST00000306562 | 134 | 3684 | 7234 | None |
| Genewiz | TFORF0045 | ZNF671 | NM_024833, ENST00000317398 | 135 | 3685 | 7235 | None |
| Genewiz | TFORF0046 | MAX | NM_145113, ENST00000618858, ENST00000394606, | 136 | 3686 | 7236 | None |
| | | | ENST00000553928, ENST00000556979 | | | | |
| Genewiz | TFORF0047 | MAX | NM_001320415, XM_017021313, XM_017021312, | 137 | 3687 | 7237 | None |
| | | | ENST00000557277 | | | | |
| Genewiz | TFORF0048 | MAX | NM_197957, ENST00000341653 | 138 | 3688 | 7238 | None |
| Genewiz | TFORF0049 | MAX | NM_145112, ENST00000358402 | 139 | 3689 | 7239 | None |
| Genewiz | TFORF0050 | MAZ | NM_001276276, ENST00000562337 | 140 | 3690 | 7240 | None |
| Genewiz | TFORF0051 | MAZ | NM_002383, ENST00000322945 | 141 | 3691 | 7241 | None |
| Genewiz | TFORF0052 | MAZ | NM_001276275, ENST00000545521 | 142 | 3692 | 7242 | None |
| Genewiz | TFORF0053 | MAZ | NM_001042539, ENST00000219782 | 143 | 3693 | 7243 | None |
| Genewiz | TFORF0054 | ZNF679 | NM_153363, XM_017011797, ENST00000421025, | 144 | 3694 | 7244 | None |
| | | | ENST00000255746 | | | | |
| Genewiz | TFORF0055 | ZNF678 | NM_178549 | 145 | 3695 | 7245 | None |
| Genewiz | TFORF0056 | MAF | XM_017023234, XM_017023233, XM_017023235, | 146 | 3696 | 7246 | None |
| | | | ENST00000569649 | | | | |
| Genewiz | TFORF0057 | MAF | NM_001031804, ENST00000393350 | 147 | 3697 | 7247 | None |
| Genewiz | TFORF0058 | MAF | NM_005360, ENST00000326043 | 148 | 3698 | 7248 | None |
| Genewiz | TFORF0059 | CTBP1 | NM_001328, ENST00000290921 | 149 | 3699 | 7249 | None |
| Genewiz | TFORF0060 | CTBP2 | NM_001321014, NM_001290215, NM_001321013, | 150 | 3700 | 7250 | None |
| | | | NM_001321012, NM_001290214, NM_001329, | | | | |
| | | | NM_001083914, XM_017015757, XM_011539355, | | | | |
| | | | XM_005269567, XM_005269564, XM_005269571, | | | | |
| | | | XM_017015756, XM_011539354, XM_011539351, | | | | |
| | | | XM_006717642, XM_011539353, XM_005269561, | | | | |
| | | | XM_005269569, XM_005269568, XM_005269572, | | | | |
| | | | ENST00000337195, ENST00000531469, ENST00000494626, | | | | |
| | | | ENST00000411419 | | | | |
| Genewiz | TFORF0061 | CTBP2 | XM_011539349, ENST00000334808 | 151 | 3701 | 7251 | None |
| Genewiz | TFORF0062 | CTBP2 | NM_022802, ENST00000309035 | 152 | 3702 | 7252 | None |
| Genewiz | TFORF0063 | GTF3C2 | NM_001521, NM_001035521, ENST00000359541, | 153 | 3703 | 7253 | None |
| | | | ENST00000264720 | | | | |
| Genewiz | TFORF0064 | DENND4A | NM_005848, XM_017021863, XM_005254121, | 154 | 3704 | 7254 | None |
| | | | ENST00000431932 | | | | |
| Genewiz | TFORF0065 | DENND4A | NM_001144823, ENST00000443035 | 155 | 3705 | 7255 | None |
| Genewiz | TFORF0066 | ZNF451 | NM_001257273, ENST00000370708 | 156 | 3706 | 7256 | None |
| Genewiz | TFORF0067 | ZNF451 | NM_015555, ENST00000357489 | 157 | 3707 | 7257 | None |
| Genewiz | TFORF0068 | ZNF451 | NM_001031623, ENST00000370706 | 158 | 3708 | 7258 | None |
| Genewiz | TFORF0069 | CSDE1 | NM_007158, NM_001242893, ENST00000339438, | 159 | 3709 | 7259 | None |
| | | | ENST00000261443 | | | | |
| Genewiz | TFORF0070 | CSDE1 | NM_001242891, ENST00000610726, ENST00000438362 | 160 | 3710 | 7260 | None |
| Genewiz | TFORF0071 | CSDE1 | NM_001130523, ENST00000369530 | 161 | 3711 | 7261 | None |
| Genewiz | TFORF0072 | CSDE1 | NM_001007553, NM_001242892, ENST00000358528, | 162 | 3712 | 7262 | None |
| | | | ENST00000534699 | | | | |
| Genewiz | TFORF0073 | ZNF454 | NM_001178090, NM_182594, NM_001323306, | 163 | 3713 | 7263 | None |
| | | | NM_001178089, ENST00000320129, ENST00000519564 | | | | |
| Genewiz | TFORF0074 | BACH2 | NM_021813, NM_001170794, XM_017011166, | 164 | 3714 | 7264 | None |
| | | | XM_011536040, XM_017011165, XM_011536039, | | | | |
| | | | XM_005248759, ENST00000257749, ENST00000537989, | | | | |
| | | | ENST00000343122 | | | | |
| Genewiz | TFORF0075 | KCNIP4 | XM_017008653, NM_001035004, NM_147182, | 165 | 3715 | 7265 | None |
| | | | ENST00000359001, ENST00000509207 | | | | |
| Genewiz | TFORF0076 | KCNIP4 | NM_001035003, ENST00000382148 | 166 | 3716 | 7266 | None |
| Genewiz | TFORF0077 | KCNIP4 | NM_147183, ENST00000382150 | 167 | 3717 | 7267 | None |
| Genewiz | TFORF0078 | KCNIP4 | NM_147181, ENST00000447367 | 168 | 3718 | 7268 | None |
| Genewiz | TFORF0079 | KCNIP3 | NM_013434, ENST00000295225 | 169 | 3719 | 7269 | None |
| Genewiz | TFORF0080 | KCNIP3 | NM_001034914, ENST00000468529 | 170 | 3720 | 7270 | None |
| Genewiz | TFORF0081 | KCNIP2 | NM_014591, ENST00000461105 | 171 | 3721 | 7271 | None |
| Genewiz | TFORF0082 | KCNIP2 | NM_173194, ENST00000348850 | 172 | 3722 | 7272 | None |
| Genewiz | TFORF0083 | KCNIP2 | NM_173193, ENST00000353068 | 173 | 3723 | 7273 | None |
| Genewiz | TFORF0084 | KCNIP2 | NM_173195, ENST00000343195 | 174 | 3724 | 7274 | None |
| Genewiz | TFORF0085 | KCNIP2 | NM_173191, ENST00000356640 | 175 | 3725 | 7275 | None |
| Genewiz | TFORF0086 | LIN28B | XM_011535818, ENST00000637759 | 176 | 3726 | 7276 | None |
| Genewiz | TFORF0087 | LIN28A | NM_024674, XM_011542148, ENST00000326279, | 177 | 3727 | 7277 | None |
| | | | ENST00000254231 | | | | |
| Genewiz | TFORF0088 | ZNF408 | NM_024741, ENST00000311764 | 178 | 3728 | 7278 | None |
| Genewiz | TFORF0089 | ZEB1 | NM_001128128, ENST00000446923 | 179 | 3729 | 7279 | None |
| Genewiz | TFORF0090 | ZEB1 | NM_001174093, ENST00000560721 | 180 | 3730 | 7280 | None |
| Genewiz | TFORF0091 | ZEB1 | NM_001174096, ENST00000361642 | 181 | 3731 | 7281 | None |
| Genewiz | TFORF0092 | ZEB1 | NM_001174095, ENST00000542815 | 182 | 3732 | 7282 | None |
| Genewiz | TFORF0093 | ZEB1 | NM_030751, ENST00000320985 | 183 | 3733 | 7283 | None |
| Genewiz | TFORF0094 | ZEB2 | XM_017005414, XM_017005415, ENST00000638087, | 184 | 3734 | 7284 | None |
| | | | ENST00000638007, ENST00000636413, ENST00000637045, | | | | |
| | | | ENST00000637304 | | | | |
| Genewiz | TFORF0095 | ZEB2 | NM_001171653, ENST00000539609 | 185 | 3735 | 7285 | None |
| Genewiz | TFORF0096 | ZEB2 | NM_014795, XM_006712881, XM_006712882, | 186 | 3736 | 7286 | None |
| | | | ENST00000627532, ENST00000409487, ENST00000558170 | | | | |
| Genewiz | TFORF0097 | PSMD14 | NM_005805, ENST00000409682 | 187 | 3737 | 7287 | None |
| Genewiz | TFORF0098 | MSGN1 | NM_001105569, ENST00000281047 | 188 | 3738 | 7288 | None |
| Genewiz | TFORF0099 | HLF | XM_017024556, ENST00000430986, ENST00000573945, | 189 | 3739 | 7289 | None |
| | | | ENST00000575345 | | | | |
| Genewiz | TFORF0100 | NOV | NM_002514, ENST00000259526 | 190 | 3740 | 7290 | None |
| Genewiz | TFORF0101 | FOXC2 | NM_005251, ENST00000320354 | 191 | 3741 | 7291 | None |
| Genewiz | TFORF0102 | FOXC1 | NM_001453, ENST00000380874 | 192 | 3742 | 7292 | None |
| Genewiz | TFORF0103 | LEUTX | NM_001143832, ENST00000396841 | 193 | 3743 | 7293 | None |
| Genewiz | TFORF0104 | SMAD9 | NM_001127217, ENST00000399275, ENST00000379826 | 194 | 3744 | 7294 | None |
| Genewiz | TFORF0105 | TRERF1 | NM_001297573, XM_017011048, ENST00000541110 | 195 | 3745 | 7295 | None |
| Genewiz | TFORF0106 | TRERF1 | XM_017011053, XM_017011052, ENST00000340840 | 196 | 3746 | 7296 | None |
| Genewiz | TFORF0107 | TRERF1 | NM_033502, XM_017011049, ENST00000372922 | 197 | 3747 | 7297 | None |
| Genewiz | TFORF0108 | TRERF1 | XM_017011054, ENST00000354325 | 198 | 3748 | 7298 | None |
| Genewiz | TFORF0109 | SMAD6 | NM_005585, ENST00000288840 | 199 | 3749 | 7299 | None |
| Genewiz | TFORF0110 | SMAD7 | NM_001190821, ENST00000589634 | 200 | 3750 | 7300 | None |
| Genewiz | TFORF0111 | SMAD7 | NM_001190822, ENST00000591805 | 201 | 3751 | 7301 | None |
| Genewiz | TFORF0112 | SMAD2 | NM_001135937, XM_017025746, ENST00000356825, | 202 | 3752 | 7302 | None |
| | | | ENST00000586040 | | | | |
| Genewiz | TFORF0113 | SMAD3 | NM_001145104, ENST00000537194 | 203 | 3753 | 7303 | None |
| Genewiz | TFORF0114 | SMAD3 | NM_001145102, ENST00000540846 | 204 | 3754 | 7304 | None |
| Genewiz | TFORF0115 | SMAD3 | NM_001145103, ENST00000439724 | 205 | 3755 | 7305 | None |
| Genewiz | TFORF0116 | FOXM1 | NM_001243088, ENST00000627656 | 206 | 3756 | 7306 | None |
| Genewiz | TFORF0117 | FOXM1 | NM_202003, ENST00000361953 | 207 | 3757 | 7307 | None |
| Genewiz | TFORF0118 | FOXM1 | NM_202002, ENST00000342628 | 208 | 3758 | 7308 | None |
| Genewiz | TFORF0119 | ELMSAN1 | XM_005268204, XM_005268205, XM_005268206, | 209 | 3759 | 7309 | None |
| | | | ENST00000423556 | | | | |
| Genewiz | TFORF0120 | ELMSAN1 | NM_194278, NM_001043318, ENST00000394071, | 210 | 3760 | 7310 | None |
| | | | ENST00000286523 | | | | |
| Genewiz | TFORF0121 | BARX2 | NM_003658, ENST00000281437 | 211 | 3761 | 7311 | None |
| Genewiz | TFORF0122 | BARX1 | NM_021570, ENST00000253968 | 212 | 3762 | 7312 | None |
| Genewiz | TFORF0123 | OLIG2 | NM_005806, XM_005260908, ENST00000382357, | 213 | 3763 | 7313 | None |
| | | | ENST00000333337 | | | | |
| Genewiz | TFORF0124 | OLIG1 | NM_138983, ENST00000382348 | 214 | 3764 | 7314 | None |
| Genewiz | TFORF0125 | RLF | NM_012421, ENST00000372771 | 215 | 3765 | 7315 | None |
| Genewiz | TFORF0126 | CXXC1 | NM_014593, XM_017025718, ENST00000285106 | 216 | 3766 | 7316 | None |
| Genewiz | TFORF0127 | SP8 | NM_198956, ENST00000361443 | 217 | 3767 | 7317 | None |
| Genewiz | TFORF0128 | SP8 | NM_182700, ENST00000418710 | 218 | 3768 | 7318 | None |
| Genewiz | TFORF0129 | SP9 | NM_001145250, ENST00000394967 | 219 | 3769 | 7319 | None |
| Genewiz | TFORF0130 | HMGB3 | NM_001301229, NM_005342, NM_001301228, | 220 | 3770 | 7320 | None |
| | | | ENST00000325307, ENST00000448905 | | | | |
| Genewiz | TFORF0131 | HMGB4 | NM_145205, ENST00000519684, ENST00000522796 | 221 | 3771 | 7321 | None |
| Genewiz | TFORF0132 | FIZ1 | NM_032836, XM_005259352, ENST00000221665 | 222 | 3772 | 7322 | None |
| Genewiz | TFORF0133 | ZNF780A | NM_001142579, ENST00000414720 | 223 | 3773 | 7323 | None |
| Genewiz | TFORF0134 | ZNF780A | XM_011526772, XM_011526771, XM_005258773, | 224 | 3774 | 7324 | None |
| | | | XM_006723150, NM_001142577, ENST00000455521, | | | | |
| | | | ENST00000594395 | | | | |
| Genewiz | TFORF0135 | ZNF780A | XM_017026617, XM_017026618, XM_017026619, | 225 | 3775 | 7325 | None |
| | | | NM_001010880, NM_001142578, ENST00000340963, | | | | |
| | | | ENST00000595687 | | | | |
| Genewiz | TFORF0136 | ZNF780B | NM_001005851, XM_005258593, XM_017026427, | 226 | 3776 | 7326 | None |
| | | | XM_017026426, XM_017026425, ENST00000617676, | | | | |
| | | | ENST00000434248 | | | | |
| Genewiz | TFORF0137 | NFX1 | NM_002504, ENST00000379540 | 227 | 3777 | 7327 | None |
| Genewiz | TFORF0138 | NFX1 | NM_147134, ENST00000318524 | 228 | 3778 | 7328 | None |
| Genewiz | TFORF0139 | UBTF | NM_001076684, NM_001076683, XM_017025004, | 229 | 3779 | 7329 | None |
| | | | XM_017025003, ENST00000343638, ENST00000533177, | | | | |
| | | | ENST00000393606, ENST00000526094 | | | | |
| Genewiz | TFORF0140 | UBTF | NM_014233, XM_006722059, XM_006722061, | 230 | 3780 | 7330 | None |
| | | | XM_006722060, ENST00000302904, ENST00000436088, | | | | |
| | | | ENST00000529383 | | | | |
| Genewiz | TFORF0141 | POU5F1B | NM_001159542, ENST00000465342 | 231 | 3781 | 7331 | None |
| Genewiz | TFORF0142 | FXN | NM_001161706, ENST00000396364 | 232 | 3782 | 7332 | None |
| Genewiz | TFORF0143 | FXN | NM_181425, ENST00000396366 | 233 | 3783 | 7333 | None |
| Genewiz | TFORF0144 | PHOX2A | NM_005169, ENST00000298231 | 234 | 3784 | 7334 | None |
| Genewiz | TFORF0145 | PHOX2B | NM_003924, ENST00000226382 | 235 | 3785 | 7335 | None |
| Genewiz | TFORF0146 | THAP1 | NM_199003, ENST00000345117 | 236 | 3786 | 7336 | None |
| Genewiz | TFORF0147 | SNW1 | NM_001318844, ENST00000555761 | 237 | 3787 | 7337 | None |
| Genewiz | TFORF0148 | THAP4 | NM_001164356, ENST00000402136 | 238 | 3788 | 7338 | None |
| Genewiz | TFORF0149 | THAP4 | NM_015963, ENST00000407315 | 239 | 3789 | 7339 | None |
| Genewiz | TFORF0150 | THAPS | NM_182529, ENST00000313516 | 240 | 3790 | 7340 | None |
| Genewiz | TFORF0151 | THAP5 | NM_001130475, ENST00000415914 | 241 | 3791 | 7341 | None |
| Genewiz | TFORF0152 | THAP6 | NM_001317791, XM_017007800, ENST00000380837 | 242 | 3792 | 7342 | None |
| Genewiz | TFORF0153 | THAP6 | XM_005262774, ENST00000507556 | 243 | 3793 | 7343 | None |
| Genewiz | TFORF0154 | THAP7 | NM_030573, NM_001008695, ENST00000215742, | 244 | 3794 | 7344 | None |
| | | | ENST00000399133 | | | | |
| Genewiz | TFORF0155 | THAP9 | NM_024672, ENST00000302236 | 245 | 3795 | 7345 | None |
| Genewiz | TFORF0156 | EWSR1 | NM_013986, ENST00000414183 | 246 | 3796 | 7346 | None |
| Genewiz | TFORF0157 | EWSR1 | NM_001163286, ENST00000332035 | 247 | 3797 | 7347 | None |
| Genewiz | TFORF0158 | EWSR1 | NM_005243, ENST00000397938 | 248 | 3798 | 7348 | None |
| Genewiz | TFORF0159 | EWSR1 | NM_001163287, ENST00000333395 | 249 | 3799 | 7349 | None |
| Genewiz | TFORF0160 | EWSR1 | NM_001163285, ENST00000406548 | 250 | 3800 | 7350 | None |
| Genewiz | TFORF0161 | MLLT1 | NM_005934, ENST00000252674 | 251 | 3801 | 7351 | None |
| Genewiz | TFORF0162 | PES1 | NM_001282328, NM_001282327, XM_017028678, | 252 | 3802 | 7352 | None |
| | | | ENST00000402281, ENST00000405677 | | | | |
| Genewiz | TFORF0163 | PES1 | NM_001243225, ENST00000335214 | 253 | 3803 | 7353 | None |
| Genewiz | TFORF0164 | SIX4 | NM_017420, ENST00000216513 | 254 | 3804 | 7354 | None |
| Genewiz | TFORF0165 | SIX5 | NM_175875, ENST00000317578 | 255 | 3805 | 7355 | None |
| Genewiz | TFORF0166 | SIX6 | NM_007374, ENST00000327720 | 256 | 3806 | 7356 | None |
| Genewiz | TFORF0167 | SIX1 | NM_005982, ENST00000247182 | 257 | 3807 | 7357 | None |
| Genewiz | TFORF0168 | SIX2 | NM_016932, ENST00000303077 | 258 | 3808 | 7358 | None |
| Genewiz | TFORF0169 | SIX3 | NM_005413, ENST00000260653 | 259 | 3809 | 7359 | None |
| Genewiz | TFORF0170 | ZNF587B | NM_001204818, ENST00000442832 | 260 | 3810 | 7360 | None |
| Genewiz | TFORF0171 | ZFP69 | XM_006710606, NM_198494, NM_001320179, | 261 | 3811 | 7361 | None |
| | | | ENST00000372706, ENST00000372705 | | | | |
| Genewiz | TFORF0172 | ONECUT2 | NM_004852, ENST00000491143 | 262 | 3812 | 7362 | None |
| Genewiz | TFORF0173 | RELB | XM_005259127, ENST00000505236 | 263 | 3813 | 7363 | None |
| Genewiz | TFORF0174 | RELA | NM_021975, ENST00000406246 | 264 | 3814 | 7364 | None |
| Genewiz | TFORF0175 | RELA | NM_001243985, ENST00000612991 | 265 | 3815 | 7365 | None |
| Genewiz | TFORF0176 | RELA | NM_001145138, ENST00000308639 | 266 | 3816 | 7366 | None |
| Genewiz | TFORF0177 | HDGF | NM_001126051, ENST00000368209 | 267 | 3817 | 7367 | None |
| Genewiz | TFORF0178 | HDGF | NM_001126050, ENST00000368206 | 268 | 3818 | 7368 | None |
| Genewiz | TFORF0179 | ZFP62 | NM_152283, XM_017009714, XM_017009712, | 269 | 3819 | 7369 | None |
| | | | XM_017009710, XM_017009715, XM_017009713, | | | | |
| | | | XM_017009711, ENST00000512132 | | | | |
| Genewiz | TFORF0180 | ZFP62 | NM_001172638, XM_017009717, ENST00000502412 | 270 | 3820 | 7370 | None |
| Genewiz | TFORF0181 | ESX1 | NM_153448, ENST00000372588 | 271 | 3821 | 7371 | None |
| Genewiz | TFORF0182 | SHOX2 | NM_006884, ENST00000441443 | 272 | 3822 | 7372 | None |
| Genewiz | TFORF0183 | SHOX2 | NM_001163678, ENST00000483851 | 273 | 3823 | 7373 | None |
| Genewiz | TFORF0184 | SHOX2 | XM_006713728, XM_017007055, ENST00000425436 | 274 | 3824 | 7374 | None |
| Genewiz | TFORF0185 | SHOX2 | NM_003030, ENST00000389589 | 275 | 3825 | 7375 | None |
| Genewiz | TFORF0186 | DMRTC1 | XM_017029725, XM_005262288, XM_005262287, | 276 | 3826 | 7376 | None |
| | | | NM_033053, ENST00000595412 | | | | |
| Genewiz | TFORF0187 | DMRTC2 | XM_017027128, XM_017027126, XM_017027125, | 277 | 3827 | 7377 | None |
| | | | XM_017027127, ENST00000596827 | | | | |
| Genewiz | TFORF0188 | DMRTC2 | NM_001040283, ENST00000269945 | 278 | 3828 | 7378 | None |
| Genewiz | TFORF0189 | RFX8 | NM_001145664, ENST00000428343 | 279 | 3829 | 7379 | None |
| Genewiz | TFORF0190 | RFX4 | NM_213594, ENST00000392842 | 280 | 3830 | 7380 | None |
| Genewiz | TFORF0191 | RFX4 | NM_032491, ENST00000229387 | 281 | 3831 | 7381 | None |
| Genewiz | TFORF0192 | RFX4 | NM_001206691, ENST00000357881 | 282 | 3832 | 7382 | None |
| Genewiz | TFORF0193 | RFX5 | NM_000449, NM_001025603, XM_011509850, | 283 | 3833 | 7383 | None |
| | | | XM_011509848, XM_005245405, XM_011509849, | | | | |
| | | | XM_005245406, XM_011509847, ENST0290524, | | | | |
| | | | ENST00000368870, ENST00000452671 | | | | |
| Genewiz | TFORF0194 | RFX6 | NM_173560, ENST00000332958 | 284 | 3834 | 7384 | None |
| Genewiz | TFORF0195 | RFX7 | XM_017022508, XM_011521925, XM_017022507, | 285 | 3835 | 7385 | None |
| | | | ENST00000559447 | | | | |
| Genewiz | TFORF0196 | ZNF844 | NM_001136501, ENST00000439326 | 286 | 3836 | 7386 | None |
| Genewiz | TFORF0197 | RFX1 | NM_002918, ENST00000254325 | 287 | 3837 | 7387 | None |
| Genewiz | TFORF0198 | RFX2 | NM_134433, ENST00000592546 | 288 | 3838 | 7388 | None |
| Genewiz | TFORF0199 | RFX2 | NM_000635, XM_011528171, ENST00000303657, | 289 | 3839 | 7389 | None |
| | | | ENST00000359161 | | | | |
| Genewiz | TFORF0200 | RFX3 | NM_002919, ENST00000358730 | 290 | 3840 | 7390 | None |
| Genewiz | TFORF0201 | RFX3 | NM_001282117, ENST00000302303 | 291 | 3841 | 7391 | None |
| Genewiz | TFORF0202 | RFX3 | NM_134428, NM_001282116, ENST00000382004, | 292 | 3842 | 7392 | None |
| | | | ENST00000617270 | | | | |
| Genewiz | TFORF0203 | ELK1 | NM_001257168, ENST00000343894 | 293 | 3843 | 7393 | None |
| Genewiz | TFORF0204 | ELK4 | NM_001973, XM_005244950, XM_005244951, | 294 | 3844 | 7394 | None |
| | | | ENST00000616704, ENST00000357992 | | | | |
| Genewiz | TFORF0205 | DBP | NM_001352, ENST00000222122 | 295 | 3845 | 7395 | None |
| Genewiz | TFORF0206 | ETV3L | NM_001004341, ENST00000454449 | 296 | 3846 | 7396 | None |
| Genewiz | TFORF0207 | FOXP2 | NM_148899, ENST00000360232 | 297 | 3847 | 7397 | None |
| Genewiz | TFORF0208 | FOXP2 | NM_014491, ENST00000393494, ENST00000350908 | 298 | 3848 | 7398 | None |
| Genewiz | TFORF0209 | FOXP2 | XM_017012801, NM_148898, ENST00000408937 | 299 | 3849 | 7399 | None |
| Genewiz | TFORF0210 | FOXP2 | NM_148900, ENST00000403559 | 300 | 3850 | 7400 | None |
| Genewiz | TFORF0211 | FOXP3 | XM_006724533, ENST00000455775 | 301 | 3851 | 7401 | None |
| Genewiz | TFORF0212 | FOXP3 | NM_001114377, ENST00000376199, ENST00000518685 | 302 | 3852 | 7402 | None |
| Genewiz | TFORF0213 | FOXP1 | NM_001244813, XM_011533588, ENST00000614176 | 303 | 3853 | 7403 | None |
| Genewiz | TFORF0214 | FOXP1 | NM_001244816, NM_032682, XM_011533585, | 304 | 3854 | 7404 | None |
| | | | XM_006713102, XM_017006165, XM_011533584, | | | | |
| | | | XM_006713103, XM_006713104, XM_017006166, | | | | |
| | | | NM_001244814, ENST00000318789, ENST00000475937, | | | | |
| | | | ENST00000498215 | | | | |
| Genewiz | TFORF0215 | FOXP1 | NM_001244808, ENST00000493089 | 305 | 3855 | 7405 | None |
| Genewiz | TFORF0216 | FOXP1 | NM_001244812, ENST00000484350 | 306 | 3856 | 7406 | None |
| Genewiz | TFORF0217 | FOXP1 | NM_001244815, ENST00000491238 | 307 | 3857 | 7407 | None |
| Genewiz | TFORF0218 | FOXP1 | NM_001244810, ENST00000615603 | 308 | 3858 | 7408 | None |
| Genewiz | TFORF0219 | ADNP | NM_001282532, NM_001282531, NM_015339, | 309 | 3859 | 7409 | None |
| | | | NM_181442, XM_017027758, XM_017027759, | | | | |
| | | | XM_011528747, XM_017027757, ENST00000371602, | | | | |
| | | | ENST00000621696, ENST00000349014, ENST00000396029, | | | | |
| | | | ENST00000396032 | | | | |
| Genewiz | TFORF0220 | FOXP4 | NM_138457, ENST00000373063 | 310 | 3860 | 7410 | None |
| Genewiz | TFORF0221 | FOXP4 | NM_001012427, ENST00000373057 | 311 | 3861 | 7411 | None |
| Genewiz | TFORF0222 | FOXP4 | NM_001012426, ENST00000373060, ENST00000307972 | 312 | 3862 | 7412 | None |
| Genewiz | TFORF0223 | ZNF479 | XM_017012777, XM_011515604, XM_011515608, | 313 | 3863 | 7413 | None |
| | | | NM_033273, ENST00000331162, ENST00000319636 | | | | |
| Genewiz | TFORF0224 | ZNF592 | XM_005254996, XM_017022734, NM_014630, | 314 | 3864 | 7414 | None |
| | | | XM_011522247, XM_011522246, ENST00000560079, | | | | |
| | | | ENST00000299927 | | | | |
| Genewiz | TFORF0225 | ZNF593 | XM_017001398, ENST00000270812 | 315 | 3865 | 7415 | None |
| Genewiz | TFORF0226 | ZNF593 | NM_015871, ENST00000374266 | 316 | 3866 | 7416 | None |
| Genewiz | TFORF0227 | ZNF596 | NM_001287256, NM_001287255, NM_173539, | 317 | 3867 | 7417 | None |
| | | | NM_001042416, NM_001042415, NM_001287254, | | | | |
| | | | XM_017013166, ENST00000320552, ENST00000308811, | | | | |
| | | | ENST00000398612 | | | | |
| Genewiz | TFORF0228 | ZNF594 | NM_032530, XM_005256827, ENST00000399604, | 318 | 3868 | 7418 | None |
| | | | ENST00000575779 | | | | |
| Genewiz | TFORF0229 | ZNF595 | NM_001286052, ENST00000609518 | 319 | 3869 | 7419 | None |
| Genewiz | TFORF0230 | ZNF595 | NM_001286053, NM_001286054, ENST00000608255 | 320 | 3870 | 7420 | None |
| Genewiz | TFORF0231 | ZNF595 | NM_182524, ENST00000610261 | 321 | 3871 | 7421 | None |
| Genewiz | TFORF0232 | ZNF599 | NM_001007248, ENST00000329285 | 322 | 3872 | 7422 | None |
| Genewiz | TFORF0233 | MNX1 | NM_005515, ENST00000252971 | 323 | 3873 | 7423 | None |
| Genewiz | TFORF0234 | MNX1 | NM_001165255, ENST00000543409 | 324 | 3874 | 7424 | None |
| Genewiz | TFORF0235 | MYCN | NM_005378, NM_001293228, XM_017004168, | 325 | 3875 | 7425 | None |
| | | | ENST00000281043 | | | | |
| Genewiz | TFORF0236 | MYCN | NM_001293231, ENST00000638417 | 326 | 3876 | 7426 | None |
| Genewiz | TFORF0237 | ZNF600 | NM_198457, ENST00000338230 | 327 | 3877 | 7427 | None |
| Genewiz | TFORF0238 | MYCL | NM_001033082, ENST00000397332 | 328 | 3878 | 7428 | None |
| Genewiz | TFORF0239 | MYCL | NM_001033081, ENST00000372816 | 329 | 3879 | 7429 | None |
| Genewiz | TFORF0240 | MYCL | NM_005376, ENST00000372815 | 330 | 3880 | 7430 | None |
| Genewiz | TFORF0241 | ZNF606 | NM_025027, XM_005259276, ENST00000341164 | 331 | 3881 | 7431 | None |
| Genewiz | TFORF0242 | ZNF607 | NM_032689, XM_006723435, ENST00000355202 | 332 | 3882 | 7432 | None |
| Genewiz | TFORF0243 | ZNF607 | NM_001172677, XM_006723436, ENST00000395835 | 333 | 3883 | 7433 | None |
| Genewiz | TFORF0244 | SUB1 | XM_017008986, XM_017008987, NM_006713, | 334 | 3884 | 7434 | None |
| | | | XM_011513944, ENST00000506237, ENST00000512913, | | | | |
| | | | ENST00000265073, ENST00000515355, ENST00000502897 | | | | |
| Genewiz | TFORF0245 | CAMTAZ | NM_001171166, ENST00000381311 | 335 | 3885 | 7435 | None |
| Genewiz | TFORF0246 | CAMTA2 | NM_001171167, ENST00000414043 | 336 | 3886 | 7436 | None |
| Genewiz | TFORF0247 | CAMTA2 | XM_006721478, ENST00000572543 | 337 | 3887 | 7437 | None |
| Genewiz | TFORF0248 | CAMTA2 | NM_015099, ENST00000348066 | 338 | 3888 | 7438 | None |
| Genewiz | TFORF0249 | CAMTAZ | NM_001171168, ENST00000361571 | 339 | 3889 | 7439 | None |
| Genewiz | TFORF0250 | VEZF1 | NM_007146, ENST00000581208 | 340 | 3890 | 7440 | None |
| Genewiz | TFORF0251 | VEZF1 | XM_017025018, XM_017025017, ENST00000584396 | 341 | 3891 | 7441 | None |
| Genewiz | TFORF0252 | CAMTA1 | NM_001242701, ENST00000557126 | 342 | 3892 | 7442 | None |
| Genewiz | TFORF0253 | CAMTA1 | NM_015215, ENST00000303635 | 343 | 3893 | 7443 | None |
| Genewiz | TFORF0254 | CAMTA1 | NM_001195563, ENST00000473578 | 344 | 3894 | 7444 | None |
| Genewiz | TFORF0255 | TCF4 | NM_001243228, ENST00000564403 | 345 | 3895 | 7445 | None |
| Genewiz | TFORF0256 | TCF4 | NM_001243233, XM_017025956, ENST00000537856, | 346 | 3896 | 7446 | None |
| | | | ENST00000561992, ENST00000570177 | | | | |
| Genewiz | TFORF0257 | TCF4 | NM_001306208, ENST00000564228 | 347 | 3897 | 7447 | None |
| Genewiz | TFORF0258 | TCF4 | XM_017025949, XM_017025937, XM_017025948, | 348 | 3898 | 7448 | None |
| | | | ENST00000568740 | | | | |
| Genewiz | TFORF0259 | TCF4 | NM_001243236, ENST00000561831 | 349 | 3899 | 7449 | None |
| Genewiz | TFORF0260 | TCF4 | NM_001243226, ENST00000398339 | 350 | 3900 | 7450 | None |
| Genewiz | TFORF0261 | TCF4 | NM_001243234, ENST00000457482 | 351 | 3901 | 7451 | None |
| Genewiz | TFORF0262 | TCF4 | NM_001306207, XM_017025947, XM_017025936, | 352 | 3902 | 7452 | None |
| | | | XM_017025946, ENST00000540999 | | | | |
| Genewiz | TFORF0263 | TCF4 | XM_011526160, XM_005266754, XM_005266755, | 353 | 3903 | 7453 | None |
| | | | XM_005266752, ENST00000636822 | | | | |
| Genewiz | TFORF0264 | TCF4 | NM_001243227, XM_005266744, XM_005266743, | 354 | 3904 | 7454 | None |
| | | | XM_005266739, ENST00000636400, ENST00000568673, | | | | |
| | | | ENST00000537578 | | | | |
| Genewiz | TFORF0265 | TCF4 | NM_001243232, ENST00000544241 | 355 | 3905 | 7455 | None |
| Genewiz | TFORF0266 | TCF4 | NM_001243231, ENST00000543082 | 356 | 3906 | 7456 | None |
| Genewiz | TFORF0267 | TCF4 | XM_017025939, ENST00000638154 | 357 | 3907 | 7457 | None |
| Genewiz | TFORF0268 | TCF4 | NM_001243235, ENST00000570287 | 358 | 3908 | 7458 | None |
| Genewiz | TFORF0269 | TCF4 | NM_001243230, ENST00000566286 | 359 | 3909 | 7459 | None |
| Genewiz | TFORF0270 | TCF7 | NM_201632, NM_213648, ENST00000520958, | 360 | 3910 | 7460 | None |
| | | | ENST00000395023 | | | | |
| Genewiz | TFORF0271 | TCF7 | NM_001134851, ENST00000518915 | 361 | 3911 | 7461 | None |
| Genewiz | TFORF0272 | TCF7 | NM_201634, ENST00000378560 | 362 | 3912 | 7462 | None |
| Genewiz | TFORF0273 | TCF3 | XM_011528221, XM_006722857, XM_006722858, | 363 | 3913 | 7463 | None |
| | | | ENST00000453954 | | | | |
| Genewiz | TFORF0274 | TCF3 | XM_017027180, ENST00000395423 | 364 | 3914 | 7464 | None |
| Genewiz | TFORF0275 | TCF3 | NM_003200, XM_017027181, ENST00000262965, | 365 | 3915 | 7465 | None |
| | | | ENST00000611869 | | | | |
| Genewiz | TFORF0276 | TCF3 | NM_001136139, XM_017027182, ENST00000588136 | 366 | 3916 | 7466 | None |
| Genewiz | TFORF0277 | TCF3 | XM_011528227, ENST00000344749 | 367 | 3917 | 7467 | None |
| Genewiz | TFORF0278 | ARID2 | NM_152641, ENST00000334344 | 368 | 3918 | 7468 | None |
| Genewiz | TFORF0279 | ZNF776 | NM_173632, ENST00000317178 | 369 | 3919 | 7469 | None |
| Genewiz | TFORF0280 | IGFBP1 | NM_000596, ENST00000275525 | 370 | 3920 | 7470 | None |
| Genewiz | TFORF0281 | ZNF90 | NM_007138, ENST00000418063 | 371 | 3921 | 7471 | None |
| Genewiz | TFORF0282 | MEF2C | NM_002397, NM_001193350, XM_005248511, | 372 | 3922 | 7472 | None |
| | | | XM_011543396, XM_006714619, ENST00000504921, | | | | |
| | | | ENST00000437473, ENST00000636294 | | | | |
| Genewiz | TFORF0283 | MEF2C | XM_011543401, XM_017009482, ENST00000510942 | 373 | 3923 | 7473 | None |
| Genewiz | TFORF0284 | MEF2C | XM_017009483, ENST00000627659 | 374 | 3924 | 7474 | None |
| Genewiz | TFORF0285 | MEF2C | NM_001131005, XM_017009478, ENST00000424173, | 375 | 3925 | 7475 | None |
| | | | ENST00000625674 | | | | |
| Genewiz | TFORF0286 | MEF2C | NM_001193348, ENST00000628656 | 376 | 3926 | 7476 | None |
| Genewiz | TFORF0287 | MEF2C | XM_011543397, XM_017009475, ENST00000625585 | 377 | 3927 | 7477 | None |
| Genewiz | TFORF0288 | MEF2C | NM_001308002, XM_017009477, XM_017009476, | 378 | 3928 | 7478 | None |
| | | | ENST00000629612, ENST00000508569 | | | | |
| Genewiz | TFORF0289 | MEF2C | NM_001193349, ENST00000626391 | 379 | 3929 | 7479 | None |
| Genewiz | TFORF0290 | MEF2C | XM_011543400, XM_017009479, XM_017009481, | 380 | 3930 | 7480 | None |
| | | | XM_017009480, ENST00000636998, ENST00000514028, | | | | |
| | | | ENST00000637732, ENST00000514015 | | | | |
| Genewiz | TFORF0291 | MEF2C | NM_001193347, XM_006714625, ENST00000340208 | 381 | 3931 | 7481 | None |
| Genewiz | TFORF0292 | MEF2B | NM_001145785, ENST00000424583 | 382 | 3932 | 7482 | None |
| Genewiz | TFORF0293 | MEF2A | XM_011521586, NM_001130927, ENST00000558812 | 383 | 3933 | 7483 | None |
| Genewiz | TFORF0294 | MEF2A | XM_005254915, NM_001130926, NM_001171894, | 384 | 3934 | 7484 | None |
| | | | ENST00000338042, ENST00000557785 | | | | |
| Genewiz | TFORF0295 | MEF2A | NM_001319206, XM_011521583, ENST00000557942 | 385 | 3935 | 7485 | None |
| Genewiz | TFORF0296 | MEF2A | XM_011521587, NM_001130928, ENST00000449277 | 386 | 3936 | 7486 | None |
| Genewiz | TFORF0297 | CREM | NM_182720, ENST00000356917 | 387 | 3937 | 7487 | None |
| Genewiz | TFORF0298 | CREM | NM_182717, ENST00000473940 | 388 | 3938 | 7488 | None |
| Genewiz | TFORF0299 | CREM | NM_001267570, ENST00000468236 | 389 | 3939 | 7489 | None |
| Genewiz | TFORF0300 | CREM | XM_017015722, NM_183060, ENST00000374728, | 390 | 3940 | 7490 | None |
| | | | ENST00000348787 | | | | |
| Genewiz | TFORF0301 | CREM | XM_006717378, NM_181571, ENST00000345491 | 391 | 3941 | 7491 | None |
| Genewiz | TFORF0302 | CREM | NM_182718, ENST00000488328 | 392 | 3942 | 7492 | None |
| Genewiz | TFORF0303 | CREM | NM_182769, ENST00000342105 | 393 | 3943 | 7493 | None |
| Genewiz | TFORF0304 | CREM | NM_182719, ENST00000487763 | 394 | 3944 | 7494 | None |
| Genewiz | TFORF0305 | CREM | NM_182721, ENST00000474931 | 395 | 3945 | 7495 | None |
| Genewiz | TFORF0306 | CREM | NM_001267564, ENST00000395887 | 396 | 3946 | 7496 | None |
| Genewiz | TFORF0307 | CREM | NM_182771, ENST00000361599 | 397 | 3947 | 7497 | None |
| Genewiz | TFORF0308 | CREM | XM_006717383, NM_183012, ENST00000374734 | 398 | 3948 | 7498 | None |
| Genewiz | TFORF0309 | CREM | NM_182724, ENST00000490511 | 399 | 3949 | 7499 | None |
| Genewiz | TFORF0310 | CREM | NM_183013, ENST00000354759, ENST00000439705 | 400 | 3950 | 7500 | None |
| Genewiz | TFORF0311 | CREM | XM_011519324, XM_011519325, ENST00000479070 | 401 | 3951 | 7501 | None |
| Genewiz | TFORF0312 | CREM | XM_006717379, NM_183011, ENST00000337656 | 402 | 3952 | 7502 | None |
| Genewiz | TFORF0313 | CREM | NM_001267567, ENST00000463314 | 403 | 3953 | 7503 | None |
| Genewiz | TFORF0314 | CREM | NM_001881, ENST00000374726, ENST00000489321 | 404 | 3954 | 7504 | None |
| Genewiz | TFORF0315 | CREM | NM_182723, ENST00000488741 | 405 | 3955 | 7505 | None |
| Genewiz | TFORF0316 | MEF2D | XM_006711333, NM_001271629, XM_017001314, | 406 | 3956 | 7506 | None |
| | | | XM_017001315, ENST00000360595 | | | | |
| Genewiz | TFORF0317 | MEF2D | XM_006711334, ENST00000464356 | 407 | 3957 | 7507 | None |
| Genewiz | TFORF0318 | ZNF117 | NM_015852, ENST00000282869, ENST00000620222 | 408 | 3958 | 7508 | None |
| Genewiz | TFORF0319 | MSLN | XM_017022857, XM_011522348, NM_013404, | 409 | 3959 | 7509 | None |
| | | | ENST00000382862 | | | | |
| Genewiz | TFORF0320 | MSLN | NM_001177355, NM_005823, ENST00000563941, | 410 | 3960 | 7510 | None |
| | | | ENST00000545450, ENST00000566549 | | | | |
| Genewiz | TFORF0321 | ZNF112 | NM_001083335, ENST00000337401 | 411 | 3961 | 7511 | None |
| Genewiz | TFORF0322 | ZNF112 | NM_013380, ENST00000354340 | 412 | 3962 | 7512 | None |
| Genewiz | TFORF0323 | LCORL | XM_011513822, ENST00000635767 | 413 | 3963 | 7513 | None |
| Genewiz | TFORF0324 | LCORL | NM_153686, ENST00000326877 | 414 | 3964 | 7514 | None |
| Genewiz | TFORF0325 | LCORL | NM_001166139, ENST00000382226 | 415 | 3965 | 7515 | None |
| Genewiz | TFORF0326 | ZNF337 | NM_015655, XM_006723558, XM_011529219, | 416 | 3966 | 7516 | None |
| | | | NM_001290261, ENST00000376436, ENST00000252979 | | | | |
| Genewiz | TFORF0327 | ZNF334 | XM_011528892, XM_017027934, ENST00000593880 | 417 | 3967 | 7517 | None |
| Genewiz | TFORF0328 | ZNF334 | XM_017027938, NM_018102, XM_017027936, | 418 | 3968 | 7518 | None |
| | | | ENST00000347606 | | | | |
| Genewiz | TFORF0329 | ZNF334 | XM_017027944, ENST00000457685 | 419 | 3969 | 7519 | None |
| Genewiz | TFORF0330 | ZNF334 | NM_001270497, XM_011528897, XM_017027941, | 420 | 3970 | 7520 | None |
| | | | XM_017027939, XM_017027940, ENST00000615481, | | | | |
| | | | ENST00000625284 | | | | |
| Genewiz | TFORF0331 | ZNF335 | NM_022095, ENST00000322927 | 421 | 3971 | 7521 | None |
| Genewiz | TFORF0332 | ZNF333 | NM_001300912, ENST00000540689 | 422 | 3972 | 7522 | None |
| Genewiz | TFORF0333 | ZNF333 | XM_011528362, NM_032433, XM_017027367, | 423 | 3973 | 7523 | None |
| | | | ENST00000292530 | | | | |
| Genewiz | TFORF0334 | ZNF331 | XM_017026937, XM_017026936, XM_011527078, | 424 | 3974 | 7524 | None |
| | | | XM_011527076, NM_001317120, NM_018555, | | | | |
| | | | XM_017026939, XM_017026938, NM_001317114, | | | | |
| | | | NM_001317113, NM_001079906, NM_001317115, | | | | |
| | | | NM_001253799, NM_001253798, XM_017026940, | | | | |
| | | | NM_001253800, NM_001253801, NM_001317117, | | | | |
| | | | NM_001317116, NM_001317118, NM_001317121, | | | | |
| | | | NM_001317119, NM_001079907, ENST00000253144, | | | | |
| | | | ENST00000511593, ENST00000449416, ENST00000411977, | | | | |
| | | | ENST00000511154, ENST0513999, ENST00000512387 | | | | |
| Genewiz | TFORF0335 | ZNF91 | NM_001300951, ENST00000397082 | 425 | 3975 | 7525 | None |
| Genewiz | TFORF0336 | ZNF91 | NM_003430, ENST00000300619 | 426 | 3976 | 7526 | None |
| Genewiz | TFORF0337 | MECOM | NM_001205194, NM_005241, NM_001105078, | 427 | 3977 | 7527 | None |
| | | | XM_005247223, ENST00000628990, ENST00000468789 | | | | |
| Genewiz | TFORF0338 | MECOM | NM_001105077, XM_017005874, ENST00000264674 | 428 | 3978 | 7528 | None |
| Genewiz | TFORF0339 | MECOM | NM_001164000, XM_017005875, ENST00000464456 | 429 | 3979 | 7529 | None |
| Genewiz | TFORF0340 | MECOM | XM_005247220, XM_005247221, XM_005247219, | 430 | 3980 | 7530 | None |
| | | | ENST00000472280, ENST00000433243 | | | | |
| Genewiz | TFORF0341 | MECOM | XM_005247215, ENST00000494292 | 431 | 3981 | 7531 | None |
| Genewiz | TFORF0342 | ETF1 | NM_001256302, NM_001291975, NM_001291974, | 432 | 3982 | 7532 | None |
| | | | XM_005271921, ENST00000499810 | | | | |
| Genewiz | TFORF0343 | ETF1 | NM_004730, ENST00000360541 | 433 | 3983 | 7533 | None |
| Genewiz | TFORF0344 | ETF1 | NM_001282185, ENST00000503014 | 434 | 3984 | 7534 | None |
| Genewiz | TFORF0345 | MYT1L | NM_015025, XM_017003614, XM_017003613, | 435 | 3985 | 7535 | None |
| | | | ENST00000428368 | | | | |
| Genewiz | TFORF0346 | MYT1L | NM_001303052, XM_017003609, XM_017003610, | 436 | 3986 | 7536 | None |
| | | | ENST00000399161 | | | | |
| Genewiz | TFORF0347 | FOXB1 | NM_012182, ENST00000396057 | 437 | 3987 | 7537 | None |
| Genewiz | TFORF0348 | FOXB2 | NM_001013735, ENST00000376708 | 438 | 3988 | 7538 | None |
| Genewiz | TFORF0349 | ZNF48 | NM_001214907, ENST00000622647 | 439 | 3989 | 7539 | None |
| Genewiz | TFORF0350 | ZNF48 | NM_001214906, NM_001214909, NM_152652, | 440 | 3990 | 7540 | None |
| | | | ENST00000613509, ENST00000320159 | | | | |
| Genewiz | TFORF0351 | FOXL2 | NM_023067, ENST00000330315 | 441 | 3991 | 7541 | None |
| Genewiz | TFORF0352 | FOXL1 | NM_005250, ENST00000320241 | 442 | 3992 | 7542 | None |
| Genewiz | TFORF0353 | ZNF33B | NM_006955, ENST00000359467 | 443 | 3993 | 7543 | None |
| Genewiz | TFORF0354 | ZNF33A | NM_001278170, ENST00000628825 | 444 | 3994 | 7544 | None |
| Genewiz | TFORF0355 | ZNF33A | XM_011519650, NM_006954, ENST00000432900 | 445 | 3995 | 7545 | None |
| Genewiz | TFORF0356 | ZNF33A | XM_011519651, NM_006974, ENST00000458705 | 446 | 3996 | 7546 | None |
| Genewiz | TFORF0357 | ZNF33A | NM_001278173, ENST00000307441 | 447 | 3997 | 7547 | None |
| Genewiz | TFORF0358 | ZNF33A | NM_001324175, NM_001278174, NM_001278179, | 448 | 3998 | 7548 | None |
| | | | NM_001278171, NM_001324176, NM_001278178, | | | | |
| | | | NM_001324177, ENST00000374618 | | | | |
| Genewiz | TFORF0359 | TUB | NM_003320, ENST00000305253 | 449 | 3999 | 7549 | None |
| Genewiz | TFORF0360 | TUB | NM_177972, ENST00000299506 | 450 | 4000 | 7550 | None |
| Genewiz | TFORF0361 | TCEB3 | NM_003198, ENST00000418390, ENST00000613537 | 451 | 4001 | 7551 | None |
| Genewiz | TFORF0362 | TCEB2 | NM_207013, ENST00000262306 | 452 | 4002 | 7552 | None |
| Genewiz | TFORF0363 | TCEB2 | NM_007108, ENST00000409906 | 453 | 4003 | 7553 | None |
| Genewiz | TFORF0364 | TCEB1 | NM_001204861, NM_001204862, NM_001204858, | 454 | 4004 | 7554 | None |
| | | | NM_001204859, NM_005648, NM_001204860, | | | | |
| | | | NM_001204857, XM_011517580, XM_011517581, | | | | |
| | | | ENST00000518127, ENST00000622804, ENST00000520242, | | | | |
| | | | ENST00000519487, ENST00000284811, ENST00000522337, | | | | |
| | | | ENST00000523815 | | | | |
| Genewiz | TFORF0365 | TCEB1 | NM_001204863, NM_001204864, ENST00000520210 | 455 | 4005 | 7555 | None |
| Genewiz | TFORF0366 | NFYC | XM_017001365, XM_005270894, XM_011541516, | 456 | 4006 | 7556 | None |
| | | | XM_005270895, NM_001308114, ENST00000308733 | | | | |
| Genewiz | TFORF0367 | NFYC | XM_006710661, NM_001308115, XM_006710658, | 457 | 4007 | 7557 | None |
| | | | ENST00000372652 | | | | |
| Genewiz | TFORF0368 | NFYC | NM_001142589, ENST00000427410 | 458 | 4008 | 7558 | None |
| Genewiz | TFORF0369 | NFYC | NM_001142587, ENST00000456393 | 459 | 4009 | 7559 | None |
| Genewiz | TFORF0370 | NFYC | NM_001142588, XM_017001367, XM_006710660, | 460 | 4010 | 7560 | None |
| | | | ENST00000425457 | | | | |
| Genewiz | TFORF0371 | NFYC | NM_001142590, ENST00000372653 | 461 | 4011 | 7561 | None |
| Genewiz | TFORF0372 | NFYB | NM_006166, ENST00000240055, ENST00000551727 | 462 | 4012 | 7562 | None |
| Genewiz | TFORF0373 | NFYA | NM_002505, ENST00000341376 | 463 | 4013 | 7563 | None |
| Genewiz | TFORF0374 | NFYA | NM_021705, ENST00000353205 | 464 | 4014 | 7564 | None |
| Genewiz | TFORF0375 | MYBL1 | NM_001080416, ENST00000522677 | 465 | 4015 | 7565 | None |
| Genewiz | TFORF0376 | SMARCA1 | NM_001282875, ENST00000371123 | 466 | 4016 | 7566 | None |
| Genewiz | TFORF0377 | SMARCA1 | NM_001282874, ENST00000371121 | 467 | 4017 | 7567 | None |
| Genewiz | TFORF0378 | SMARCA1 | NM_003069, XM_005262461, ENST00000371122 | 468 | 4018 | 7568 | None |
| Genewiz | TFORF0379 | SMARCA2 | NM_001289400, ENST00000302401 | 469 | 4019 | 7569 | None |
| Genewiz | TFORF0380 | SMARCA2 | NM_001289399, ENST00000382185, ENST00000417599 | 470 | 4020 | 7570 | None |
| Genewiz | TFORF0381 | SMARCA2 | NM_139045, ENST00000357248, ENST00000382194 | 471 | 4021 | 7571 | None |
| Genewiz | TFORF0382 | SMARCA2 | NM_001289397, ENST00000450198 | 472 | 4022 | 7572 | None |
| Genewiz | TFORF0383 | SMARCA2 | NM_001289398, ENST00000324954 | 473 | 4023 | 7573 | None |
| Genewiz | TFORF0384 | SMARCA2 | NM_003070, NM_001289396, ENST00000349721, | 474 | 4024 | 7574 | None |
| | | | ENST00000382203 | | | | |
| Genewiz | TFORF0385 | SMARCA4 | XM_017027167, NM_001128847, ENST00000590574 | 475 | 4025 | 7575 | None |
| Genewiz | TFORF0386 | SMARCA4 | XM_017027168, NM_001128848, ENST00000444061 | 476 | 4026 | 7576 | None |
| Genewiz | TFORF0387 | SMARCA4 | XM_017027165, NM_001128845, ENST00000541122 | 477 | 4027 | 7577 | None |
| Genewiz | TFORF0388 | SMARCA4 | XM_006722845, XM_011528198, NM_001128849, | 478 | 4028 | 7578 | None |
| | | | XM_006722846, ENST00000450717 | | | | |
| Genewiz | TFORF0389 | SMARCA4 | NM_003072, NM_001128844, ENST00000344626, | 479 | 4029 | 7579 | None |
| | | | ENST00000429416 | | | | |
| Genewiz | TFORF0390 | SMARCA4 | XM_017027166, NM_001128846, ENST00000589677 | 480 | 4030 | 7580 | None |
| Genewiz | TFORF0391 | FERD3L | NM_152898, ENST00000275461 | 481 | 4031 | 7581 | None |
| Genewiz | TFORF0392 | ZNF7 | NM_003416, XM_011517293, XM_011517294, | 482 | 4032 | 7582 | None |
| | | | ENST00000528372 | | | | |
| Genewiz | TFORF0393 | ZNF7 | NM_001282795, XM_011517292, ENST00000446747 | 483 | 4033 | 7583 | None |
| Genewiz | TFORF0394 | ZNF7 | XM_017013817, ENST00000325217 | 484 | 4034 | 7584 | None |
| Genewiz | TFORF0395 | ZNF7 | NM_001282796, ENST00000525266 | 485 | 4035 | 7585 | None |
| Genewiz | TFORF0396 | ZNF7 | NM_001282797, XM_011517297, XM_006716654, | 486 | 4036 | 7586 | None |
| | | | XM_006716656, ENST00000544249 | | | | |
| Genewiz | TFORF0397 | ZNF2 | NM_001291604, ENST00000611463 | 487 | 4037 | 7587 | None |
| Genewiz | TFORF0398 | ZNF2 | NM_001291605, ENST00000611147 | 488 | 4038 | 7588 | None |
| Genewiz | TFORF0399 | ZNF2 | NM_001017396, ENST00000617923 | 489 | 4039 | 7589 | None |
| Genewiz | TFORF0400 | ZNF2 | NM_001282398, ENST00000622059 | 490 | 4040 | 7590 | None |
| Genewiz | TFORF0401 | ZNF2 | NM_021088, ENST00000614034 | 491 | 4041 | 7591 | None |
| Genewiz | TFORF0402 | ZNF3 | NM_017715, ENST00000413658 | 492 | 4042 | 7592 | None |
| Genewiz | TFORF0403 | ZNF3 | NM_032924, NM_001318135, NM_001278290, | 493 | 4043 | 7593 | None |
| | | | NM_001278284, NM_001278287, ENST00000424697, | | | | |
| | | | ENST00000303915, ENST00000299667 | | | | |
| Genewiz | TFORF0404 | CTCFL | NM_001269043, ENST00000423479 | 494 | 4044 | 7594 | None |
| Genewiz | TFORF0405 | CTCFL | NM_001269041, NM_080618, NM_001269040, | 495 | 4045 | 7595 | None |
| | | | ENST00000608263, ENST00000609232, ENST00000243914, | | | | |
| | | | ENST00000371196 | | | | |
| Genewiz | TFORF0406 | CTCFL | NM_001269052, NM_001269051, ENST00000608158, | 496 | 4046 | 7596 | None |
| | | | ENST00000481655 | | | | |
| Genewiz | TFORF0407 | CTCFL | NM_001269049, ENST00000433949 | 497 | 4047 | 7597 | None |
| Genewiz | TFORF0408 | CTCFL | NM_001269048, ENST00000432255 | 498 | 4048 | 7598 | None |
| Genewiz | TFORF0409 | CTCFL | NM_001269046, ENST00000429804 | 499 | 4049 | 7599 | None |
| Genewiz | TFORF0410 | CTCFL | NM_001269055, ENST00000608903 | 500 | 4050 | 7600 | None |
| Genewiz | TFORF0411 | CTCFL | NM_001269054, ENST00000502686 | 501 | 4051 | 7601 | None |
| Genewiz | TFORF0412 | CTCFL | NM_001269044, ENST00000608440 | 502 | 4052 | 7602 | None |
| Genewiz | TFORF0413 | CTCFL | NM_001269045, ENST00000608425 | 503 | 4053 | 7603 | None |
| Genewiz | TFORF0414 | CTCFL | NM_001269050, ENST00000539382 | 504 | 4054 | 7604 | None |
| Genewiz | TFORF0415 | CTCFL | NM_001269047, ENST00000422869 | 505 | 4055 | 7605 | None |
| Genewiz | TFORF0416 | ZNF559- | NM_001202425, ENST00000446085, ENST00000602856 | 506 | 4056 | 7606 | None |
| | | ZNF177 | | | | | |
| Genewiz | TFORF0417 | SULT2A1 | NM_003167, ENST00000222002 | 507 | 4057 | 7607 | None |
| Genewiz | TFORF0418 | CDC5L | NM_001253, ENST00000371477 | 508 | 4058 | 7608 | None |
| Genewiz | TFORF0419 | SKIL | NM_001145098, ENST00000426052 | 509 | 4059 | 7609 | None |
| Genewiz | TFORF0420 | SKIL | NM_001145097, ENST00000413427 | 510 | 4060 | 7610 | None |
| Genewiz | TFORF0421 | SKIL | XM_006713735, NM_005414, XM_005247721, | 511 | 4061 | 7611 | None |
| | | | NM_001248008, ENST00000259119, ENST00000458537 | | | | |
| Genewiz | TFORF0422 | PBX2 | NM_002586, ENST00000375050 | 512 | 4062 | 7612 | None |
| Genewiz | TFORF0423 | PBX3 | NM_001134778, ENST00000447726 | 513 | 4063 | 7613 | None |
| Genewiz | TFORF0424 | PBX3 | NM_006195, ENST00000373489 | 514 | 4064 | 7614 | None |
| Genewiz | TFORF0425 | PBX3 | XM_006717132, ENST00000342287 | 515 | 4065 | 7615 | None |
| Genewiz | TFORF0426 | PBX3 | XM_006717130, ENST00000373487 | 516 | 4066 | 7616 | None |
| Genewiz | TFORF0427 | PBX1 | NM_002585, XM_005245229, ENST00000420696 | 517 | 4067 | 7617 | None |
| Genewiz | TFORF0428 | PBX1 | NM_001204963, ENST00000627490 | 518 | 4068 | 7618 | None |
| Genewiz | TFORF0429 | PBX1 | NM_001204961, XM_017001396, ENST00000367897 | 519 | 4069 | 7619 | None |
| Genewiz | TFORF0430 | ZNF883 | NM_001101338, ENST00000619044 | 520 | 4070 | 7620 | None |
| Genewiz | TFORF0431 | AIRE | NM_000383, ENST00000291582 | 521 | 4071 | 7621 | None |
| Genewiz | TFORF0432 | ARHGAP35 | XM_017026714, NM_004491, ENST00000614079, | 522 | 4072 | 7622 | None |
| | | | ENST00000404338 | | | | |
| Genewiz | TFORF0433 | ZSCAN32 | NM_001324340, NM_001324342, NM_001324344, | 523 | 4073 | 7623 | None |
| | | | NM_001324341, NM_001324345, NM_017810, | | | | |
| | | | ENST00000304926 | | | | |
| Genewiz | TFORF0434 | ZSCAN32 | NM_001284527, XM_011522555, XM_017023371, | 524 | 4074 | 7624 | None |
| | | | ENST00000396846, ENST00000396852 | | | | |
| Genewiz | TFORF0435 | ZSCAN32 | NM_001284528, NM_001284529, ENST00000618425, | 525 | 4075 | 7625 | None |
| | | | ENST00000439568 | | | | |
| Genewiz | TFORF0436 | ZSCAN31 | NM_001135216, NM_030899, NM_001243241, | 526 | 4076 | 7626 | None |
| | | | NM_145909, NM_001135215, XM_011514809, | | | | |
| | | | XM_011514811, XM_011514813, XM_011514812, | | | | |
| | | | XM_005249295, XM_011514807, XM_017011196, | | | | |
| | | | XM_005249296, XM_011514808, ENST00000439158, | | | | |
| | | | ENST00000396838, ENST00000414429, ENST00000344279 | | | | |
| Genewiz | TFORF0437 | ZSCAN31 | NM_001243243, NM_001243242, NM_001243244, | 527 | 4077 | 7627 | None |
| | | | ENST00000611469, ENST00000446474 | | | | |
| Genewiz | TFORF0438 | ZSCAN30 | NM_001166012, NM_001112734, XM_006722371, | 528 | 4078 | 7628 | None |
| | | | XM_017025515, XM_005258183, ENST00000333206, | | | | |
| | | | ENST00000420878 | | | | |
| Genewiz | TFORF0439 | ZSCAN30 | NM_001288711, XM_011525789, XM_017025522, | 529 | 4079 | 7629 | None |
| | | | XM_017025519, XM_017025520, XM_017025521, | | | | |
| | | | ENST00000610712 | | | | |
| Genewiz | TFORF0440 | ZFY | NM_001145276, ENST00000625061 | 530 | 4080 | 7630 | None |
| Genewiz | TFORF0441 | ZEY | XM_005262570, XM_017030075, NM_003411, | 531 | 4081 | 7631 | None |
| | | | ENST00000383052, ENST00000155093 | | | | |
| Genewiz | TFORF0442 | ZFX | XM_011545578, XM_017029792, XM_017029791, | 532 | 4082 | 7632 | None |
| | | | XM_017029790, XM_006724513, XM_017029789, | | | | |
| | | | XM_017029788, XM_017029793, ENST00000379188 | | | | |
| Genewiz | TFORF0443 | ZFX | NM_001178086, ENST00000539115 | 533 | 4083 | 7633 | None |
| Genewiz | TFORF0444 | ZFX | XM_005274592, XM_011545581, XM_005274591, | 534 | 4084 | 7634 | None |
| | | | NM_001178084, NM_001178085, NM_003410, | | | | |
| | | | XM_017029794, XM_011545579, XM_017029795, | | | | |
| | | | ENST00000379177, ENST00000304543 | | | | |
| Genewiz | TFORF0445 | ZNF805 | NM_001145078, ENST00000354309 | 535 | 4085 | 7635 | None |
| Genewiz | TFORF0446 | ZNF805 | NM_001023563, ENST00000414468 | 536 | 4086 | 7636 | None |
| Genewiz | TFORF0447 | TOPORS | NM_001195622, ENST00000379858 | 537 | 4087 | 7637 | None |
| Genewiz | TFORF0448 | TOPORS | NM_005802, ENST00000360538 | 538 | 4088 | 7638 | None |
| Genewiz | TFORF0449 | DNMT1 | NM_001130823, ENST00000359526 | 539 | 4089 | 7639 | None |
| Genewiz | TFORF0450 | DNMT1 | NM_001379, ENST00000340748 | 540 | 4090 | 7640 | None |
| Genewiz | TFORF0451 | THRA | NM_199334, ENST00000450525, ENST00000546243 | 541 | 4091 | 7641 | None |
| Genewiz | TFORF0452 | THRA | NM_001190918, ENST00000584985 | 542 | 4092 | 7642 | None |
| Genewiz | TFORF0453 | THRA | NM_001190919, NM_003250, ENST00000394121, | 543 | 4093 | 7643 | None |
| | | | ENST00000264637 | | | | |
| Genewiz | TFORF0454 | TAF4B | NM_005640, ENST00000269142 | 544 | 4094 | 7644 | None |
| Genewiz | TFORF0455 | TAF4B | NM_001293725, ENST00000578121 | 545 | 4095 | 7645 | None |
| Genewiz | TFORF0456 | HOXD9 | NM_014213, ENST00000249499 | 546 | 4096 | 7646 | None |
| Genewiz | TFORF0457 | TRIM24 | NM_015905, ENST00000343526 | 547 | 4097 | 7647 | None |
| Genewiz | TFORF0458 | TRIM24 | NM_003852, ENST00000415680 | 548 | 4098 | 7648 | None |
| Genewiz | TFORF0459 | CREB5 | NM_182899, ENST00000396299, ENST00000409603 | 549 | 4099 | 7649 | None |
| Genewiz | TFORF0460 | CREB5 | XM_017012808, NM_182898, ENST00000357727 | 550 | 4100 | 7650 | None |
| Genewiz | TFORF0461 | CREB5 | XM_005249906, XM_017012806, NM_004904, | 551 | 4101 | 7651 | None |
| | | | ENST00000396300 | | | | |
| Genewiz | TFORF0462 | CREB5 | NM_001011666, ENST00000396298 | 552 | 4102 | 7652 | None |
| Genewiz | TFORF0463 | HOXD1 | NM_024501, ENST00000331462 | 553 | 4103 | 7653 | None |
| Genewiz | TFORF0464 | TRIM22 | NM_006074, ENST00000379965 | 554 | 4104 | 7654 | None |
| Genewiz | TFORF0465 | NKX1-1 | NM_001290079 | 555 | 4105 | 7655 | None |
| Genewiz | TFORF0466 | SLC15A1 | NM_005073, ENST00000376503 | 556 | 4106 | 7656 | None |
| Genewiz | TFORF0467 | CARHSP1 | NM_001278265, NM_001278262, NM_001278266, | 557 | 4107 | 7657 | None |
| | | | NM_001278264, NM_001278263, NM_001042476, | | | | |
| | | | NM_001278261, NM_001278260, NM_014316, | | | | |
| | | | XM_005255229, XM_011522444, ENST00000396593, | | | | |
| | | | ENST0610831, ENST00000614449, ENST00000619881, | | | | |
| | | | ENST00000618335, ENST00000611932, ENST00000311052, | | | | |
| | | | ENST00000561530, ENST00000567554 | | | | |
| Genewiz | TFORF0468 | KAT7 | NM_001199158, ENST00000510819 | 558 | 4108 | 7658 | None |
| Genewiz | TFORF0469 | KAT7 | NM_001199157, ENST00000509773 | 559 | 4109 | 7659 | None |
| Genewiz | TFORF0470 | KAT7 | NM_001199155, ENST00000424009 | 560 | 4110 | 7660 | None |
| Genewiz | TFORF0471 | KAT7 | NM_001199156, ENST00000454930 | 561 | 4111 | 7661 | None |
| Genewiz | TFORF0472 | ZNF221 | XM_017027232, NM_001297588, NM_001297589, | 562 | 4112 | 7662 | None |
| | | | NM_013359, ENST00000587682, ENST00000251269, | | | | |
| | | | ENST00000592350, ENST00000622072 | | | | |
| Genewiz | TFORF0473 | SP140 | NM_001278452, ENST00000343805 | 563 | 4113 | 7663 | None |
| Genewiz | TFORF0474 | SP140 | NM_007237, ENST00000392045 | 564 | 4114 | 7664 | None |
| Genewiz | TFORF0475 | SP140 | NM_001005176, ENST00000373645 | 565 | 4115 | 7665 | None |
| Genewiz | TFORF0476 | SP140 | NM_001278453, ENST00000417495 | 566 | 4116 | 7666 | None |
| Genewiz | TFORF0477 | SP140 | NM_001278451, ENST00000420434 | 567 | 4117 | 7667 | None |
| Genewiz | TFORF0478 | ZNF222 | NM_013360, ENST00000187879 | 568 | 4118 | 7668 | None |
| Genewiz | TFORF0479 | ZNF222 | NM_001129996, ENST00000391960 | 569 | 4119 | 7669 | None |
| Genewiz | TFORF0480 | HIF1A | NM_001243084, ENST00000539097 | 570 | 4120 | 7670 | None |
| Genewiz | TFORF0481 | HIF1A | NM_181054, ENST00000323441 | 571 | 4121 | 7671 | None |
| Genewiz | TFORF0482 | DMRTB1 | NM_033067, ENST00000371445 | 572 | 4122 | 7672 | None |
| Genewiz | TFORF0483 | ZNF223 | XM_017027258, NM_013361, XM_017027259, | 573 | 4123 | 7673 | None |
| | | | ENST00000434772 | | | | |
| Genewiz | TFORF0484 | ZFP92 | XM_011531115, XM_005274652, NM_001136273, | 574 | 4124 | 7674 | None |
| | | | ENST00000338647 | | | | |
| Genewiz | TFORF0485 | ZNF852 | NM_001287349 | 575 | 4125 | 7675 | None |
| Genewiz | TFORF0486 | ZFP90 | NM_001305204, ENST00000611381 | 576 | 4126 | 7676 | None |
| Genewiz | TFORF0487 | ZFP90 | NM_133458, NM_001305203, XM_005255804, | 577 | 4127 | 7677 | None |
| | | | ENST00000570495, ENST00000563169, ENST00000398253 | | | | |
| Genewiz | TFORF0488 | ZFP90 | NM_001305208, NM_001305206, ENST00000564323 | 578 | 4128 | 7678 | None |
| Genewiz | TFORF0489 | ZFP91 | NM_053023, ENST00000316059 | 579 | 4129 | 7679 | None |
| Genewiz | TFORF0490 | ZSCAN4 | XM_011526607, XM_017026458, NM_152677, | 580 | 4130 | 7680 | None |
| | | | ENST00000318203, ENST00000612521 | | | | |
| Genewiz | TFORF0491 | ZSCAN1 | NM_182572, ENST00000282326 | 581 | 4131 | 7681 | None |
| Genewiz | TFORF0492 | ZSCAN2 | NM_001007072, ENST00000379358 | 582 | 4132 | 7682 | None |
| Genewiz | TFORF0493 | ZSCAN2 | NM_181877, ENST00000448803, ENST00000546148, | 583 | 4133 | 7683 | None |
| | | | ENST00000540894 | | | | |
| Genewiz | TFORF0494 | ZSCAN2 | NM_017894, ENST00000334141 | 584 | 4134 | 7684 | None |
| Genewiz | TFORF0495 | EGR2 | NM_000399, NM_001136177, NM_001136178, | 585 | 4135 | 7685 | None |
| | | | ENST00000242480, ENST00000439032 | | | | |
| Genewiz | TFORF0496 | EGR2 | NM_001136179, NM_001321037, ENST00000411732 | 586 | 4136 | 7686 | None |
| Genewiz | TFORF0497 | EGR3 | NM_004430, ENST00000317216 | 587 | 4137 | 7687 | None |
| Genewiz | TFORF0498 | EGR3 | NM_001199880, XM_005273426, ENST00000522910 | 588 | 4138 | 7688 | None |
| Genewiz | TFORF0499 | PPARGC1A | XM_011513770, XM_011513771, ENST00000613098 | 589 | 4139 | 7689 | None |
| Genewiz | TFORF0500 | PPARGC1A | NM_013261, ENST00000264867 | 590 | 4140 | 7690 | None |
| Genewiz | TFORF0501 | EGR4 | NM_001965, ENST00000545030 | 591 | 4141 | 7691 | None |
| Genewiz | TFORF0502 | NFE4 | NM_001085386, ENST00000638942 | 592 | 4142 | 7692 | None |
| Genewiz | TFORF0503 | RNF138 | XM_005258286, NM_198128, ENST00000257190 | 593 | 4143 | 7693 | None |
| Genewiz | TFORF0504 | ZFP30 | NM_001320666, NM_001320667, NM_014898, | 594 | 4144 | 7694 | None |
| | | | NM_001320669, NM_001320668, ENST00000351218, | | | | |
| | | | ENST00000392144, ENST00000514101 | | | | |
| Genewiz | TFORF0505 | CDK2 | NM_001290230, ENST00000440311 | 595 | 4145 | 7695 | None |
| Genewiz | TFORF0506 | CDK2 | NM_052827, ENST00000354056 | 596 | 4146 | 7696 | None |
| Genewiz | TFORF0507 | CDK2 | XM_011537732, ENST00000553376 | 597 | 4147 | 7697 | None |
| Genewiz | TFORF0508 | TSHZ2 | NM_001193421, ENST00000603338 | 598 | 4148 | 7698 | None |
| Genewiz | TFORF0509 | TSHZ2 | NM_173485, XM_017027640, ENST00000371497 | 599 | 4149 | 7699 | None |
| Genewiz | TFORF0510 | TSHZ3 | NM_020856, ENST00000240587 | 600 | 4150 | 7700 | None |
| Genewiz | TFORF0511 | TSHZ1 | NM_005786, XM_005266641, ENST00000322038 | 601 | 4151 | 7701 | None |
| Genewiz | TFORF0512 | TSHZ1 | NM_001308210, ENST00000580243 | 602 | 4152 | 7702 | None |
| Genewiz | TFORF0513 | PAX5 | NM_001280550, ENST00000520154 | 603 | 4153 | 7703 | None |
| Genewiz | TFORF0514 | PAX5 | NM_001280553, ENST00000520281 | 604 | 4154 | 7704 | None |
| Genewiz | TFORF0515 | PAX5 | NM_001280548, ENST00000377853 | 605 | 4155 | 7705 | None |
| Genewiz | TFORF0516 | PAX5 | NM_001280549, ENST00000523241 | 606 | 4156 | 7706 | None |
| Genewiz | TFORF0517 | PAX5 | NM_016734, ENST00000358127 | 607 | 4157 | 7707 | None |
| Genewiz | TFORF0518 | PAX5 | NM_001280547, ENST00000377852 | 608 | 4158 | 7708 | None |
| Genewiz | TFORF0519 | PAX5 | NM_001280554, ENST00000414447 | 609 | 4159 | 7709 | None |
| Genewiz | TFORF0520 | PAX5 | NM_001280555, ENST00000446742 | 610 | 4160 | 7710 | None |
| Genewiz | TFORF0521 | PAX5 | NM_001280556, ENST00000522003 | 611 | 4161 | 7711 | None |
| Genewiz | TFORF0522 | PAX5 | NM_001280551, ENST00000523145 | 612 | 4162 | 7712 | None |
| Genewiz | TFORF0523 | PAX5 | NM_001280552, ENST00000377847 | 613 | 4163 | 7713 | None |
| Genewiz | TFORF0524 | PAX4 | XM_011516276, ENST00000639438 | 614 | 4164 | 7714 | None |
| Genewiz | TFORF0525 | PAX4 | NM_006193, ENST00000341640 | 615 | 4165 | 7715 | None |
| Genewiz | TFORF0526 | PAX7 | NM_001135254, ENST00000420770 | 616 | 4166 | 7716 | None |
| Genewiz | TFORF0527 | PAX7 | NM_002584, ENST00000375375 | 617 | 4167 | 7717 | None |
| Genewiz | TFORF0528 | PAX6 | NM_001604, NM_001258463, NM_001310158, | 618 | 4168 | 7718 | None |
| | | | NM_001258462, ENST00000606377, ENST00000640368, | | | | |
| | | | ENST00000419022, ENST00000379129, ENST00000379107, | | | | |
| | | | ENST00000638903, ENST00000639409, ENST00000640975 | | | | |
| Genewiz | TFORF0529 | PAX6 | NM_001310160, NM_001310161, ENST00000638629, | 619 | 4169 | 7719 | None |
| | | | ENST00000639548, ENST00000640125, ENST00000481563, | | | | |
| | | | ENST00000639386 | | | | |
| Genewiz | TFORF0530 | PAX6 | NM_001310159, ENST00000639034 | 620 | 4170 | 7720 | None |
| Genewiz | TFORF0531 | PAX6 | NM_001258465, NM_000280, NM_001258464, | 621 | 4171 | 7721 | None |
| | | | NM_001127612, ENST00000638914, ENST00000640610, | | | | |
| | | | ENST00000379132, ENST00000379109, ENST00000639916, | | | | |
| | | | ENST00000241001 | | | | |
| Genewiz | TFORF0532 | PAX1 | NM_006192, ENST00000398485 | 622 | 4172 | 7722 | None |
| Genewiz | TFORF0533 | PAX1 | NM_001257096, ENST00000613128 | 623 | 4173 | 7723 | None |
| Genewiz | TFORF0534 | ZNF584 | NM_001318002, ENST00000322834 | 624 | 4174 | 7724 | None |
| Genewiz | TFORF0535 | ZNF584 | NM_173548, ENST00000306910 | 625 | 4175 | 7725 | None |
| Genewiz | TFORF0536 | PAX2 | NM_003988, ENST00000370296 | 626 | 4176 | 7726 | None |
| Genewiz | TFORF0537 | PAX2 | NM_003987, ENST00000428433 | 627 | 4177 | 7727 | None |
| Genewiz | TFORF0538 | PAX2 | NM_000278, ENST00000355243 | 628 | 4178 | 7728 | None |
| Genewiz | TFORF0539 | ZNF589 | NM_016089, ENST00000354698, ENST00000448461 | 629 | 4179 | 7729 | None |
| Genewiz | TFORF0540 | GCFC2 | NM_003203, ENST00000321027 | 630 | 4180 | 7730 | None |
| Genewiz | TFORF0541 | GCFC2 | NM_001201335, ENST00000470503 | 631 | 4181 | 7731 | None |
| Genewiz | TFORF0542 | ZFAT | NM_001029939, NM_001167583, NM_001289394, | 632 | 4182 | 7732 | None |
| | | | XM_011517203, ENST00000520727, ENST00000520214 | | | | |
| Genewiz | TFORF0543 | ZFAT | NM_001174158, ENST00000520356 | 633 | 4183 | 7733 | None |
| Genewiz | TFORF0544 | ZFAT | XM_011517206, ENST00000429442 | 634 | 4184 | 7734 | None |
| Genewiz | TFORF0545 | ZFAT | NM_020863, ENST00000377838 | 635 | 4185 | 7735 | None |
| Genewiz | TFORF0546 | ZFAT | NM_001174157, ENST00000523399 | 636 | 4186 | 7736 | None |
| Genewiz | TFORF0547 | PAX9 | NM_006194, ENST00000402703, ENST00000361487 | 637 | 4187 | 7737 | None |
| Genewiz | TFORF0548 | PAX8 | NM_013952, ENST00000348715 | 638 | 4188 | 7738 | None |
| Genewiz | TFORF0549 | PAX8 | NM_013992, ENST00000397647 | 639 | 4189 | 7739 | None |
| Genewiz | TFORF0550 | PAX8 | NM_013953, ENST00000263335 | 640 | 4190 | 7740 | None |
| Genewiz | TFORF0551 | ZNF611 | NM_030972, NM_001161499, NM_001161500, | 641 | 4191 | 7741 | None |
| | | | ENST00000540744, ENST00000543227, ENST00000319783 | | | | |
| Genewiz | TFORF0552 | ZNF611 | NM_001161501, ENST00000453741, ENST00000602162, | 642 | 4192 | 7742 | None |
| | | | ENST00000595798 | | | | |
| Genewiz | TFORF0553 | ZNF610 | NM_001161427, ENST00000601151, ENST00000613461 | 643 | 4193 | 7743 | None |
| Genewiz | TFORF0554 | ZNF610 | NM_001161426, NM_001161425, NM_173530, | 644 | 4194 | 7744 | None |
| | | | ENST00000321287, ENST00000403906, ENST00000327920, | | | | |
| | | | ENST00000616431 | | | | |
| Genewiz | TFORF0555 | ZNF613 | XM_017027315, NM_024840, ENST00000391794 | 645 | 4195 | 7745 | None |
| Genewiz | TFORF0556 | ZNF613 | XM_011527333, XM_005259269, NM_001031721, | 646 | 4196 | 7746 | None |
| | | | ENST00000293471 | | | | |
| Genewiz | TFORF0557 | ZNF615 | XM_011526825, XM_011526824, XM_011526826, | 647 | 4197 | 7747 | None |
| | | | NM_001199324, NM_001321319, NM_001321321, | | | | |
| | | | ENST00000594083, ENST00000598071, ENST00000618487 | | | | |
| Genewiz | TFORF0558 | ZNF615 | NM_001321317, ENST00000391795 | 648 | 4198 | 7748 | None |
| Genewiz | TFORF0559 | ZNF615 | XM_017026649, XM_017026648, NM_198480, | 649 | 4199 | 7749 | None |
| | | | NM_001321320, ENST00000602063, ENST00000376716 | | | | |
| Genewiz | TFORF0560 | ZNF614 | NM_025040, ENST00000270649 | 650 | 4200 | 7750 | None |
| Genewiz | TFORF0561 | ZNF616 | NM_178523, ENST00000600228 | 651 | 4201 | 7751 | None |
| Genewiz | TFORF0562 | ZNF619 | NM_001145083, ENST00000456778 | 652 | 4202 | 7752 | None |
| Genewiz | TFORF0563 | ZNF619 | NM_001145093, ENST00000432264 | 653 | 4203 | 7753 | None |
| Genewiz | TFORF0564 | ZNF619 | XM_017006225, XM_011533608, ENST00000429348, | 654 | 4204 | 7754 | None |
| | | | ENST00000522736 | | | | |
| Genewiz | TFORF0565 | ZNF619 | NM_001145082, ENST00000447116, ENST00000521353 | 655 | 4205 | 7755 | None |
| Genewiz | TFORF0566 | ZNF618 | NM_001318040, ENST00000615615 | 656 | 4206 | 7756 | None |
| Genewiz | TFORF0567 | ZNF618 | NM_133374, ENST00000288466 | 657 | 4207 | 7757 | None |
| Genewiz | TFORF0568 | ZNF618 | NM_001318042, ENST00000374126 | 658 | 4208 | 7758 | None |
| Genewiz | TFORF0569 | SRCAP | NM_006662, ENST00000262518 | 659 | 4209 | 7759 | None |
| Genewiz | TFORF0570 | ZNF502 | NM_001134442, NM_001134440, NM_001282880, | 660 | 4210 | 7760 | None |
| | | | NM_001134441, NM_033210, XM_017007440, | | | | |
| | | | ENST00000449836, ENST00000436624, ENST00000296091 | | | | |
| Genewiz | TFORF0571 | MEOX1 | NM_001040002, ENST00000393661 | 661 | 4211 | 7761 | None |
| Genewiz | TFORF0572 | MEOX1 | NM_013999, ENST00000329168 | 662 | 4212 | 7762 | None |
| Genewiz | TFORF0573 | MEOX2 | NM_005924, ENST00000262041 | 663 | 4213 | 7763 | None |
| Genewiz | TFORF0574 | HOXA13 | NM_000522, ENST00000222753 | 664 | 4214 | 7764 | None |
| Genewiz | TFORF0575 | HOXA11 | NM_005523, ENST00000006015 | 665 | 4215 | 7765 | None |
| Genewiz | TFORF0576 | HOXA10 | NM_018951, ENST00000283921 | 666 | 4216 | 7766 | None |
| Genewiz | TFORF0577 | GTF2A1L | NM_001193487, ENST00000430487 | 667 | 4217 | 7767 | None |
| Genewiz | TFORF0578 | ZNF107 | XM_017012284, XM_017012283, XM_017012285, | 668 | 4218 | 7768 | None |
| | | | NM_001013746, NM_016220, XM_017012286, | | | | |
| | | | ENST00000344930, ENST00000423627, ENST00000395391 | | | | |
| Genewiz | TFORF0579 | ZNF107 | NM_001282359, ENST00000620827 | 669 | 4219 | 7769 | None |
| Genewiz | TFORF0580 | ZNF107 | NM_001282360, ENST00000613690 | 670 | 4220 | 7770 | None |
| Genewiz | TFORF0581 | ZNF101 | NM_033204, ENST00000318110, ENST00000592502 | 671 | 4221 | 7771 | None |
| Genewiz | TFORF0582 | ZNF100 | NM_173531, ENST00000358296 | 672 | 4222 | 7772 | None |
| Genewiz | TFORF0583 | ZNF324 | NM_014347, ENST00000536459, ENST00000196482 | 673 | 4223 | 7773 | None |
| Genewiz | TFORF0584 | SRF | NM_003131, ENST00000265354 | 674 | 4224 | 7774 | None |
| Genewiz | TFORF0585 | ZNF329 | NM_024620, XM_006723382, XM_011527316, | 675 | 4225 | 7775 | None |
| | | | XM_006723381, XM_017027311, XM_017027310, | | | | |
| | | | XM_017027307, XM_017027308, XM_006723383, | | | | |
| | | | XM_011527315, XM_006723384, XM_017027309, | | | | |
| | | | ENST00000597186, ENST00000598312, ENST00000358067, | | | | |
| | | | ENST00000500161 | | | | |
| Genewiz | TFORF0586 | SRY | NM_003140, ENST00000383070 | 676 | 4226 | 7776 | None |
| Genewiz | TFORF0587 | NMI | XM_017005247, XM_005246941, NM_004688, | 677 | 4227 | 7777 | None |
| | | | ENST00000243346 | | | | |
| Genewiz | TFORF0588 | FOXO3 | XM_017010586, XM_011535628, XM_011535629, | 678 | 4228 | 7778 | None |
| | | | XM_005266868, ENST00000540898 | | | | |
| Genewiz | TFORF0589 | FOXO1 | NM_002015, ENST00000379561 | 679 | 4229 | 7779 | None |
| Genewiz | TFORF0590 | FOXO6 | NM_001291281 | 680 | 4230 | 7780 | None |
| Genewiz | TFORF0591 | FOXO4 | NM_005938, ENST00000374259 | 681 | 4231 | 7781 | None |
| Genewiz | TFORF0592 | FOXO4 | NM_001170931, ENST00000341558 | 682 | 4232 | 7782 | None |
| Genewiz | TFORF0593 | UNCX | NM_001080461, ENST00000316333 | 683 | 4233 | 7783 | None |
| Genewiz | TFORF0594 | ANKRD30A | NM_052997, ENST00000361713, ENST00000602533 | 684 | 4234 | 7784 | None |
| Genewiz | TFORF0595 | PLAG1 | NM_002655, NM_001114634, XM_017013576, | 685 | 4235 | 7785 | None |
| | | | ENST00000316981, ENST00000429357 | | | | |
| Genewiz | TFORF0596 | PLAG1 | NM_001114635, XM_011517544, XM_017013577, | 686 | 4236 | 7786 | None |
| | | | ENST00000423799 | | | | |
| Genewiz | TFORF0597 | SMARCB1 | NM_001317946, ENST00000344921 | 687 | 4237 | 7787 | None |
| Genewiz | TFORF0598 | SMARCB1 | NM_003073, ENST00000263121 | 688 | 4238 | 7788 | None |
| Genewiz | TFORF0599 | ZNF891 | XM_017018666, XM_017018667, XM_017018668, | 689 | 4239 | 7789 | None |
| | | | NM_001277291, ENST00000537226 | | | | |
| Genewiz | TFORF0600 | MZF1 | NM_001267033, ENST00000594234 | 690 | 4240 | 7790 | None |
| Genewiz | TFORF0601 | ZNF726 | NM_001244038, ENST00000594466 | 691 | 4241 | 7791 | None |
| Genewiz | TFORF0602 | ZNF728 | NM_001267716, ENST00000594710 | 692 | 4242 | 7792 | None |
| Genewiz | TFORF0603 | ZNF292 | NM_015021, ENST00000369577 | 693 | 4243 | 7793 | None |
| Genewiz | TFORF0604 | PUF60 | NM_001271099, ENST00000456095 | 694 | 4244 | 7794 | None |
| Genewiz | TFORF0605 | PUF60 | NM_001271097, ENST00000527197 | 695 | 4245 | 7795 | None |
| Genewiz | TFORF0606 | PUF60 | NM_078480, ENST00000526683 | 696 | 4246 | 7796 | None |
| Genewiz | TFORF0607 | CREBL2 | NM_001310, ENST00000228865 | 697 | 4247 | 7797 | None |
| Genewiz | TFORF0608 | MAFA | NM_201589, ENST00000333480 | 698 | 4248 | 7798 | None |
| Genewiz | TFORF0609 | MAFF | NM_001161574, ENST00000538999 | 699 | 4249 | 7799 | None |
| Genewiz | TFORF0610 | RBPJ | XM_005248161, XM_017008175, XM_017008174, | 700 | 4250 | 7800 | None |
| | | | NM_203284, XM_011513840, XM_017008173, | | | | |
| | | | ENST00000355476, ENST00000342320 | | | | |
| Genewiz | TFORF0611 | RBPJ | XM_017008172, NM_005349, ENST00000342295, | 701 | 4251 | 7801 | None |
| | | | ENST00000361572 | | | | |
| Genewiz | TFORF0612 | RBPJ | NM_015874, ENST00000348160 | 702 | 4252 | 7802 | None |
| Genewiz | TFORF0613 | ZSCAN29 | NM_152455, XM_006720401, XM_011521266, | 703 | 4253 | 7803 | None |
| | | | ENST00000396976 | | | | |
| Genewiz | TFORF0614 | ZSCAN25 | XM_011515906, XM_011515907, XM_011515905, | 704 | 4254 | 7804 | None |
| | | | NM_145115, XM_005250194, XM_017011824, | | | | |
| | | | ENST00000394152, ENST00000334715 | | | | |
| Genewiz | TFORF0615 | ZSCAN26 | NM_001287422, ENST00000611552 | 705 | 4255 | 7805 | None |
| Genewiz | TFORF0616 | ZSCAN26 | NM_152736, NM_001287421, ENST00000316606, | 706 | 4256 | 7806 | None |
| | | | ENST00000614088 | | | | |
| Genewiz | TFORF0617 | ZSCAN26 | NM_001023560, XM_011514862, ENST00000421553, | 707 | 4257 | 7807 | None |
| | | | ENST00000619937 | | | | |
| Genewiz | TFORF0618 | ZSCAN26 | NM_001111039, XM_017011264, ENST00000623276 | 708 | 4258 | 7808 | None |
| Genewiz | TFORF0619 | ZSCAN20 | XM_017002237, NM_145238, XM_006710874, | 709 | 4259 | 7809 | None |
| | | | ENST00000361328 | | | | |
| Genewiz | TFORF0620 | ZSCAN21 | XM_017012585, ENST00000456748 | 710 | 4260 | 7810 | None |
| Genewiz | TFORF0621 | ZSCAN22 | NM_001321116, NM_181846, XM_006723192, | 711 | 4261 | 7811 | None |
| | | | XM_011526917, ENST00000329665 | | | | |
| Genewiz | TFORF0622 | ZSCAN23 | XM_017010479, XM_011514406, XM_011514408, | 712 | 4262 | 7812 | None |
| | | | XM_011514410, XM_005248950, NM_001012455, | | | | |
| | | | ENST00000289788 | | | | |
| Genewiz | TFORF0623 | DDIT3 | NM_001195056, NM_001195053, NM_001195054, | 713 | 4263 | 7813 | None |
| | | | NM_001195055, ENST00000551116, ENST00000552740 | | | | |
| Genewiz | TFORF0624 | NKRF | NM_001173487, ENST00000542113 | 714 | 4264 | 7814 | None |
| Genewiz | TFORF0625 | MYSM1 | NM_001085487, ENST00000472487 | 715 | 4265 | 7815 | None |
| Genewiz | TFORF0626 | CEBPZ | NM_005760, ENST00000234170 | 716 | 4266 | 7816 | None |
| Genewiz | TFORF0627 | TERF2 | NM_005652, ENST00000254942 | 717 | 4267 | 7817 | None |
| Genewiz | TFORF0628 | NR112 | NM_033013, ENST00000466380, ENST00000638727 | 718 | 4268 | 7818 | None |
| Genewiz | TFORF0629 | NR112 | NM_022002, ENST00000337940 | 719 | 4269 | 7819 | None |
| Genewiz | TFORF0630 | NR112 | NM_003889, ENST00000393716, ENST00000640105 | 720 | 4270 | 7820 | None |
| Genewiz | TFORF0631 | TERF1 | NM_017489, ENST00000276603 | 721 | 4271 | 7821 | None |
| Genewiz | TFORF0632 | VPS72 | NM_005997, ENST00000368892 | 722 | 4272 | 7822 | None |
| Genewiz | TFORF0633 | VPS72 | NM_001271087, ENST00000354473 | 723 | 4273 | 7823 | None |
| Genewiz | TFORF0634 | TRIM33 | NM_033020, ENST00000369543 | 724 | 4274 | 7824 | None |
| Genewiz | TFORF0635 | TRIM33 | NM_015906, ENST00000358465 | 725 | 4275 | 7825 | None |
| Genewiz | TFORF0636 | HOXC5 | NM_018953, ENST00000312492 | 726 | 4276 | 7826 | None |
| Genewiz | TFORF0637 | HOXC4 | NM_014620, NM_153633, ENST00000303406, | 727 | 4277 | 7827 | None |
| | | | ENST00000430889 | | | | |
| Genewiz | TFORF0638 | HOXC6 | NM_153693, ENST00000394331 | 728 | 4278 | 7828 | None |
| Genewiz | TFORF0639 | HOXC6 | NM_004503, ENST00000243108 | 729 | 4279 | 7829 | None |
| Genewiz | TFORF0640 | NHP2 | NM_001034833, ENST00000314397 | 730 | 4280 | 7830 | None |
| Genewiz | TFORF0641 | THAP11 | NM_020457, ENST00000303596 | 731 | 4281 | 7831 | None |
| Genewiz | TFORF0642 | NR113 | NM_005122, ENST00000367983 | 732 | 4282 | 7832 | None |
| Genewiz | TFORF0643 | NR113 | NM_001077469, ENST00000428574 | 733 | 4283 | 7833 | None |
| Genewiz | TFORF0644 | NR113 | NM_001077471, ENST00000367984 | 734 | 4284 | 7834 | None |
| Genewiz | TFORF0645 | NR113 | NM_001077481, ENST00000367985 | 735 | 4285 | 7835 | None |
| Genewiz | TFORF0646 | NR113 | NM_001077477, ENST00000437437 | 736 | 4286 | 7836 | None |
| Genewiz | TFORF0647 | NR113 | NM_001077478, ENST00000442691 | 737 | 4287 | 7837 | None |
| Genewiz | TFORF0648 | NR113 | NM_001077475, ENST00000512372 | 738 | 4288 | 7838 | None |
| Genewiz | TFORF0649 | NR113 | NM_001077476, ENST00000508740 | 739 | 4289 | 7839 | None |
| Genewiz | TFORF0650 | NR113 | NM_001077473, ENST00000412844 | 740 | 4290 | 7840 | None |
| Genewiz | TFORF0651 | NR113 | NM_001077482, ENST00000367980, ENST00000367979 | 741 | 4291 | 7841 | None |
| Genewiz | TFORF0652 | NR113 | NM_001077470, ENST00000504010 | 742 | 4292 | 7842 | None |
| Genewiz | TFORF0653 | NR113 | NM_001077479, ENST00000511676 | 743 | 4293 | 7843 | None |
| Genewiz | TFORF0654 | NR113 | NM_001077472, ENST00000367981 | 744 | 4294 | 7844 | None |
| Genewiz | TFORF0655 | NR113 | NM_001077474, ENST00000505005 | 745 | 4295 | 7845 | None |
| Genewiz | TFORF0656 | CHD3 | NM_001005273, ENST00000330494 | 746 | 4296 | 7846 | None |
| Genewiz | TFORF0657 | CHD3 | NM_005852, ENST00000358181 | 747 | 4297 | 7847 | None |
| Genewiz | TFORF0658 | CHD3 | NM_001005271, ENST00000380358 | 748 | 4298 | 7848 | None |
| Genewiz | TFORF0659 | CHD5 | NM_015557, ENST00000262450 | 749 | 4299 | 7849 | None |
| Genewiz | TFORF0660 | CHD7 | NM_001316690, ENST00000524602 | 750 | 4300 | 7850 | None |
| Genewiz | TFORF0661 | CHD7 | NM_017780, ENST00000423902 | 751 | 4301 | 7851 | None |
| Genewiz | TFORF0662 | CHD6 | NM_032221, ENST00000373233 | 752 | 4302 | 7852 | None |
| Genewiz | TFORF0663 | MNT | NM_020310, ENST00000174618 | 753 | 4303 | 7853 | None |
| Genewiz | TFORF0664 | NKX1-2 | NM_001146340, ENST00000451024 | 754 | 4304 | 7854 | None |
| Genewiz | TFORF0665 | SCX | XM_006716616, NM_001080514, ENST00000567180 | 755 | 4305 | 7855 | None |
| Genewiz | TFORF0666 | TGFB111 | NM_001164719, NM_015927, ENST00000361773, | 756 | 4306 | 7856 | None |
| | | | ENST00000394858, ENST00000567607 | | | | |
| Genewiz | TFORF0667 | TGFB111 | NM_001042454, ENST00000394863 | 757 | 4307 | 7857 | None |
| Genewiz | TFORF0668 | ZNF823 | NM_001080493, ENST00000341191 | 758 | 4308 | 7858 | None |
| Genewiz | TFORF0669 | ZNF821 | NM_001201556, ENST00000611294 | 759 | 4309 | 7859 | None |
| Genewiz | TFORF0670 | ZNF821 | NM_017530, NM_001201554, XM_017023414, | 760 | 4310 | 7860 | None |
| | | | ENST00000313565, ENST00000446827 | | | | |
| Genewiz | TFORF0671 | ZNF821 | NM_001201553, NM_001201552, XM_017023409, | 761 | 4311 | 7861 | None |
| | | | XM_006721233, XM_017023411, XM_017023410, | | | | |
| | | | XM_011523211, XM_005256033, XM_017023412, | | | | |
| | | | ENST00000425432, ENST00000565601 | | | | |
| Genewiz | TFORF0672 | ZNF827 | NM_001306215, ENST00000508784 | 762 | 4312 | 7862 | None |
| Genewiz | TFORF0673 | ZNF827 | NM_178835, XM_017007772, XM_017007774, | 763 | 4313 | 7863 | None |
| | | | XM_017007773, XM_017007775, ENST00000379448 | | | | |
| Genewiz | TFORF0674 | ZNF829 | NM_001171979, ENST00000520965 | 764 | 4314 | 7864 | None |
| Genewiz | TFORF0675 | PRDM16 | NM_022114, ENST00000270722 | 765 | 4315 | 7865 | None |
| Genewiz | TFORF0676 | PRDM16 | XM_005244774, ENST00000511072 | 766 | 4316 | 7866 | None |
| Genewiz | TFORF0677 | PRDM16 | NM_199454, ENST00000378391 | 767 | 4317 | 7867 | None |
| Genewiz | TFORF0678 | PRDM14 | NM_024504, ENST00000276594 | 768 | 4318 | 7868 | None |
| Genewiz | TFORF0679 | PRDM15 | NM_001282934, ENST00000422911 | 769 | 4319 | 7869 | None |
| Genewiz | TFORF0680 | PRDM15 | NM_001040424, ENST00000398548 | 770 | 4320 | 7870 | None |
| Genewiz | TFORF0681 | PRDM15 | NM_022115, ENST00000433067, ENST00000269844 | 771 | 4321 | 7871 | None |
| Genewiz | TFORF0682 | PRDM15 | XM_017028426, XM_017028425, ENST00000447016, | 772 | 4322 | 7872 | None |
| | | | ENST00000447207 | | | | |
| Genewiz | TFORF0683 | PRDM12 | NM_021619, ENST00000253008 | 773 | 4323 | 7873 | None |
| Genewiz | TFORF0684 | PRDM13 | NM_021620, ENST00000369215 | 774 | 4324 | 7874 | None |
| Genewiz | TFORF0685 | PRDM10 | NM_020228, ENST00000358825 | 775 | 4325 | 7875 | None |
| Genewiz | TFORF0686 | PRDM10 | NM_199438, ENST00000423662 | 776 | 4326 | 7876 | None |
| Genewiz | TFORF0687 | PRDM10 | NM_199437, ENST00000360871 | 777 | 4327 | 7877 | None |
| Genewiz | TFORF0688 | PRDM10 | NM_199439, ENST00000304538 | 778 | 4328 | 7878 | None |
| Genewiz | TFORF0689 | HNF4G | XM_017013374, XM_011517516, XM_017013373, | 779 | 4329 | 7879 | None |
| | | | XM_017013375, XM_017013376, ENST00000354370 | | | | |
| Genewiz | TFORF0690 | HNF4G | NM_004133, ENST00000396423 | 780 | 4330 | 7880 | None |
| Genewiz | TFORF0691 | HNF4A | NM_178849, ENST00000415691 | 781 | 4331 | 7881 | None |
| Genewiz | TFORF0692 | HNF4A | NM_001030003, ENST00000457232 | 782 | 4332 | 7882 | None |
| Genewiz | TFORF0693 | HNF4A | NM_001287183, ENST00000619550 | 783 | 4333 | 7883 | None |
| Genewiz | TFORF0694 | HNF4A | NM_175914, ENST00000316673 | 784 | 4334 | 7884 | None |
| Genewiz | TFORF0695 | HNF4A | NM_001030004, ENST00000609795 | 785 | 4335 | 7885 | None |
| Genewiz | TFORF0696 | GTF3A | NM_002097, ENST00000381140, ENST00000640289 | 786 | 4336 | 7886 | None |
| Genewiz | TFORF0697 | BATF2 | NM_138456, ENST00000301887 | 787 | 4337 | 7887 | None |
| Genewiz | TFORF0698 | BATF2 | NM_001300808, ENST00000435842 | 788 | 4338 | 7888 | None |
| Genewiz | TFORF0699 | BATF2 | NM_001300807, ENST00000527716 | 789 | 4339 | 7889 | None |
| Genewiz | TFORF0700 | PAXBP1 | NM_013329, ENST00000290178 | 790 | 4340 | 7890 | None |
| Genewiz | TFORF0701 | PAXBP1 | NM_016631, ENST00000331923 | 791 | 4341 | 7891 | None |
| Genewiz | TFORF0702 | NCOR2 | NM_006312, ENST00000405201 | 792 | 4342 | 7892 | None |
| Genewiz | TFORF0703 | NCOR2 | NM_001077261, ENST00000404621 | 793 | 4343 | 7893 | None |
| Genewiz | TFORF0704 | NCOR2 | NM_001206654, ENST00000429285 | 794 | 4344 | 7894 | None |
| Genewiz | TFORF0705 | NCOR1 | NM_006311, ENST00000268712 | 795 | 4345 | 7895 | None |
| Genewiz | TFORF0706 | NCOR1 | NM_001190438, ENST00000395848 | 796 | 4346 | 7896 | None |
| Genewiz | TFORF0707 | NCOR1 | NM_001190440, XM_011524086, ENST00000395851 | 797 | 4347 | 7897 | None |
| Genewiz | TFORF0708 | ZNF628 | NM_033113, ENST00000598519 | 798 | 4348 | 7898 | None |
| Genewiz | TFORF0709 | ZNF629 | NM_001080417, ENST00000262525 | 799 | 4349 | 7899 | None |
| Genewiz | TFORF0710 | ZNF624 | NM_020787, XM_006721562, ENST00000311331 | 800 | 4350 | 7900 | None |
| Genewiz | TFORF0711 | ZNF625 | NM_145233, ENST00000439556 | 801 | 4351 | 7901 | None |
| Genewiz | TFORF0712 | ZNF626 | NM_001076675, ENST00000601440 | 802 | 4352 | 7902 | None |
| Genewiz | TFORF0713 | ZNF627 | NM_145295, ENST00000361113 | 803 | 4353 | 7903 | None |
| Genewiz | TFORF0714 | ZNF620 | XM_017006069, NM_001256167, NM_001256168, | 804 | 4354 | 7904 | None |
| | | | ENST00000418905 | | | | |
| Genewiz | TFORF0715 | ZNF620 | XM_005265012, XM_005265011, NM_175888, | 805 | 4355 | 7905 | None |
| | | | ENST00000314529 | | | | |
| Genewiz | TFORF0716 | ZNF621 | NM_001287245, ENST00000310898 | 806 | 4356 | 7906 | None |
| Genewiz | TFORF0717 | TER | NM_001145398, ENST00000406644 | 807 | 4357 | 7907 | None |
| Genewiz | TFORF0718 | TEF | NM_003216, ENST00000266304 | 808 | 4358 | 7908 | None |
| Genewiz | TFORF0719 | ZNF623 | NM_001261843, NM_001082480, XM_006716708, | 809 | 4359 | 7909 | None |
| | | | ENST00000526926, ENST00000458270 | | | | |
| Genewiz | TFORF0720 | ZNF623 | NM_014789, ENST00000501748 | 810 | 4360 | 7910 | None |
| Genewiz | TFORF0721 | ZNF727 | NM_001159522, ENST00000456806 | 811 | 4361 | 7911 | None |
| Genewiz | TFORF0722 | NFKB1 | NM_001165412, NM_001319226, ENST00000394820, | 812 | 4362 | 7912 | None |
| | | | ENST00000505458 | | | | |
| Genewiz | TFORF0723 | NFKB1 | NM_003998, ENST00000226574 | 813 | 4363 | 7913 | None |
| Genewiz | TFORF0724 | NFKB2 | NM_001288724, NM_002502, NM_001261403, | 814 | 4364 | 7914 | None |
| | | | ENST00000428099, ENST00000189444 | | | | |
| Genewiz | TFORF0725 | NFKB2 | NM_001077494, NM_001322934, ENST00000369966 | 815 | 4365 | 7915 | None |
| Genewiz | TFORF0726 | ASH1L | NM_018489, XM_006711451, XM_006711450, | 816 | 4366 | 7916 | None |
| | | | XM_017001784, XM_017001785, ENST00000392403 | | | | |
| Genewiz | TFORF0727 | ZFP36L2 | NM_006887, ENST00000282388 | 817 | 4367 | 7917 | None |
| Genewiz | TFORF0728 | MLXIP | NM_014938, ENST00000319080 | 818 | 4368 | 7918 | None |
| Genewiz | TFORF0729 | ZNF518B | NM_053042, XM_017008786, XM_017008784, | 819 | 4369 | 7919 | None |
| | | | XM_017008785, XM_005248193, ENST00000326756 | | | | |
| Genewiz | TFORF0730 | ZNF518A | XM_017016994, XM_011540413, NM_001278524, | 820 | 4370 | 7920 | None |
| | | | NM_014803, XM_011540415, XM_011540412, | | | | |
| | | | XM_011540419, XM_017016993, XM_011540406, | | | | |
| | | | XM_011540410, XM_011540418, XM_011540420, | | | | |
| | | | XM_017016989, XM_011540408, NM_001278525, | | | | |
| | | | XM_017016992, XM_017016991, XM_017016986, | | | | |
| | | | XM_017016995, XM_017016990, XM_017016987, | | | | |
| | | | XM_017016996, XM_017016988, XM_017016997, | | | | |
| | | | XM_017016999, XM_017016998, ENST00000316045, | | | | |
| | | | ENST00000624776, ENST00000614149 | | | | |
| Genewiz | TFORF0731 | PROX1 | NM_001270616, NM_002763, XM_017001833, | 821 | 4371 | 7921 | None |
| | | | ENST00000498508, ENST00000366958, ENST00000261454, | | | | |
| | | | ENST00000435016 | | | | |
| Genewiz | TFORF0732 | PROX2 | NM_001243007, ENST00000556489 | 822 | 4372 | 7922 | None |
| Genewiz | TFORF0733 | PROX2 | NM_001080408, ENST00000556084 | 823 | 4373 | 7923 | None |
| Genewiz | TFORF0734 | ZNF488 | XM_017015642, XM_017015643, XM_011539244, | 824 | 4374 | 7924 | None |
| | | | XM_006717617, NM_153034, ENST00000585316 | | | | |
| Genewiz | TFORF0735 | ZNF480 | NM_001297625, ENST00000335090 | 825 | 4375 | 7925 | None |
| Genewiz | TFORF0736 | ZNF480 | NM_001297624, ENST00000334564 | 826 | 4376 | 7926 | None |
| Genewiz | TFORF0737 | ZNF480 | NM_144684, XM_011526465, ENST00000468240, | 827 | 4377 | 7927 | None |
| | | | ENST00000595962 | | | | |
| Genewiz | TFORF0738 | ZNF155 | XM_005259215, NM_001260487, NM_198089, | 828 | 4378 | 7928 | None |
| | | | NM_003445, NM_001260486, ENST00000611002, | | | | |
| | | | ENST00000270014, ENST00000590615 | | | | |
| Genewiz | TFORF0739 | ZNF155 | XM_011527279, NM_001260488, XM_017027248, | 829 | 4379 | 7929 | None |
| | | | XM_011527278, ENST00000407951 | | | | |
| Genewiz | TFORF0740 | JDP2 | XM_017020975, XM_017020973, NM_001135047, | 830 | 4380 | 7930 | None |
| | | | XM_017020974, NM_001135048, NM_130469, | | | | |
| | | | XM_005267332, ENST00000419727, ENST0437176, | | | | |
| | | | ENST00000435893 | | | | |
| Genewiz | TFORF0741 | JDP2 | XM_017020972, NM_001135049, ENST00000267569 | 831 | 4381 | 7931 | None |
| Genewiz | TFORF0742 | ZNF485 | NM_001318141, NM_145312, NM_001318140, | 832 | 4382 | 7932 | None |
| | | | ENST00000361807, ENST00000374435 | | | | |
| Genewiz | TFORF0743 | ZNF486 | NM_052852, ENST00000335117 | 833 | 4383 | 7933 | None |
| Genewiz | TFORF0744 | PIAS2 | NM_004671, ENST00000585916 | 834 | 4384 | 7934 | None |
| Genewiz | TFORF0745 | PIAS2 | NM_173206, ENST00000324794 | 835 | 4385 | 7935 | None |
| Genewiz | TFORF0746 | PIAS3 | NM_006099, ENST00000393045 | 836 | 4386 | 7936 | None |
| Genewiz | TFORF0747 | PIAS1 | NM_001320687, XM_017022688, ENST00000545237 | 837 | 4387 | 7937 | None |
| Genewiz | TFORF0748 | PIAS4 | NM_015897, ENST00000262971 | 838 | 4388 | 7938 | None |
| Genewiz | TFORF0749 | ZNF131 | XM_005248359, XM_005248362, NM_001297548, | 839 | 4389 | 7939 | None |
| | | | XM_005248360, XM_017009830, XM_005248361, | | | | |
| | | | XM_005248363, ENST00000509156 | | | | |
| Genewiz | TFORF0750 | ZNF131 | XM_005248365, XM_017009834, NM_003432, | 840 | 4390 | 7940 | None |
| | | | XM_017009835, XM_017009832, XM_017009833, | | | | |
| | | | ENST00000306938, ENST00000505606, ENST00000509634 | | | | |
| Genewiz | TFORF0751 | HIVEP1 | XM_011514551, XM_011514552, NM_002114, | 841 | 4391 | 7941 | None |
| | | | XM_011514553, ENST00000379388 | | | | |
| Genewiz | TFORF0752 | HIVEP3 | NM_001127714, XM_017001994, ENST00000372584 | 842 | 4392 | 7942 | None |
| Genewiz | TFORF0753 | HIVEP3 | XM_011541884, NM_024503, XM_017001993, | 843 | 4393 | 7943 | None |
| | | | XM_017001992, ENST00000372583 | | | | |
| Genewiz | TFORF0754 | ZNF317 | NM_001190791, ENST00000360385 | 844 | 4394 | 7944 | None |
| Genewiz | TFORF0755 | ZNF319 | NM_020807, XM_005256069, ENST00000299237 | 845 | 4395 | 7945 | None |
| Genewiz | TFORF0756 | JUND | NM_005354, ENST00000252818 | 846 | 4396 | 7946 | None |
| Genewiz | TFORF0757 | NOTCH1 | NM_017617, ENST00000277541 | 847 | 4397 | 7947 | None |
| Genewiz | TFORF0758 | OVOL3 | NM_001302757, ENST00000633214 | 848 | 4398 | 7948 | None |
| Genewiz | TFORF0759 | TLX2 | NM_016170, ENST00000233638 | 849 | 4399 | 7949 | None |
| Genewiz | TFORF0760 | OVOL1 | XM_011545067, XM_017017837, XM_005274018, | 850 | 4400 | 7950 | None |
| | | | XM_011545068, XM_017017838, ENST00000532448 | | | | |
| Genewiz | TFORF0761 | ZNF556 | NM_024967, ENST00000307635 | 851 | 4401 | 7951 | None |
| Genewiz | TFORF0762 | ZNF557 | NM_001044388, ENST00000414706 | 852 | 4402 | 7952 | None |
| Genewiz | TFORF0763 | ZNF557 | NM_001044387, NM_024341, ENST00000252840 | 853 | 4403 | 7953 | None |
| Genewiz | TFORF0764 | ZNF555 | NM_001172775, ENST00000591539 | 854 | 4404 | 7954 | None |
| Genewiz | TFORF0765 | ZNF555 | NM_152791, ENST00000334241 | 855 | 4405 | 7955 | None |
| Genewiz | TFORF0766 | ZNF552 | NM_024762, ENST00000391701 | 856 | 4406 | 7956 | None |
| Genewiz | TFORF0767 | ZNF550 | NM_001277090, NM_001277091, NM_001277092, | 857 | 4407 | 7957 | None |
| | | | XM_011526567, XM_017026401, ENST00000457177, | | | | |
| | | | ENST00000325134, ENST00000376230, ENST00000447310 | | | | |
| Genewiz | TFORF0768 | ZNF551 | NM_138347, ENST00000282296 | 858 | 4408 | 7958 | None |
| Genewiz | TFORF0769 | MSX1 | NM_002448, ENST00000382723 | 859 | 4409 | 7959 | None |
| Genewiz | TFORF0770 | MSX2 | NM_002449, ENST00000239243 | 860 | 4410 | 7960 | None |
| Genewiz | TFORF0771 | MSX2 | XM_017009489, ENST00000507785 | 861 | 4411 | 7961 | None |
| Genewiz | TFORF0772 | SIN3A | NM_015477, NM_001145358, NM_001145357, | 862 | 4412 | 7962 | None |
| | | | XM_006720466, XM_006720467, XM_006720465, | | | | |
| | | | ENST00000394947, ENST00000360439, ENST00000394949 | | | | |
| Genewiz | TFORF0773 | ZNF92 | NM_001287532, ENST00000357512 | 863 | 4413 | 7963 | None |
| Genewiz | TFORF0774 | ZNF92 | NM_001287534, NM_001287533, ENST00000431504 | 864 | 4414 | 7964 | None |
| Genewiz | TFORF0775 | ZNF92 | NM_007139, ENST00000450302 | 865 | 4415 | 7965 | None |
| Genewiz | TFORF0776 | ZNF92 | NM_152626, ENST00000328747 | 866 | 4416 | 7966 | None |
| Genewiz | TFORF0777 | SHOX | NM_000451, NM_000451, ENST00000381578, | 867 | 4417 | 7967 | None |
| | | | ENST00000554971, ENST00000381578, ENST00000554971 | | | | |
| Genewiz | TFORF0778 | SHOX | NM_006883, NM_006883, ENST00000334060, | 868 | 4418 | 7968 | None |
| | | | ENST00000381575, ENST00000334060, ENST00000381575 | | | | |
| Genewiz | TFORF0779 | GTF2H2 | NM_001515, XM_017009404, XM_017009405, | 869 | 4419 | 7969 | None |
| | | | XM_017009406, XM_017009403, ENST00000274400, | | | | |
| | | | ENST00000330280 | | | | |
| Genewiz | TFORF0780 | GTF2H1 | NM_005316, NM_001142307, XM_006718208, | 870 | 4420 | 7970 | None |
| | | | ENST00000453096, ENST00000265963 | | | | |
| Genewiz | TFORF0781 | ZNF93 | NM_031218, ENST00000343769 | 871 | 4421 | 7971 | None |
| Genewiz | TFORF0782 | FOXN4 | NM_213596, ENST00000299162 | 872 | 4422 | 7972 | None |
| Genewiz | TFORF0783 | SEBOX | NM_001080837, ENST00000536498 | 873 | 4423 | 7973 | None |
| Genewiz | TFORF0784 | ZNF585A | NM_001288800, ENST00000292841 | 874 | 4424 | 7974 | None |
| Genewiz | TFORF0785 | ZNF585A | NM_199126, NM_152655, ENST00000356958, | 875 | 4425 | 7975 | None |
| | | | ENST00000392157 | | | | |
| Genewiz | TFORF0786 | FOXN1 | XM_005258046, NM_003593, ENST00000579795, | 876 | 4426 | 7976 | None |
| | | | ENST00000226247 | | | | |
| Genewiz | TFORF0787 | REPIN1 | XM_006715949, NM_001099695, XM_006715947, | 877 | 4427 | 7977 | None |
| | | | XM_006715948, ENST00000489432 | | | | |
| Genewiz | TFORF0788 | REPIN1 | XM_005249985, XM_006715952, NM_001099696, | 878 | 4428 | 7978 | None |
| | | | NM_013400, XM_006715953, XM_017012082, | | | | |
| | | | XM_017012081, XM_011516112, NM_014374, | | | | |
| | | | ENST00000397281, ENST00000444957, ENST00000425389 | | | | |
| Genewiz | TFORF0789 | DBX2 | NM_001004329, ENST00000332700 | 879 | 4429 | 7979 | None |
| Genewiz | TFORF0790 | DBX1 | NM_001029865, ENST00000524983 | 880 | 4430 | 7980 | None |
| Genewiz | TFORF0791 | ZNF99 | NM_001080409, ENST00000596209 | 881 | 4431 | 7981 | None |
| Genewiz | TFORF0792 | TARBP2 | NM_004178, XM_005269114, XM_005269115, | 882 | 4432 | 7982 | None |
| | | | NM_134324, ENST0456234, ENST00000394357 | | | | |
| Genewiz | TFORF0793 | ATF5 | NM_012068, NM_001193646, XM_011526629, | 883 | 4433 | 7983 | None |
| | | | NM_001290746, ENST00000595125, ENST00000423777 | | | | |
| Genewiz | TFORF0794 | ATF7 | XM_005268587, XM_017018722, NM_006856, | 884 | 4434 | 7984 | None |
| | | | ENST00000420353, ENST00000456903 | | | | |
| Genewiz | TFORF0795 | ATF7 | NM_001206683, NM_001206682, ENST00000548118, | 885 | 4435 | 7985 | None |
| | | | ENST00000591397 | | | | |
| Genewiz | TFORF0796 | ATF6 | NM_007348, ENST00000367942 | 886 | 4436 | 7986 | None |
| Genewiz | TFORF0797 | ATF1 | XM_011538387, NM_005171, XM_017019334, | 887 | 4437 | 7987 | None |
| | | | XM_017019333, XM_011538386, XM_017019332, | | | | |
| | | | ENST00000262053 | | | | |
| Genewiz | TFORF0798 | ATF3 | NM_001206486, ENST00000336937 | 888 | 4438 | 7988 | None |
| Genewiz | TFORF0799 | ATF3 | NM_001040619, ENST00000366983, ENST00000464547 | 889 | 4439 | 7989 | None |
| Genewiz | TFORF0800 | ATF3 | NM_001206488, NM_001206484, ENST00000613954, | 890 | 4440 | 7990 | None |
| | | | ENST00000613104 | | | | |
| Genewiz | TFORF0801 | ATF3 | NM_001030287, XM_011509579, NM_001674, | 891 | 4441 | 7991 | None |
| | | | XM_005273146, ENST00000366987, ENST00000341491 | | | | |
| Genewiz | TFORF0802 | ATF2 | NM_001256091, ENST00000426833 | 892 | 4442 | 7992 | None |
| Genewiz | TFORF0803 | ATF2 | NM_001256092, ENST00000345739, ENST00000409635 | 893 | 4443 | 7993 | None |
| Genewiz | TFORF0804 | SMARCC2 | XM_005269101, ENST00000550164 | 894 | 4444 | 7994 | None |
| Genewiz | TFORF0805 | SMARCC2 | NM_001130420, ENST00000394023 | 895 | 4445 | 7995 | None |
| Genewiz | TFORF0806 | SMARCC2 | NM_139067, ENST00000347471 | 896 | 4446 | 7996 | None |
| Genewiz | TFORF0807 | SMARCC2 | NM_003075, ENST00000267064 | 897 | 4447 | 7997 | None |
| Genewiz | TFORF0808 | SMARCC1 | NM_003074, ENST00000254480 | 898 | 4448 | 7998 | None |
| Genewiz | TFORF0809 | SOHLH1 | NM_001012415, ENST00000298466 | 899 | 4449 | 7999 | None |
| Genewiz | TFORF0810 | SOHLH1 | NM_001101677, ENST00000425225 | 900 | 4450 | 8000 | None |
| Genewiz | TFORF0811 | CDCA7L | NM_018719, ENST00000406877 | 901 | 4451 | 8001 | None |
| Genewiz | TFORF0812 | CDCA7L | NM_001127370, ENST00000356195 | 902 | 4452 | 8002 | None |
| Genewiz | TFORF0813 | CDCA7L | NM_001127371, ENST00000373934 | 903 | 4453 | 8003 | None |
| Genewiz | TFORF0814 | LHX1 | NM_005568, ENST00000614239 | 904 | 4454 | 8004 | None |
| Genewiz | TFORF0815 | LHX2 | NM_004789, ENST00000373615 | 905 | 4455 | 8005 | None |
| Genewiz | TFORF0816 | LHX3 | NM_014564, ENST00000371746 | 906 | 4456 | 8006 | None |
| Genewiz | TFORF0817 | LHX3 | NM_178138, ENST00000371748 | 907 | 4457 | 8007 | None |
| Genewiz | TFORF0818 | LHX3 | XM_005263410, ENST00000619587 | 908 | 4458 | 8008 | None |
| Genewiz | TFORF0819 | LHX5 | NM_022363, ENST00000261731 | 909 | 4459 | 8009 | None |
| Genewiz | TFORF0820 | LHX6 | NM_014368, ENST00000394319 | 910 | 4460 | 8010 | None |
| Genewiz | TFORF0821 | LHX6 | NM_001242333, ENST00000541397 | 911 | 4461 | 8011 | None |
| Genewiz | TFORF0822 | LHX6 | NM_199160, ENST00000340587 | 912 | 4462 | 8012 | None |
| Genewiz | TFORF0823 | LHX6 | NM_001242335, ENST00000559895 | 913 | 4463 | 8013 | None |
| Genewiz | TFORF0824 | LHX8 | NM_001256114, ENST00000356261 | 914 | 4464 | 8014 | None |
| Genewiz | TFORF0825 | LHX8 | NM_001001933, ENST00000294638 | 915 | 4465 | 8015 | None |
| Genewiz | TFORF0826 | LHX9 | XM_005245350, ENST00000561173 | 916 | 4466 | 8016 | None |
| Genewiz | TFORF0827 | LHX9 | NM_001014434, ENST00000367390 | 917 | 4467 | 8017 | None |
| Genewiz | TFORF0828 | ZNF585B | NM_152279, ENST00000532828 | 918 | 4468 | 8018 | None |
| Genewiz | TFORF0829 | SLC45A2 | NM_016180, ENST00000296589 | 919 | 4469 | 8019 | None |
| Genewiz | TFORF0830 | SLC45A2 | NM_001297417, ENST00000509381 | 920 | 4470 | 8020 | None |
| Genewiz | TFORF0831 | ZBTB33 | NM_006777, NM_001184742, ENST00000326624, | 921 | 4471 | 8021 | None |
| | | | ENST00000557385 | | | | |
| Genewiz | TFORF0832 | GTF2F1 | NM_002096, ENST00000394456 | 922 | 4472 | 8022 | None |
| Genewiz | TFORF0833 | GTF2F2 | NM_004128, ENST00000340473 | 923 | 4473 | 8023 | None |
| Genewiz | TFORF0834 | HSFY1 | NM_152584, ENST00000309834 | 924 | 4474 | 8024 | None |
| Genewiz | TFORF0835 | HSFY1 | NM_033108, ENST00000307393 | 925 | 4475 | 8025 | None |
| Genewiz | TFORF0836 | ZSCAN18 | XM_005259174, XM_011527238, XM_006723335, | 926 | 4476 | 8026 | None |
| | | | XM_011527239, NM_023926, NM_001145543, | | | | |
| | | | ENST00000240727, ENST00000601144 | | | | |
| Genewiz | TFORF0837 | ZSCAN18 | NM_001145544, ENST00000421612 | 927 | 4477 | 8027 | None |
| Genewiz | TFORF0838 | ZSCAN18 | NM_001145542, ENST00000600404 | 928 | 4478 | 8028 | None |
| Genewiz | TFORF0839 | HSFY2 | NM_001001877, ENST00000344884 | 929 | 4479 | 8029 | None |
| Genewiz | TFORF0840 | HSFY2 | NM_153716, ENST00000304790 | 930 | 4480 | 8030 | None |
| Genewiz | TFORF0841 | ZSCAN10 | NM_032805, XM_017023791, ENST00000576985 | 931 | 4481 | 8031 | None |
| Genewiz | TFORF0842 | ZSCAN10 | NM_001282415, ENST00000575108 | 932 | 4482 | 8032 | None |
| Genewiz | TFORF0843 | ZSCAN10 | NM_001282416, ENST00000538082 | 933 | 4483 | 8033 | None |
| Genewiz | TFORF0844 | ZSCAN12 | XM_011515014, XM_017011528, XM_011515015, | 934 | 4484 | 8034 | None |
| | | | NM_001163391 | | | | |
| Genewiz | TFORF0845 | ZSCAN12 | XM_011515017 | 935 | 4485 | 8035 | None |
| Genewiz | TFORF0846 | YBX1 | NM_004559, ENST00000321358 | 936 | 4486 | 8036 | None |
| Genewiz | TFORF0847 | YBX3 | NM_001145426, ENST00000279550 | 937 | 4487 | 8037 | None |
| Genewiz | TFORF0848 | YBX3 | NM_003651, ENST00000228251 | 938 | 4488 | 8038 | None |
| Genewiz | TFORF0849 | ZIC4 | NM_001168379, ENST00000425731 | 939 | 4489 | 8039 | None |
| Genewiz | TFORF0850 | ZIC4 | NM_032153, ENST00000383075, ENST00000484399, | 940 | 4490 | 8040 | None |
| | | | ENST00000473123 | | | | |
| Genewiz | TFORF0851 | ZIC4 | NM_001168378, ENST00000525172 | 941 | 4491 | 8041 | None |
| Genewiz | TFORF0852 | ZIC4 | NM_001243256, ENST00000491672 | 942 | 4492 | 8042 | None |
| Genewiz | TFORF0853 | ZIC5 | NM_033132, ENST00000267294 | 943 | 4493 | 8043 | None |
| Genewiz | TFORF0854 | VSX1 | NM_001256272, ENST00000429762 | 944 | 4494 | 8044 | None |
| Genewiz | TFORF0855 | VSX1 | XM_017027837, ENST00000409285 | 945 | 4495 | 8045 | None |
| Genewiz | TFORF0856 | VSX1 | NM_199425, ENST00000376707 | 946 | 4496 | 8046 | None |
| Genewiz | TFORF0857 | VSX1 | XM_017027838, ENST00000409958 | 947 | 4497 | 8047 | None |
| Genewiz | TFORF0858 | VSX1 | NM_001256271, ENST00000444511 | 948 | 4498 | 8048 | None |
| Genewiz | TFORF0859 | ZIC3 | XM_017029802, ENST00000370606 | 949 | 4499 | 8049 | None |
| Genewiz | TFORF0860 | NR1H4 | NM_001206978, ENST00000549996 | 950 | 4500 | 8050 | None |
| Genewiz | TFORF0861 | NR1H4 | NM_001206993, ENST00000551379 | 951 | 4501 | 8051 | None |
| Genewiz | TFORF0862 | NR1H4 | NM_001206992, ENST00000188403 | 952 | 4502 | 8052 | None |
| Genewiz | TFORF0863 | GTF21 | NM_032999, ENST00000573035 | 953 | 4503 | 8053 | None |
| Genewiz | TFORF0864 | GTF21 | NM_033001, ENST00000621734 | 954 | 4504 | 8054 | None |
| Genewiz | TFORF0865 | GTF2 | NM_033000, ENST00000614986 | 955 | 4505 | 8055 | None |
| Genewiz | TFORF0866 | GTF21 | NM_001518, ENST00000620879 | 956 | 4506 | 8056 | None |
| Genewiz | TFORF0867 | NR1H2 | NM_001256647, ENST00000411902 | 957 | 4507 | 8057 | None |
| Genewiz | TFORF0868 | NR1H3 | NM_001251934, NM_001251935, ENST00000616973 | 958 | 4508 | 8058 | None |
| Genewiz | TFORF0869 | NR1H3 | XM_011519805, XM_006718113, XM_005252706, | 959 | 4509 | 8059 | None |
| | | | XM_005252705, XM_006718112, XM_005252707, | | | | |
| | | | NM_005693, ENST00000441012, ENST00000467728 | | | | |
| Genewiz | TFORF0870 | NR1H3 | XM_005252713, NM_001130101, ENST00000407404, | 960 | 4510 | 8060 | None |
| | | | ENST00000405853 | | | | |
| Genewiz | TFORF0871 | NR1H3 | XM_011519806, ENST00000405576 | 961 | 4511 | 8061 | None |
| Genewiz | TFORF0872 | HOXB8 | XM_005257286, ENST00000576562 | 962 | 4512 | 8062 | None |
| Genewiz | TFORF0873 | HOXB8 | NM_024016, XM_017024564, ENST00000239144 | 963 | 4513 | 8063 | None |
| Genewiz | TFORF0874 | HOXB9 | NM_024017, ENST00000311177 | 964 | 4514 | 8064 | None |
| Genewiz | TFORF0875 | GLMP | NM_001256609, ENST00000614643 | 965 | 4515 | 8065 | None |
| Genewiz | TFORF0876 | GLMP | NM_001256608, ENST00000612353 | 966 | 4516 | 8066 | None |
| Genewiz | TFORF0877 | GLMP | NM_001256605, ENST00000622703 | 967 | 4517 | 8067 | None |
| Genewiz | TFORF0878 | HOXB2 | NM_002145, ENST00000330070 | 968 | 4518 | 8068 | None |
| Genewiz | TFORF0879 | HOXB3 | NM_002146, XM_011524719, XM_011524720, | 969 | 4519 | 8069 | None |
| | | | XM_011524710, XM_006721854, XM_005257277, | | | | |
| | | | ENST00000470495, ENST00000311626, ENST00000498678, | | | | |
| | | | ENST00000476342 | | | | |
| Genewiz | TFORF0880 | HOXB3 | XM_011524726, XM_005257280, ENST00000472863, | 970 | 4520 | 8070 | None |
| | | | ENST00000489475 | | | | |
| Genewiz | TFORF0881 | HOXB3 | XM_005257282, ENST00000460160 | 971 | 4521 | 8071 | None |
| Genewiz | TFORF0882 | HOXB1 | NM_002144, ENST00000239174 | 972 | 4522 | 8072 | None |
| Genewiz | TFORF0883 | HOXB7 | NM_004502, ENST00000239165 | 973 | 4523 | 8073 | None |
| Genewiz | TFORF0884 | HOXB4 | NM_024015, ENST00000332503 | 974 | 4524 | 8074 | None |
| Genewiz | TFORF0885 | PPARG | XM_011533844, ENST00000397000 | 975 | 4525 | 8075 | None |
| Genewiz | TFORF0886 | CUX2 | NM_015267, ENST00000261726 | 976 | 4526 | 8076 | None |
| Genewiz | TFORF0887 | ZNF384 | NM_001039920, ENST00000355772 | 977 | 4527 | 8077 | None |
| Genewiz | TFORF0888 | ZNF384 | NM_001135734, XM_017018942, XM_017018943, | 978 | 4528 | 8078 | None |
| | | | XM_017018941, ENST00000396801, ENST00000361959 | | | | |
| Genewiz | TFORF0889 | ZNF384 | NM_133476, XM_017018950, XM_017018949, | 979 | 4529 | 8079 | None |
| | | | ENST00000319770 | | | | |
| Genewiz | TFORF0890 | ING4 | NM_001127585, ENST00000444704 | 980 | 4530 | 8080 | None |
| Genewiz | TFORF0891 | ING4 | NM_001127582, ENST00000396807 | 981 | 4531 | 8081 | None |
| Genewiz | TFORF0892 | ING4 | NM_001127584, ENST00000446105 | 982 | 4532 | 8082 | None |
| Genewiz | TFORF0893 | ING4 | NM_016162, ENST00000341550 | 983 | 4533 | 8083 | None |
| Genewiz | TFORF0894 | ING4 | NM_001127586, ENST00000423703 | 984 | 4534 | 8084 | None |
| Genewiz | TFORF0895 | ING4 | NM_001127583, ENST00000412586 | 985 | 4535 | 8085 | None |
| Genewiz | TFORF0896 | ZNF383 | XM_017026423, XM_011526587, XM_017026422, | 986 | 4536 | 8086 | None |
| | | | XM_005258585, XM_005258587, XM_005258588, | | | | |
| | | | XM_011526586, XM_011526590, NM_152604, | | | | |
| | | | XM_017026424, XM_011526588, XM_011526589, | | | | |
| | | | ENST00000590503, ENST00000589413, ENST00000352998 | | | | |
| Genewiz | TFORF0897 | ING1 | NM_198217, ENST00000338450 | 987 | 4537 | 8087 | None |
| Genewiz | TFORF0898 | ING1 | NM_005537, ENST00000375774 | 988 | 4538 | 8088 | None |
| Genewiz | TFORF0899 | ING1 | NM_198218, ENST00000375775 | 989 | 4539 | 8089 | None |
| Genewiz | TFORF0900 | ZNF382 | NM_001256838, ENST00000439428 | 990 | 4540 | 8090 | None |
| Genewiz | TFORF0901 | ZNF382 | NM_032825, ENST00000292928 | 991 | 4541 | 8091 | None |
| Genewiz | TFORF0902 | PTF1A | NM_178161, ENST00000376504 | 992 | 4542 | 8092 | None |
| Genewiz | TFORF0903 | SPDEF | NM_001252294, ENST00000544425 | 993 | 4543 | 8093 | None |
| Genewiz | TFORF0904 | DNAJC1 | NM_022365, ENST00000376980 | 994 | 4544 | 8094 | None |
| Genewiz | TFORF0905 | DNAJC2 | NM_014377, ENST00000379263 | 995 | 4545 | 8095 | None |
| Genewiz | TFORF0906 | DNAJC2 | NM_001129887, ENST00000249270 | 996 | 4546 | 8096 | None |
| Genewiz | TFORF0907 | BCLAF1 | NM_001077441, ENST00000530767 | 997 | 4547 | 8097 | None |
| Genewiz | TFORF0908 | BCLAF1 | NM_001077440, ENST00000353331, ENST00000392348 | 998 | 4548 | 8098 | None |
| Genewiz | TFORF0909 | BCLAF1 | NM_001301038, ENST00000527759 | 999 | 4549 | 8099 | None |
| Genewiz | TFORF0910 | BCLAF1 | NM_014739, ENST00000531224 | 1000 | 4550 | 8100 | None |
| Genewiz | TFORF0911 | BCLAF1 | XM_005267237, ENST00000527536 | 1001 | 4551 | 8101 | None |
| Genewiz | TFORF0912 | ZNF831 | XM_006723698, XM_017027643, XM_017027644, | 1002 | 4552 | 8102 | None |
| | | | XM_011528534, XM_017027642, XM_005260272, | | | | |
| | | | XM_011528537, XM_011528536, XM_005260273, | | | | |
| | | | XM_011528538, NM_178457, ENST00000637017, | | | | |
| | | | ENST00000371030 | | | | |
| Genewiz | TFORF0913 | ZNF835 | NM_001005850, XM_005259383, XM_005259382, | 1003 | 4553 | 8103 | None |
| | | | ENST00000537055 | | | | |
| Genewiz | TFORF0914 | ZNF836 | XM_011526558, XM_011526559, NM_001102657, | 1004 | 4554 | 8104 | None |
| | | | ENST00000597252 | | | | |
| Genewiz | TFORF0915 | NCOA2 | NM_001321707, NM_006540, NM_001321703, | 1005 | 4555 | 8105 | None |
| | | | ENST00000452400 | | | | |
| Genewiz | TFORF0916 | NCOA3 | NM_001174088, ENST00000371997 | 1006 | 4556 | 8106 | None |
| Genewiz | TFORF0917 | NCOA3 | NM_181659, ENST00000371998 | 1007 | 4557 | 8107 | None |
| Genewiz | TFORF0918 | NCOA1 | XM_017005169, XM_017005168, XM_005264628, | 1008 | 4558 | 8108 | None |
| | | | NM_147223, ENST00000405141, ENST00000288599 | | | | |
| Genewiz | TFORF0919 | NCOA1 | XM_005264625, NM_003743, ENST00000406961, | 1009 | 4559 | 8109 | None |
| | | | ENST00000348332 | | | | |
| Genewiz | TFORF0920 | NCOA1 | XM_005264626, NM_147233, ENST00000395856 | 1010 | 4560 | 8110 | None |
| Genewiz | TFORF0921 | BSX | NM_001098169, ENST00000343035 | 1011 | 4561 | 8111 | None |
| Genewiz | TFORF0922 | NR2F1 | NM_005654, ENST00000327111 | 1012 | 4562 | 8112 | None |
| Genewiz | TFORF0923 | NR2F2 | NM_001145155, ENST00000421109 | 1013 | 4563 | 8113 | None |
| Genewiz | TFORF0924 | NR2F2 | NM_021005, ENST00000394166 | 1014 | 4564 | 8114 | None |
| Genewiz | TFORF0925 | NR2F2 | NM_001145156, NM_001145157, ENST00000394171, | 1015 | 4565 | 8115 | None |
| | | | ENST00000453270 | | | | |
| Genewiz | TFORF0926 | ATOH7 | NM_145178, ENST00000373673 | 1016 | 4566 | 8116 | None |
| Genewiz | TFORF0927 | DDB2 | NM_001300734, ENST00000378600 | 1017 | 4567 | 8117 | None |
| Genewiz | TFORF0928 | DDB1 | NM_001923, ENST00000301764 | 1018 | 4568 | 8118 | None |
| Genewiz | TFORF0929 | ATOH8 | NM_032827, ENST00000306279 | 1019 | 4569 | 8119 | None |
| Genewiz | TFORF0930 | ZNF83 | NM_001277951, NM_001105549, NM_001105551, | 1020 | 4570 | 8120 | None |
| | | | NM_001277952, NM_001105550, NM_001105552, | | | | |
| | | | NM_018300, NM_001277947, NM_001277945, | | | | |
| | | | NM_001277949, NM_001277946, NM_001277948, | | | | |
| | | | XM_017026951, ENST00000301096, ENST00000536937, | | | | |
| | | | ENST00000597597, ENST00000541777, ENST00000545872 | | | | |
| Genewiz | TFORF0931 | MECP2 | NM_001110792, ENST00000453960 | 1021 | 4571 | 8121 | None |
| Genewiz | TFORF0932 | ZNF80 | XM_017007133, XM_017007134, XM_017007136, | 1022 | 4572 | 8122 | None |
| | | | XM_017007132, XM_017007135, NM_007136, | | | | |
| | | | ENST00000482457, ENST00000308095, ENST00000619534 | | | | |
| Genewiz | TFORF0933 | ZNF85 | NM_001256172, ENST00000300540 | 1023 | 4573 | 8123 | None |
| Genewiz | TFORF0934 | ZNF85 | NM_003429, ENST00000328178 | 1024 | 4574 | 8124 | None |
| Genewiz | TFORF0935 | ZNF84 | NM_003428, NM_001289971, NM_001127372, | 1025 | 4575 | 8125 | None |
| | | | XM_005266185, XM_005266186, XM_011534832, | | | | |
| | | | NM_001289972, ENST00000392319, ENST00000539354, | | | | |
| | | | ENST00000327668 | | | | |
| Genewiz | TFORF0936 | SS18 | NM_005637, ENST00000269137 | 1026 | 4576 | 8126 | None |
| Genewiz | TFORF0937 | SS18 | NM_001308201, XM_011526145, ENST00000542420 | 1027 | 4577 | 8127 | None |
| Genewiz | TFORF0938 | SS18 | NM_001007559, ENST00000415083 | 1028 | 4578 | 8128 | None |
| Genewiz | TFORF0939 | ZNF473 | NM_001308424, ENST00000445728 | 1029 | 4579 | 8129 | None |
| Genewiz | TFORF0940 | ZNF639 | XM_017006551, NM_001303426, NM_001303425, | 1030 | 4580 | 8130 | None |
| | | | XM_017006552, XM_017006550, XM_017006553, | | | | |
| | | | NM_016331, ENST00000496856, ENST0326361, | | | | |
| | | | ENST00000484866, ENST00000621687 | | | | |
| Genewiz | TFORF0941 | LMO1 | XM_011520099, XM_011520098, ENST00000534484 | 1031 | 4581 | 8131 | None |
| Genewiz | TFORF0942 | LMO1 | NM_001270428, ENST00000428101 | 1032 | 4582 | 8132 | None |
| Genewiz | TFORF0943 | LMO2 | NM_005574, ENST00000257818 | 1033 | 4583 | 8133 | None |
| Genewiz | TFORF0944 | LMO3 | NM_001243612, ENST00000541295 | 1034 | 4584 | 8134 | None |
| Genewiz | TFORF0945 | LMO3 | NM_001243613, ENST00000540445 | 1035 | 4585 | 8135 | None |
| Genewiz | TFORF0946 | LMO3 | NM_001243611, ENST00000261169 | 1036 | 4586 | 8136 | None |
| Genewiz | TFORF0947 | EMX2 | NM_001165924, ENST00000442245 | 1037 | 4587 | 8137 | None |
| Genewiz | TFORF0948 | EMX2 | NM_004098, ENST00000553456 | 1038 | 4588 | 8138 | None |
| Genewiz | TFORF0949 | EMX1 | NM_004097, ENST00000258106 | 1039 | 4589 | 8139 | None |
| Genewiz | TFORF0950 | PBRM1 | XM_017006765, ENST00000337303 | 1040 | 4590 | 8140 | None |
| Genewiz | TFORF0951 | PBRM1 | XM_017006748, XM_017006749, XM_017006750, | 1041 | 4591 | 8141 | None |
| | | | ENST00000296302 | | | | |
| Genewiz | TFORF0952 | PBRM1 | NM_018313, ENST00000394830 | 1042 | 4592 | 8142 | None |
| Genewiz | TFORF0953 | PBRM1 | XM_017006758, XM_017006757, ENST00000409057 | 1043 | 4593 | 8143 | None |
| Genewiz | TFORF0954 | CDIP1 | NM_001199055, ENST00000563507 | 1044 | 4594 | 8144 | None |
| Genewiz | TFORF0955 | CDIP1 | NM_001199056, ENST00000562334 | 1045 | 4595 | 8145 | None |
| Genewiz | TFORF0956 | MYF5 | NM_005593, ENST00000228644 | 1046 | 4596 | 8146 | None |
| Genewiz | TFORF0957 | ZNF497 | NM_198458, NM_001207009, ENST00000311044, | 1047 | 4597 | 8147 | None |
| | | | ENST00000425453 | | | | |
| Genewiz | TFORF0958 | ZNF496 | XM_005273330, NM_032752, ENST00000294753 | 1048 | 4598 | 8148 | None |
| Genewiz | TFORF0959 | ERF | NM_001308402, NM_001301035, NM_001312656, | 1049 | 4599 | 8149 | None |
| | | | XM_017026468, XM_017026469, ENST00000440177 | | | | |
| Genewiz | TFORF0960 | ERG | NM_001243428, NM_001136154, ENST00000417133, | 1050 | 4600 | 8150 | None |
| | | | ENST00000398919 | | | | |
| Genewiz | TFORF0961 | ERG | NM_001243429, ENST00000398897 | 1051 | 4601 | 8151 | None |
| Genewiz | TFORF0962 | ERG | NM_004449, ENST00000398911, ENST00000442448 | 1052 | 4602 | 8152 | None |
| Genewiz | TFORF0963 | ERG | NM_001136155, ENST00000453032 | 1053 | 4603 | 8153 | None |
| Genewiz | TFORF0964 | ERG | XM_017028288, ENST00000398905 | 1054 | 4604 | 8154 | None |
| Genewiz | TFORF0965 | ZNF493 | NM_175910, ENST00000355504 | 1055 | 4605 | 8155 | None |
| Genewiz | TFORF0966 | ZNF493 | NM_145326, ENST00000339914 | 1056 | 4606 | 8156 | None |
| Genewiz | TFORF0967 | ZNF493 | NM_001076678, ENST00000392288 | 1057 | 4607 | 8157 | None |
| Genewiz | TFORF0968 | HAND1 | NM_004821, ENST00000231121 | 1058 | 4608 | 8158 | None |
| Genewiz | TFORF0969 | HAND2 | NM_021973, ENST00000359562 | 1059 | 4609 | 8159 | None |
| Genewiz | TFORF0970 | ZNF124 | NM_001243740, ENST00000472531 | 1060 | 4610 | 8160 | None |
| Genewiz | TFORF0971 | ZNF124 | NM_003431, ENST00000340684 | 1061 | 4611 | 8161 | None |
| Genewiz | TFORF0972 | ZNF124 | NM_001297567, ENST00000491356 | 1062 | 4612 | 8162 | None |
| Genewiz | TFORF0973 | ZNF124 | NM_001297568, ENST00000543802 | 1063 | 4613 | 8163 | None |
| Genewiz | TFORF0974 | GFI1B | XM_011519068, XM_017015175, XM_011519069, | 1064 | 4614 | 8164 | None |
| | | | XM_006717297, ENST00000636137 | | | | |
| Genewiz | TFORF0975 | GFI1B | NM_004188, XM_011519070, ENST00000339463, | 1065 | 4615 | 8165 | None |
| | | | ENST00000372122 | | | | |
| Genewiz | TFORF0976 | GFI1B | XM_017015176, NM_001135031, ENST00000372123 | 1066 | 4616 | 8166 | None |
| Genewiz | TFORF0977 | ZNF121 | XM_017027239, NM_001308269, NM_001008727, | 1067 | 4617 | 8167 | None |
| | | | ENST00000586602, ENST00000320451 | | | | |
| Genewiz | TFORF0978 | KLF7 | NM_001270944, ENST00000412414 | 1068 | 4618 | 8168 | None |
| Genewiz | TFORF0979 | KLF7 | NM_003709, XM_017005161, ENST00000309446 | 1069 | 4619 | 8169 | None |
| Genewiz | TFORF0980 | KLF7 | NM_001270943, ENST00000421199 | 1070 | 4620 | 8170 | None |
| Genewiz | TFORF0981 | KLF6 | NM_001300, ENST00000497571 | 1071 | 4621 | 8171 | None |
| Genewiz | TFORF0982 | KLF6 | NM_001160125, ENST00000542957 | 1072 | 4622 | 8172 | None |
| Genewiz | TFORF0983 | KLF5 | NM_001730, ENST00000377687 | 1073 | 4623 | 8173 | None |
| Genewiz | TFORF0984 | KLF5 | NM_001286818, ENST00000539231 | 1074 | 4624 | 8174 | None |
| Genewiz | TFORF0985 | KLF4 | NM_004235, ENST00000374672 | 1075 | 4625 | 8175 | None |
| Genewiz | TFORF0986 | GZF1 | XM_011529321, XM_011529322, NM_022482, | 1076 | 4626 | 8176 | None |
| | | | NM_001317012, ENST00000338121, ENST00000377051 | | | | |
| Genewiz | TFORF0987 | KLF2 | NM_016270, ENST00000248071 | 1077 | 4627 | 8177 | None |
| Genewiz | TFORF0988 | KLF1 | NM_006563, ENST00000264834 | 1078 | 4628 | 8178 | None |
| Genewiz | TFORF0989 | KLF9 | NM_001206, ENST00000377126 | 1079 | 4629 | 8179 | None |
| Genewiz | TFORF0990 | KLF8 | XM_006724576, ENST00000358094 | 1080 | 4630 | 8180 | None |
| Genewiz | TFORF0991 | KLF8 | XM_005261979, XM_005261977, NM_001324102, | 1081 | 4631 | 8181 | None |
| | | | NM_007250, ENST00000468660 | | | | |
| Genewiz | TFORF0992 | KLF8 | NM_001324099, ENST00000640927 | 1082 | 4632 | 8182 | None |
| Genewiz | TFORF0993 | KLF8 | NM_001159296, XM_006724575, ENST00000374928 | 1083 | 4633 | 8183 | None |
| Genewiz | TFORF0994 | ZNF304 | NM_020657, ENST00000391705, ENST00000282286 | 1084 | 4634 | 8184 | None |
| Genewiz | TFORF0995 | ZNF304 | NM_001290318, ENST00000443917 | 1085 | 4635 | 8185 | None |
| Genewiz | TFORF0996 | ZNF304 | NM_001290319, ENST00000598744 | 1086 | 4636 | 8186 | None |
| Genewiz | TFORF0997 | ZNF302 | XM_011527111, NM_001289189, NM_001289188, | 1087 | 4637 | 8187 | None |
| | | | XM_017026986, ENST00000507959 | | | | |
| Genewiz | TFORF0998 | ZNF302 | NM_001289190, NM_001289191, NM_001289192, | 1088 | 4638 | 8188 | None |
| | | | NM_018675, ENST00000505365 | | | | |
| Genewiz | TFORF0999 | ZNF302 | NM_001289185, NM_001289184, NM_001289182, | 1089 | 4639 | 8189 | None |
| | | | XM_017026982, ENST00000613363 | | | | |
| Genewiz | TFORF1000 | ZNF302 | NM_001289181, XM_017026979, XM_017026981, | 1090 | 4640 | 8190 | None |
| | | | XM_017026980, ENST00000446502 | | | | |
| Genewiz | TFORF1001 | REST | NM_005612, NM_001193508, XM_011534401, | 1091 | 4641 | 8191 | None |
| | | | ENST00000309042, ENST00000619101 | | | | |
| Genewiz | TFORF1002 | ZNF300 | NM_001172832, ENST00000418587 | 1092 | 4642 | 8192 | None |
| Genewiz | TFORF1003 | ZNF300 | NM_001172831, ENST00000446148 | 1093 | 4643 | 8193 | None |
| Genewiz | TFORF1004 | POU1F1 | NM_001122757, ENST00000344265 | 1094 | 4644 | 8194 | None |
| Genewiz | TFORF1005 | POU1F1 | NM_000306, ENST00000350375 | 1095 | 4645 | 8195 | None |
| Genewiz | TFORF1006 | ZNF564 | NM_144976, ENST00000339282 | 1096 | 4646 | 8196 | None |
| Genewiz | TFORF1007 | ZNF544 | NM_001320771, NM_001320770, NM_001320773, | 1097 | 4647 | 8197 | None |
| | | | ENST00000600044, ENST00000600220 | | | | |
| Genewiz | TFORF1008 | ZNF544 | NM_001320788, NM_001320792, NM_001320791, | 1098 | 4648 | 8198 | None |
| | | | NM_001320789, ENST00000599227, ENST00000594384, | | | | |
| | | | ENST00000596825 | | | | |
| Genewiz | TFORF1009 | ZNF544 | NM_001320782, ENST00000596929 | 1099 | 4649 | 8199 | None |
| Genewiz | TFORF1010 | ZNF547 | NM_173631, ENST00000282282 | 1100 | 4650 | 8200 | None |
| Genewiz | TFORF1011 | ZNF546 | NM_178544, XM_011526899, ENST00000347077 | 1101 | 4651 | 8201 | None |
| Genewiz | TFORF1012 | ZNF546 | NM_001297763, ENST00000600094 | 1102 | 4652 | 8202 | None |
| Genewiz | TFORF1013 | NCL | NM_005381, ENST00000322723 | 1103 | 4653 | 8203 | None |
| Genewiz | TFORF1014 | ZNF540 | NM_001172226, ENST00000589117 | 1104 | 4654 | 8204 | None |
| Genewiz | TFORF1015 | ZNF540 | NM_152606, NM_001172225, ENST00000592533, | 1105 | 4655 | 8205 | None |
| | | | ENST00000316433, ENST00000343599 | | | | |
| Genewiz | TFORF1016 | ZNF549 | NM_153263, ENST00000240719 | 1106 | 4656 | 8206 | None |
| Genewiz | TFORF1017 | ZNF548 | NM_001172773, ENST00000336128 | 1107 | 4657 | 8207 | None |
| Genewiz | TFORF1018 | ZNF548 | NM_152909, ENST00000366197 | 1108 | 4658 | 8208 | None |
| Genewiz | TFORF1019 | SCRT1 | NM_031309, ENST00000569446 | 1109 | 4659 | 8209 | None |
| Genewiz | TFORF1020 | ZXDC | NM_025112, ENST00000389709 | 1110 | 4660 | 8210 | None |
| Genewiz | TFORF1021 | ZXDC | NM_001040653, ENST00000336332 | 1111 | 4661 | 8211 | None |
| Genewiz | TFORF1022 | SCRT2 | NM_033129, ENST00000246104 | 1112 | 4662 | 8212 | None |
| Genewiz | TFORF1023 | FOXI1 | NM_012188, ENST00000306268 | 1113 | 4663 | 8213 | None |
| Genewiz | TFORF1024 | FOXI3 | NM_001135649, ENST00000428390 | 1114 | 4664 | 8214 | None |
| Genewiz | TFORF1025 | FOXI2 | NM_207426, ENST00000388920 | 1115 | 4665 | 8215 | None |
| Genewiz | TFORF1026 | RARA | NM_001024809, ENST00000394081 | 1116 | 4666 | 8216 | None |
| Genewiz | TFORF1027 | RARA | XM_005257552, ENST00000394086 | 1117 | 4667 | 8217 | None |
| Genewiz | TFORF1028 | RARA | NM_001145302, ENST00000425707 | 1118 | 4668 | 8218 | None |
| Genewiz | TFORF1029 | RARB | NM_016152, NM_001290276, NM_001290217, | 1119 | 4669 | 8219 | None |
| | | | ENST00000437042, ENST00000458646 | | | | |
| Genewiz | TFORF1030 | RARG | NM_001243732, ENST00000543726 | 1120 | 4670 | 8220 | None |
| Genewiz | TFORF1031 | RARG | NM_001042728, ENST00000338561 | 1121 | 4671 | 8221 | None |
| Genewiz | TFORF1032 | RARG | NM_001243730, ENST00000394426 | 1122 | 4672 | 8222 | None |
| Genewiz | TFORF1033 | MYT1 | NM_004535, ENST00000328439 | 1123 | 4673 | 8223 | None |
| Genewiz | TFORF1034 | WT1 | NM_000378, ENST00000452863, ENST00000639563 | 1124 | 4674 | 8224 | None |
| Genewiz | TFORF1035 | WT1 | NM_001198552, ENST00000530998 | 1125 | 4675 | 8225 | None |
| Genewiz | TFORF1036 | WT1 | NM_024426, ENST00000332351, ENST00000640146 | 1126 | 4676 | 8226 | None |
| Genewiz | TFORF1037 | WT1 | NM_024424, ENST00000448076, ENST00000639907 | 1127 | 4677 | 8227 | None |
| Genewiz | TFORF1038 | WT1 | NM_001198551, ENST00000379079 | 1128 | 4678 | 8228 | None |
| Genewiz | TFORF1039 | TSC22D1 | NM_001243799, ENST00000501704 | 1129 | 4679 | 8229 | None |
| Genewiz | TFORF1040 | TSC22D1 | NM_006022, ENST00000261489 | 1130 | 4680 | 8230 | None |
| Genewiz | TFORF1041 | TSC22D1 | NM_183422, ENST00000458659 | 1131 | 4681 | 8231 | None |
| Genewiz | TFORF1042 | TSC22D1 | NM_001243797, NM_001243798, ENST00000622051, | 1132 | 4682 | 8232 | None |
| | | | ENST00000611198 | | | | |
| Genewiz | TFORF1043 | TSC22D3 | NM_004089, ENST00000372397 | 1133 | 4683 | 8233 | None |
| Genewiz | TFORF1044 | TSC22D3 | NM_198057, NM_001318468, NM_001318470, | 1134 | 4684 | 8234 | None |
| | | | XM_017029335, XM_005262100, XM_005262102, | | | | |
| | | | XM_005262103, XM_011530884, XM_005262099, | | | | |
| | | | ENST00000315660, ENST00000372383, ENST00000372384, | | | | |
| | | | ENST00000506081 | | | | |
| Genewiz | TFORF1045 | TSC22D2 | NM_014779, ENST00000361875 | 1135 | 4685 | 8235 | None |
| Genewiz | TFORF1046 | BAZ1B | NM_032408, XM_017012773, ENST00000339594, | 1136 | 4686 | 8236 | None |
| | | | ENST00000404251 | | | | |
| Genewiz | TFORF1047 | SNAI2 | NM_003068, ENST00000020945 | 1137 | 4687 | 8237 | None |
| Genewiz | TFORF1048 | PLAGL2 | NM_002657, XM_005260436, XM_011528864, | 1138 | 4688 | 8238 | None |
| | | | XM_011528863, ENST00000246229 | | | | |
| Genewiz | TFORF1049 | HKR1 | XM_017026677, XM_017026676, ENST00000589392 | 1139 | 4689 | 8239 | None |
| Genewiz | TFORF1050 | HKR1 | XM_017026686, XM_017026689, XM_017026690, | 1140 | 4690 | 8240 | None |
| | | | XM_017026687, XM_017026688, ENST00000541583 | | | | |
| Genewiz | TFORF1051 | HKR1 | NM_181786, ENST00000324411 | 1141 | 4691 | 8241 | None |
| Genewiz | TFORF1052 | HKR1 | XM_017026679, XM_017026678, ENST00000392153 | 1142 | 4692 | 8242 | None |
| Genewiz | TFORF1053 | HKR1 | XM_017026698, XM_017026702, XM_017026701, | 1143 | 4693 | 8243 | None |
| | | | XM_017026695, XM_017026692, XM_017026693, | | | | |
| | | | XM_017026700, XM_017026694, XM_017026704, | | | | |
| | | | XM_017026703, XM_017026697, XM_017026696, | | | | |
| | | | XM_017026691, XM_017026699, XM_017026705, | | | | |
| | | | ENST00000591471, ENST00000544914 | | | | |
| Genewiz | TFORF1054 | PLAGL1 | NM_001317159, NM_001080951, NM_001289043, | 1144 | 4694 | 8244 | None |
| | | | NM_001289044, NM_001289042, NM_001317157, | | | | |
| | | | NM_001317156, NM_001289046, NM_001317162, | | | | |
| | | | NM_001080954, NM_001080952, NM_006718, | | | | |
| | | | NM_001289048, NM_001289045, NM_001317161, | | | | |
| | | | NM_001080953, NM_001289049, NM_001289047, | | | | |
| | | | ENST00000360537, ENST00000354765, ENST0416623, | | | | |
| | | | ENST00000444202, ENST00000625622, ENST00000367571 | | | | |
| Genewiz | TFORF1055 | PLAGL1 | NM_001289039, NM_001289040, NM_001080955, | 1145 | 4695 | 8245 | None |
| | | | NM_001289037, NM_001289038, NM_001317158, | | | | |
| | | | NM_001080956, NM_001289041, NM_001317160, | | | | |
| | | | ENST00000437412, ENST00000367572, ENST00000417959 | | | | |
| Genewiz | TFORF1056 | NFATC1 | NM_001278673, ENST00000545796 | 1146 | 4696 | 8246 | None |
| Genewiz | TFORF1057 | NFATC1 | NM_001278675, ENST00000592223 | 1147 | 4697 | 8247 | None |
| Genewiz | TFORF1058 | NFATC1 | NM_172389, ENST00000318065 | 1148 | 4698 | 8248 | None |
| Genewiz | TFORF1059 | NFATC1 | NM_006162, ENST00000253506 | 1149 | 4699 | 8249 | None |
| Genewiz | TFORF1060 | NFATC1 | NM_001278672, ENST00000586434 | 1150 | 4700 | 8250 | None |
| Genewiz | TFORF1061 | NFATC1 | NM_001278670, ENST00000542384 | 1151 | 4701 | 8251 | None |
| Genewiz | TFORF1062 | NFATC1 | NM_001278669, ENST00000427363 | 1152 | 4702 | 8252 | None |
| Genewiz | TFORF1063 | NFATC1 | NM_172388, ENST00000397790 | 1153 | 4703 | 8253 | None |
| Genewiz | TFORF1064 | NFATC1 | NM_172387, ENST00000329101 | 1154 | 4704 | 8254 | None |
| Genewiz | TFORF1065 | NFATC2 | NM_001258296, NM_001258294, ENST00000610033, | 1155 | 4705 | 8255 | None |
| | | | ENST00000609507 | | | | |
| Genewiz | TFORF1066 | NFATC2 | NM_173091, ENST00000396009 | 1156 | 4706 | 8256 | None |
| Genewiz | TFORF1067 | NFATC2 | NM_001258292, ENST00000609943 | 1157 | 4707 | 8257 | None |
| Genewiz | TFORF1068 | NFATC2 | NM_001136021, ENST00000414705 | 1158 | 4708 | 8258 | None |
| Genewiz | TFORF1069 | NFATC2 | NM_012340, ENST00000371564 | 1159 | 4709 | 8259 | None |
| Genewiz | TFORF1070 | NFATC3 | NM_004555, ENST00000329524 | 1160 | 4710 | 8260 | None |
| Genewiz | TFORF1071 | NFATC3 | NM_173163, ENST00000349223 | 1161 | 4711 | 8261 | None |
| Genewiz | TFORF1072 | NFATC4 | NM_001136022, ENST00000413692 | 1162 | 4712 | 8262 | None |
| Genewiz | TFORF1073 | NFATC4 | XM_011536797, ENST00000555453 | 1163 | 4713 | 8263 | None |
| Genewiz | TFORF1074 | NFATC4 | NM_001198966, ENST00000553879, ENST00000554344 | 1164 | 4714 | 8264 | None |
| Genewiz | TFORF1075 | NFATC4 | NM_001198965, ENST00000554050 | 1165 | 4715 | 8265 | None |
| Genewiz | TFORF1076 | NFATC4 | NM_001288802, ENST00000422617 | 1166 | 4716 | 8266 | None |
| Genewiz | TFORF1077 | NFATC4 | XM_011536799, ENST00000556169 | 1167 | 4717 | 8267 | None |
| Genewiz | TFORF1078 | NFATC4 | NM_001198967, ENST00000554591 | 1168 | 4718 | 8268 | None |
| Genewiz | TFORF1079 | NFATC4 | NM_004554, ENST00000250373 | 1169 | 4719 | 8269 | None |
| Genewiz | TFORF1080 | NOBOX | NM_001080413, ENST00000467773 | 1170 | 4720 | 8270 | None |
| Genewiz | TFORF1081 | NOBOX | XM_017011742, ENST00000483238 | 1171 | 4721 | 8271 | None |
| Genewiz | TFORF1082 | FUBP1 | NM_003902, ENST00000370768 | 1172 | 4722 | 8272 | None |
| Genewiz | TFORF1083 | FUBP1 | XM_017002743, ENST00000294623 | 1173 | 4723 | 8273 | None |
| Genewiz | TFORF1084 | SPZ1 | NM_032567, ENST00000296739 | 1174 | 4724 | 8274 | None |
| Genewiz | TFORF1085 | AP2B1 | NM_001282, XM_017024284, ENST00000621914 | 1175 | 4725 | 8275 | None |
| Genewiz | TFORF1086 | GTF2E1 | NM_005513, XM_011512745, XM_011512744, | 1176 | 4726 | 8276 | None |
| | | | ENST00000283875 | | | | |
| Genewiz | TFORF1087 | TULP3 | NM_001160408, ENST00000397132 | 1177 | 4727 | 8277 | None |
| Genewiz | TFORF1088 | TULP3 | NM_003324, ENST00000448120 | 1178 | 4728 | 8278 | None |
| Genewiz | TFORF1089 | TULP1 | NM_003322, ENST00000229771 | 1179 | 4729 | 8279 | None |
| Genewiz | TFORF1090 | TULP1 | NM_001289395, ENST00000322263 | 1180 | 4730 | 8280 | None |
| Genewiz | TFORF1091 | ZBTB8A | NM_001291496, ENST00000316459 | 1181 | 4731 | 8281 | None |
| Genewiz | TFORF1092 | ZBTB8A | NM_001040441, ENST00000373510 | 1182 | 4732 | 8282 | None |
| Genewiz | TFORF1093 | ZBTB8B | NM_001145720, ENST00000609129 | 1183 | 4733 | 8283 | None |
| Genewiz | TFORF1094 | HSFX2 | NM_001164415, ENST00000598963 | 1184 | 4734 | 8284 | None |
| Genewiz | TFORF1095 | EN1 | NM_001426, ENST00000295206 | 1185 | 4735 | 8285 | None |
| Genewiz | TFORF1096 | EN2 | NM_001427, ENST00000297375 | 1186 | 4736 | 8286 | None |
| Genewiz | TFORF1097 | HSFX1 | NM_016153, ENST00000370416 | 1187 | 4737 | 8287 | None |
| Genewiz | TFORF1098 | UBP1 | NM_001128160, ENST00000447368 | 1188 | 4738 | 8288 | None |
| Genewiz | TFORF1099 | UBP1 | NM_014517, NM_001128161, ENST00000283629, | 1189 | 4739 | 8289 | None |
| | | | ENST00000283628 | | | | |
| Genewiz | TFORF1100 | GTF2IRD1 | XM_006716182, XM_006716183, ENST00000476977 | 1190 | 4740 | 8290 | None |
| Genewiz | TFORF1101 | GTF2IRD1 | NM_005685, XM_017012804, ENST00000424337 | 1191 | 4741 | 8291 | None |
| Genewiz | TFORF1102 | GTF2IRD1 | NM_016328, ENST00000265755 | 1192 | 4742 | 8292 | None |
| Genewiz | TFORF1103 | GTF2IRD1 | NM_001199207, ENST00000455841 | 1193 | 4743 | 8293 | None |
| Genewiz | TFORF1104 | GTF2IRD2 | NM_173537, ENST00000451013 | 1194 | 4744 | 8294 | None |
| Genewiz | TFORF1105 | GTF2IRD2 | NM_001281447, ENST00000614386 | 1195 | 4745 | 8295 | None |
| Genewiz | TFORF1106 | EPAS1 | NM_001430, ENST00000263734 | 1196 | 4746 | 8296 | None |
| Genewiz | TFORF1107 | ZNF37A | NM_001324258, NM_001324256, NM_001324257, | 1197 | 4747 | 8297 | None |
| | | | XM_017016621, ENST00000638053 | | | | |
| Genewiz | TFORF1108 | CREBBP | NM_004380, ENST00000262367 | 1198 | 4748 | 8298 | None |
| Genewiz | TFORF1109 | CREBBP | NM_001079846, ENST00000382070 | 1199 | 4749 | 8299 | None |
| Genewiz | TFORF1110 | ISX | NM_001303508, ENST00000404699, ENST00000308700 | 1200 | 4750 | 8300 | None |
| Genewiz | TFORF1111 | RCOR3 | NM_001136225, ENST00000452621 | 1201 | 4751 | 8301 | None |
| Genewiz | TFORF1112 | RCOR3 | NM_018254, ENST00000367005 | 1202 | 4752 | 8302 | None |
| Genewiz | TFORF1113 | RCOR3 | NM_001136223, ENST00000419091 | 1203 | 4753 | 8303 | None |
| Genewiz | TFORF1114 | RCOR3 | NM_001136224, ENST00000367006 | 1204 | 4754 | 8304 | None |
| Genewiz | TFORF1115 | RCOR2 | NM_173587, ENST00000301459 | 1205 | 4755 | 8305 | None |
| Genewiz | TFORF1116 | RCOR1 | NM_015156, ENST00000262241 | 1206 | 4756 | 8306 | None |
| Genewiz | TFORF1117 | BRIP1 | NM_032043, ENST00000259008 | 1207 | 4757 | 8307 | None |
| Genewiz | TFORF1118 | SKP2 | NM_001243120, ENST00000620197 | 1208 | 4758 | 8308 | None |
| Genewiz | TFORF1119 | ZNF714 | NM_182515, ENST00000456283, ENST00000610902 | 1209 | 4759 | 8309 | None |
| Genewiz | TFORF1120 | IFI16 | NM_001206567, ENST00000359709 | 1210 | 4760 | 8310 | None |
| Genewiz | TFORF1121 | IFI16 | NM_005531, ENST00000368131, ENST00000368132 | 1211 | 4761 | 8311 | None |
| Genewiz | TFORF1122 | HNRNPAB | NM_004499, ENST00000355836, ENST00000506259 | 1212 | 4762 | 8312 | None |
| Genewiz | TFORF1123 | HNRNPAB | NM_031266, ENST00000358344, ENST00000504898 | 1213 | 4763 | 8313 | None |
| Genewiz | TFORF1124 | E2F7 | NM_203394, ENST00000322886 | 1214 | 4764 | 8314 | None |
| Genewiz | TFORF1125 | ENO1 | NM_001428, ENST00000234590 | 1215 | 4765 | 8315 | None |
| Genewiz | TFORF1126 | THAP3 | XM_005263532, NM_001195752, ENST00000307896 | 1216 | 4766 | 8316 | None |
| Genewiz | TFORF1127 | THAP3 | NM_138350, ENST00000377627 | 1217 | 4767 | 8317 | None |
| Genewiz | TFORF1128 | THAP3 | NM_001195753, ENST00000054650 | 1218 | 4768 | 8318 | None |
| Genewiz | TFORF1129 | ZNF808 | XM_005258909, ENST00000487863 | 1219 | 4769 | 8319 | None |
| Genewiz | TFORF1130 | ZNF808 | NM_001321425, NM_001039886, NM_001321424, | 1220 | 4770 | 8320 | None |
| | | | ENST00000359798 | | | | |
| Genewiz | TFORF1131 | BNC1 | NM_001717, ENST00000345382 | 1221 | 4771 | 8321 | None |
| Genewiz | TFORF1132 | BNC1 | NM_001301206, ENST00000569704 | 1222 | 4772 | 8322 | None |
| Genewiz | TFORF1133 | CARF | NM_001104586, NM_024744, NM_001322427, | 1223 | 4773 | 8323 | None |
| | | | XM_011511867, XM_005246859, XM_005246858, | | | | |
| | | | XM_017004961, NM_001322428, ENST0402905, | | | | |
| | | | ENST00000438828 | | | | |
| Genewiz | TFORF1134 | CARF | XM_017004964, XM_017004965, ENST00000414439 | 1224 | 4774 | 8324 | None |
| Genewiz | TFORF1135 | CARF | NM_001282910, NM_001282911, ENST00000320443, | 1225 | 4775 | 8325 | None |
| | | | ENST00000428585 | | | | |
| Genewiz | TFORF1136 | LRRFIP1 | NM_001137552, ENST00000392000 | 1226 | 4776 | 8326 | None |
| Genewiz | TFORF1137 | LRRFIP1 | NM_001137550, ENST00000308482 | 1227 | 4777 | 8327 | None |
| Genewiz | TFORF1138 | LRRFIP1 | NM_001137553, ENST00000289175 | 1228 | 4778 | 8328 | None |
| Genewiz | TFORF1139 | LRRFIP1 | NM_004735, ENST00000244815 | 1229 | 4779 | 8329 | None |
| Genewiz | TFORF1140 | HMBOX1 | NM_001324391, NM_001324392, ENST00000558662 | 1230 | 4780 | 8330 | None |
| Genewiz | TFORF1141 | HMBOX1 | NM_001135726, NM_024567, NM_001324382, | 1231 | 4781 | 8331 | None |
| | | | ENST00000287701, ENST00000397358 | | | | |
| Genewiz | TFORF1142 | HMBOX1 | XM_005273635, ENST00000524238 | 1232 | 4782 | 8332 | None |
| Genewiz | TFORF1143 | HMBOX1 | XM_017013825, ENST00000521516 | 1233 | 4783 | 8333 | None |
| Genewiz | TFORF1144 | HOXA7 | NM_006896, ENST00000242159 | 1234 | 4784 | 8334 | None |
| Genewiz | TFORF1145 | CDK1 | NM_033379, ENST00000316629, ENST00000373809 | 1235 | 4785 | 8335 | None |
| Genewiz | TFORF1146 | HOXA4 | NM_002141, ENST00000610970, ENST00000360046, | 1236 | 4786 | 8336 | None |
| | | | ENST00000428284 | | | | |
| Genewiz | TFORF1147 | HOXA3 | XM_011515343, XM_006715715, XM_005249730, | 1237 | 4787 | 8337 | None |
| | | | NM_030661, NM_153631, XM_005249731, | | | | |
| | | | XM_005249732, ENST00000396352, ENST012286, | | | | |
| | | | ENST00000317201 | | | | |
| Genewiz | TFORF1148 | HOXA2 | NM_006735, ENST00000222718 | 1238 | 4788 | 8338 | None |
| Genewiz | TFORF1149 | HOXA1 | NM_153620, ENST00000355633 | 1239 | 4789 | 8339 | None |
| Genewiz | TFORF1150 | CDK7 | NM_001324072, NM_001324077, NM_001324078, | 1240 | 4790 | 8340 | None |
| | | | NM_001324074, NM_001324075, ENST00000502604 | | | | |
| Genewiz | TFORF1151 | MYOCD | NM_153604, ENST00000343344 | 1241 | 4791 | 8341 | None |
| Genewiz | TFORF1152 | MYOCD | NM_001146312, ENST00000425538 | 1242 | 4792 | 8342 | None |
| Genewiz | TFORF1153 | RERE | NM_012102, NM_001042681, XM_005263464, | 1243 | 4793 | 8343 | None |
| | | | XM_017001359, XM_017001358, ENST00000337907, | | | | |
| | | | ENST00000400908 | | | | |
| Genewiz | TFORF1154 | RERE | NM_001042682, ENST00000476556 | 1244 | 4794 | 8344 | None |
| Genewiz | TFORF1155 | RERE | XM_005263466, ENST00000377464 | 1245 | 4795 | 8345 | None |
| Genewiz | TFORF1156 | DMBX1 | NM_147192, ENST00000371956 | 1246 | 4796 | 8346 | None |
| Genewiz | TFORF1157 | DMBX1 | XM_017000289, XM_011540668, NM_172225, | 1247 | 4797 | 8347 | None |
| | | | ENST00000360032 | | | | |
| Genewiz | TFORF1158 | EOMES | NM_001278182, ENST00000449599 | 1248 | 4798 | 8348 | None |
| Genewiz | TFORF1159 | EOMES | NM_005442, ENST00000295743 | 1249 | 4799 | 8349 | None |
| Genewiz | TFORF1160 | EOMES | NM_001278183, ENST00000461503 | 1250 | 4800 | 8350 | None |
| Genewiz | TFORF1161 | NFKBIL1 | NM_001144962, ENST00000376146 | 1251 | 4801 | 8351 | None |
| Genewiz | TFORF1162 | NFKBIL1 | NM_005007, ENST00000376148 | 1252 | 4802 | 8352 | None |
| Genewiz | TFORF1163 | NFKBIL1 | NM_001144961, ENST00000376145 | 1253 | 4803 | 8353 | None |
| Genewiz | TFORF1164 | NFXL1 | NM_001278624, NM_152995, NM_001278623, | 1254 | 4804 | 8354 | None |
| | | | ENST00000329043, ENST00000381538, ENST00000507489 | | | | |
| Genewiz | TFORF1165 | PRKCD | NM_212539, NM_006254, XM_006713259, | 1255 | 4805 | 8355 | None |
| | | | NM_001316327, XM_017006856, XM_017006855, | | | | |
| | | | ENST00000394729, ENST00000330452 | | | | |
| Genewiz | TFORF1166 | EBF4 | NM_001110514, ENST00000380648 | 1256 | 4806 | 8356 | None |
| Genewiz | TFORF1167 | EBF3 | XM_005252668, ENST00000355311 | 1257 | 4807 | 8357 | None |
| Genewiz | TFORF1168 | EBF2 | NM_022659, ENST00000520164 | 1258 | 4808 | 8358 | None |
| Genewiz | TFORF1169 | EBF1 | NM_182708, ENST00000380654 | 1259 | 4809 | 8359 | None |
| Genewiz | TFORF1170 | MLX | NM_198205, ENST00000346833 | 1260 | 4810 | 8360 | None |
| Genewiz | TFORF1171 | MLX | NM_170607, ENST00000246912 | 1261 | 4811 | 8361 | None |
| Genewiz | TFORF1172 | ZNF157 | NM_003446, ENST00000377073 | 1262 | 4812 | 8362 | None |
| Genewiz | TFORF1173 | ZNF154 | NM_001085384, ENST00000512439, ENST00000451275 | 1263 | 4813 | 8363 | None |
| Genewiz | TFORF1174 | NRL | XM_011536804, XM_011536805, XM_005267709, | 1264 | 4814 | 8364 | None |
| | | | XM_011536802, XM_005267710, XM_005267708, | | | | |
| | | | NM_006177, ENST00000397002, ENST0561028, | | | | |
| | | | ENST00000396997 | | | | |
| Genewiz | TFORF1175 | ZNF790 | XM_011526950, XM_005258903, NM_001242802, | 1265 | 4815 | 8365 | None |
| | | | NM_206894, NM_001242801, NM_001242800, | | | | |
| | | | ENST00000356725, ENST00000615484, ENST00000614179, | | | | |
| | | | ENST00000613249 | | | | |
| Genewiz | TFORF1176 | ZNF792 | NM_175872, ENST00000404801 | 1266 | 4816 | 8366 | None |
| Genewiz | TFORF1177 | ZNF793 | NM_001013659, XM_006723213, XM_005258927, | 1267 | 4817 | 8367 | None |
| | | | ENST00000587143, ENST00000445217 | | | | |
| Genewiz | TFORF1178 | ZNF98 | NM_001098626, ENST00000357774 | 1268 | 4818 | 8368 | None |
| Genewiz | TFORF1179 | ZNF799 | NM_001080821, ENST00000430385 | 1269 | 4819 | 8369 | None |
| Genewiz | TFORF1180 | ZNF799 | NM_001322497, NM_001322498, ENST00000419318 | 1270 | 4820 | 8370 | None |
| Genewiz | TFORF1181 | TBX21 | NM_013351, ENST00000177694 | 1271 | 4821 | 8371 | None |
| Genewiz | TFORF1182 | TBX20 | NM_001077653, ENST00000408931 | 1272 | 4822 | 8372 | None |
| Genewiz | TFORF1183 | DEAF1 | NM_021008, ENST00000382409 | 1273 | 4823 | 8373 | None |
| Genewiz | TFORF1184 | MAP3K7 | NM_145331, ENST00000369329 | 1274 | 4824 | 8374 | None |
| Genewiz | TFORF1185 | MAP3K7 | NM_145332, ENST00000369325 | 1275 | 4825 | 8375 | None |
| Genewiz | TFORF1186 | MAP3K7 | NM_003188, ENST00000369332 | 1276 | 4826 | 8376 | None |
| Genewiz | TFORF1187 | ZNF570 | NM_001300993, ENST00000586475 | 1277 | 4827 | 8377 | None |
| Genewiz | TFORF1188 | ZNF570 | NM_144694, NM_001321991, XM_011526544, | 1278 | 4828 | 8378 | None |
| | | | ENST00000330173 | | | | |
| Genewiz | TFORF1189 | ZNF571 | NM_001321272, NM_001290314, NM_016536, | 1279 | 4829 | 8379 | None |
| | | | ENST00000328550, ENST00000593133, ENST00000451802, | | | | |
| | | | ENST00000358744 | | | | |
| Genewiz | TFORF1190 | ZNF573 | NM_001172690, ENST00000590414, ENST00000536220 | 1280 | 4830 | 8380 | None |
| Genewiz | TFORF1191 | ZNF573 | XM_017026281, XM_017026280, NM_001172689, | 1281 | 4831 | 8381 | None |
| | | | NM_001172692, ENST00000357309 | | | | |
| Genewiz | TFORF1192 | ZNF573 | NM_152360, ENST00000339503 | 1282 | 4832 | 8382 | None |
| Genewiz | TFORF1193 | ZNF574 | XM_017027149, ENST00000222339 | 1283 | 4833 | 8383 | None |
| Genewiz | TFORF1194 | ZNF575 | XM_011526793, XM_005258783, NM_174945, | 1284 | 4834 | 8384 | None |
| | | | ENST00000314228, ENST00000601282 | | | | |
| Genewiz | TFORF1195 | ZNF576 | NM_024327, NM_001145347, ENST00000391965, | 1285 | 4835 | 8385 | None |
| | | | ENST00000525771, ENST00000533118, ENST00000528387, | | | | |
| | | | ENST00000529930, ENST00000336564 | | | | |
| Genewiz | TFORF1196 | ZNF577 | NM_032679, XM_006723432, XM_006723433, | 1286 | 4836 | 8386 | None |
| | | | XM_011527408, ENST00000301399 | | | | |
| Genewiz | TFORF1197 | ZNF577 | NM_001135590, XM_017027387, ENST00000639636, | 1287 | 4837 | 8387 | None |
| | | | ENST00000451628 | | | | |
| Genewiz | TFORF1198 | ZNF578 | XM_017026302, NM_001099694, ENST00000421239 | 1288 | 4838 | 8388 | None |
| Genewiz | TFORF1199 | ZNF579 | NM_152600, ENST00000325421 | 1289 | 4839 | 8389 | None |
| Genewiz | TFORF1200 | SETDB1 | NM_001243491, XM_017002955, ENST00000368962 | 1290 | 4840 | 8390 | None |
| Genewiz | TFORF1201 | SETDB1 | NM_001145415, ENST00000271640 | 1291 | 4841 | 8391 | None |
| Genewiz | TFORF1202 | SETDB1 | NM_012432, ENST00000368969 | 1292 | 4842 | 8392 | None |
| Genewiz | TFORF1203 | SETDB2 | NM_031915, ENST00000354234 | 1293 | 4843 | 8393 | None |
| Genewiz | TFORF1204 | SETDB2 | NM_001160308, ENST00000317257 | 1294 | 4844 | 8394 | None |
| Genewiz | TFORF1205 | ZNF205 | NM_001042428, NM_003456, NM_001278158, | 1295 | 4845 | 8395 | None |
| | | | XM_005255558, ENST00000382192, ENST00000219091, | | | | |
| | | | ENST00000620094 | | | | |
| Genewiz | TFORF1206 | ZNF202 | NM_001301779, NM_003455, NM_001301780, | 1296 | 4846 | 8396 | None |
| | | | XM_006718901, XM_011542973, XM_011542975, | | | | |
| | | | XM_011542972, XM_005271660, XM_005271661, | | | | |
| | | | XM_005271659, XM_017018268, ENST00000336139, | | | | |
| | | | ENST0530393, ENST00000529691 | | | | |
| Genewiz | TFORF1207 | CASZ1 | NM_001079843, ENST00000377022 | 1297 | 4847 | 8397 | None |
| Genewiz | TFORF1208 | CASZ1 | NM_017766, ENST00000344008 | 1298 | 4848 | 8398 | None |
| Genewiz | TFORF1209 | ZNF200 | NM_001145447, NM_001145448, NM_001145446, | 1299 | 4849 | 8399 | None |
| | | | ENST00000396871, ENST00000396870, ENST00000575948 | | | | |
| Genewiz | TFORF1210 | ZNF200 | NM_198087, ENST00000396868 | 1300 | 4850 | 8400 | None |
| Genewiz | TFORF1211 | EVX1 | NM_001989, ENST00000496902 | 1301 | 4851 | 8401 | None |
| Genewiz | TFORF1212 | ZNF208 | NM_007153, ENST00000397126 | 1302 | 4852 | 8402 | None |
| Genewiz | TFORF1213 | EVX2 | NM_001080458, ENST00000308618 | 1303 | 4853 | 8403 | None |
| Genewiz | TFORF1214 | FOXH1 | NM_003923, ENST00000377317 | 1304 | 4854 | 8404 | None |
| Genewiz | TFORF1215 | NME2 | NM_001198682, ENST00000393183 | 1305 | 4855 | 8405 | None |
| Genewiz | TFORF1216 | NHLH1 | NM_005598, ENST00000302101 | 1306 | 4856 | 8406 | None |
| Genewiz | TFORF1217 | PRRX1 | NM_022716, ENST00000239461 | 1307 | 4857 | 8407 | None |
| Genewiz | TFORF1218 | PRRX1 | NM_006902, ENST00000367760 | 1308 | 4858 | 8408 | None |
| Genewiz | TFORF1219 | PRRX2 | NM_016307, ENST00000372469 | 1309 | 4859 | 8409 | None |
| Genewiz | TFORF1220 | HELT | NM_001300782, ENST00000505610 | 1310 | 4860 | 8410 | None |
| Genewiz | TFORF1221 | HELT | NM_001300781, ENST00000515777 | 1311 | 4861 | 8411 | None |
| Genewiz | TFORF1222 | ZNF483 | NM_001007169, ENST00000358151 | 1312 | 4862 | 8412 | None |
| Genewiz | TFORF1223 | ZNF483 | NM_133464, XM_017014337, XM_017014338, | 1313 | 4863 | 8413 | None |
| | | | XM_011518300, ENST00000309235 | | | | |
| Genewiz | TFORF1224 | AKNA | XM_006717295, ENST00000312033 | 1314 | 4864 | 8414 | None |
| Genewiz | TFORF1225 | AKNA | NM_001317950, NM_030767, XM_005252247, | 1315 | 4865 | 8415 | None |
| | | | XM_005252245, XM_006717294, XM_005252244, | | | | |
| | | | ENST00000307564, ENST00000374088 | | | | |
| Genewiz | TFORF1226 | DUX4 | XM_011531514, ENST00000570263 | 1316 | 4866 | 8416 | None |
| Genewiz | TFORF1227 | DUX4 | NM_001293798, NM_001306068, ENST00000616166, | 1317 | 4867 | 8417 | None |
| | | | ENST00000565211, ENST00000569241 | | | | |
| Genewiz | TFORF1228 | DAXX | NM_001254717, ENST00000414083 | 1318 | 4868 | 8418 | None |
| Genewiz | TFORF1229 | AFF4 | NM_014423, XM_005271963, ENST00000265343 | 1319 | 4869 | 8419 | None |
| Genewiz | TFORF1230 | AFF3 | XM_011511174, XM_011511173, NM_001025108, | 1320 | 4870 | 8420 | None |
| | | | ENST00000409579 | | | | |
| Genewiz | TFORF1231 | AFF3 | XM_005263943, XM_011511176, XM_011511175, | 1321 | 4871 | 8421 | None |
| | | | XM_011511177, NM_002285, ENST00000409236, | | | | |
| | | | ENST00000317233 | | | | |
| Genewiz | TFORF1232 | AFF2 | NM_001169124, ENST00000370457 | 1322 | 4872 | 8422 | None |
| Genewiz | TFORF1233 | AFF2 | NM_001169122, ENST00000342251 | 1323 | 4873 | 8423 | None |
| Genewiz | TFORF1234 | AFF2 | NM_002025, ENST00000370460 | 1324 | 4874 | 8424 | None |
| Genewiz | TFORF1235 | AFF2 | NM_001170628, ENST00000286437 | 1325 | 4875 | 8425 | None |
| Genewiz | TFORF1236 | AFF1 | NM_001166693, XM_011531973, XM_005263007, | 1326 | 4876 | 8426 | None |
| | | | ENST00000395146 | | | | |
| Genewiz | TFORF1237 | AFF1 | NM_005935, ENST00000307808 | 1327 | 4877 | 8427 | None |
| Genewiz | TFORF1238 | HOMEZ | NM_020834, ENST00000357460 | 1328 | 4878 | 8428 | None |
| Genewiz | TFORF1239 | ZNF431 | NM_133473, ENST00000311048 | 1329 | 4879 | 8429 | None |
| Genewiz | TFORF1240 | LBX2 | NM_001009812, ENST00000460508 | 1330 | 4880 | 8430 | None |
| Genewiz | TFORF1241 | LBX2 | NM_001282430, ENST00000377566 | 1331 | 4881 | 8431 | None |
| Genewiz | TFORF1242 | LBX1 | NM_006562, ENST00000370193 | 1332 | 4882 | 8432 | None |
| Genewiz | TFORF1243 | SFPQ | XM_017002053, XM_017002054, XM_005271112, | 1333 | 4883 | 8433 | None |
| | | | XM_005271113, NM_005066, ENST00000357214 | | | | |
| Genewiz | TFORF1244 | PHF20 | XM_017027864, NM_016436, XM_017027867, | 1334 | 4884 | 8434 | None |
| | | | XM_017027866, XM_017027865, ENST00000374012 | | | | |
| Genewiz | TFORF1245 | PKNOX2 | XM_017018110, NM_022062, XM_011542945, | 1335 | 4885 | 8435 | None |
| | | | XM_005271642, XM_011542944, ENST00000298282 | | | | |
| Genewiz | TFORF1246 | ZNF133 | NM_001283004, NM_001283003, XM_017028055, | 1336 | 4886 | 8436 | None |
| | | | XM_017028057, XM_017028056, ENST00000402618 | | | | |
| Genewiz | TFORF1247 | ZNF133 | NM_001282998, NM_001282999, NM_001282997, | 1337 | 4887 | 8437 | None |
| | | | NM_001283001, NM_001283000, XM_011529338, | | | | |
| | | | XM_011529337, XM_017028046, XM017028044, | | | | |
| | | | XM_017028045, XM_011529336, XM_005260820, | | | | |
| | | | XM_011529339, XM_017028048, XM_017028047, | | | | |
| | | | XM_005260819, ENST001790, ENST00000622607, | | | | |
| | | | ENST00000316358 | | | | |
| Genewiz | TFORF1248 | ZNF133 | NM_001283005, ENST00000538547 | 1338 | 4888 | 8438 | None |
| Genewiz | TFORF1249 | ZNF133 | NM_001283002, XM_017028041, XM_017028042, | 1339 | 4889 | 8439 | None |
| | | | ENST00000628216 | | | | |
| Genewiz | TFORF1250 | ZNF133 | NM_001283008, ENST00000630056 | 1340 | 4890 | 8440 | None |
| Genewiz | TFORF1251 | ZNF133 | NM_001283007, ENST00000535822 | 1341 | 4891 | 8441 | None |
| Genewiz | TFORF1252 | TP53 | NM_001276696, ENST00000622645 | 1342 | 4892 | 8442 | None |
| Genewiz | TFORF1253 | TP53 | NM_001126118, NM_001276760, NM_001276761, | 1343 | 4893 | 8443 | None |
| | | | ENST00000610292, ENST00000620739, ENST00000619485 | | | | |
| Genewiz | TFORF1254 | TP53 | NM_001276697, ENST00000619186 | 1344 | 4894 | 8444 | None |
| Genewiz | TFORF1255 | TP53 | NM_001126117, ENST00000504290 | 1345 | 4895 | 8445 | None |
| Genewiz | TFORF1256 | TP53 | NM_001126113, ENST00000455263 | 1346 | 4896 | 8446 | None |
| Genewiz | TFORF1257 | TP53 | NM_000546, NM_001126112, ENST00000269305, | 1347 | 4897 | 8447 | None |
| | | | ENST00000445888 | | | | |
| Genewiz | TFORF1258 | TP53 | NM_001276695, ENST00000610538 | 1348 | 4898 | 8448 | None |
| Genewiz | TFORF1259 | TP53 | NM_001126115, ENST00000504937 | 1349 | 4899 | 8449 | None |
| Genewiz | TFORF1260 | TP53 | NM_001126114, ENST00000617185, ENST00000420246 | 1350 | 4900 | 8450 | None |
| Genewiz | TFORF1261 | TP53 | NM_001126116, ENST00000510385 | 1351 | 4901 | 8451 | None |
| Genewiz | TFORF1262 | TP53 | NM_001276698, ENST00000618944 | 1352 | 4902 | 8452 | None |
| Genewiz | TFORF1263 | TP53 | NM_001276699, ENST00000610623 | 1353 | 4903 | 8453 | None |
| Genewiz | TFORF1264 | ZNF135 | NM_001164530, ENST00000359978 | 1354 | 4904 | 8454 | None |
| Genewiz | TFORF1265 | ZNF135 | XM_006723362, NM_003436, XM_006723363, | 1355 | 4905 | 8455 | None |
| | | | ENST00000511556 | | | | |
| Genewiz | TFORF1266 | ZNF135 | NM_001289401, XM_017027240, ENST00000313434 | 1356 | 4906 | 8456 | None |
| Genewiz | TFORF1267 | ZNF135 | NM_001289402, ENST00000506786 | 1357 | 4907 | 8457 | None |
| Genewiz | TFORF1268 | ZNF135 | NM_007134, ENST00000401053 | 1358 | 4908 | 8458 | None |
| Genewiz | TFORF1269 | HIVEP2 | NM_006734, XM_017010805, ENST00000367603, | 1359 | 4909 | 8459 | None |
| | | | ENST00000012134, ENST00000367604 | | | | |
| Genewiz | TFORF1270 | HLTF | XM_017007079, NM_001318934, ENST00000465259 | 1360 | 4910 | 8460 | None |
| Genewiz | TFORF1271 | HLTF | NM_001318935, NM_003071, NM_139048, | 1361 | 4911 | 8461 | None |
| | | | ENST00000310053, ENST0392912, ENST00000494055 | | | | |
| Genewiz | TFORF1272 | DUXA | NM_001012729, ENST00000554048 | 1362 | 4912 | 8462 | None |
| Genewiz | TFORF1273 | DPF2 | XM_005274149, ENST00000252268 | 1363 | 4913 | 8463 | None |
| Genewiz | TFORF1274 | PKNOX1 | NM_001286258, ENST00000432907 | 1364 | 4914 | 8464 | None |
| Genewiz | TFORF1275 | TPRX1 | NM_198479, ENST00000322175 | 1365 | 4915 | 8465 | None |
| Genewiz | TFORF1276 | ZNF253 | NM_021047, ENST00000589717 | 1366 | 4916 | 8466 | None |
| Genewiz | TFORF1277 | ZNF587 | NM_001204817, ENST00000423137 | 1367 | 4917 | 8467 | None |
| Genewiz | TFORF1278 | ZNF587 | NM_032828, ENST00000339656 | 1368 | 4918 | 8468 | None |
| Genewiz | TFORF1279 | ZNF254 | NM_001278663, XM_011528448, NM_001278678, | 1369 | 4919 | 8469 | None |
| | | | ENST00000616028 | | | | |
| Genewiz | TFORF1280 | ZNF254 | XM_017027518, XM_017027519, NM_001278664, | 1370 | 4920 | 8470 | None |
| | | | ENST00000611359 | | | | |
| Genewiz | TFORF1281 | ZNF254 | NM_001278661, NM_001278677, XM_011528443, | 1371 | 4921 | 8471 | None |
| | | | XM_017027515, XM_011528444, XM_017027514, | | | | |
| | | | NM_001278662, XM_017027516, ENST00000613065 | | | | |
| Genewiz | TFORF1282 | SALL4 | NM_001318031, ENST00000395997 | 1372 | 4922 | 8472 | None |
| Genewiz | TFORF1283 | SALL1 | NM_001127892, ENST00000440970 | 1373 | 4923 | 8473 | None |
| Genewiz | TFORF1284 | SALL1 | NM_002968, XM_011523254, XM_006721241, | 1374 | 4924 | 8474 | None |
| | | | ENST00000251020 | | | | |
| Genewiz | TFORF1285 | ZNF257 | NM_033468, ENST00000594947 | 1375 | 4925 | 8475 | None |
| Genewiz | TFORF1286 | SALL3 | NM_171999, ENST00000537592 | 1376 | 4926 | 8476 | None |
| Genewiz | TFORF1287 | SALL2 | NM_005407, ENST00000614342 | 1377 | 4927 | 8477 | None |
| Genewiz | TFORF1288 | SALL2 | NM_001291447, ENST00000450879 | 1378 | 4928 | 8478 | None |
| Genewiz | TFORF1289 | GMEB2 | NM_012384, XM_005260202, ENST00000266068, | 1379 | 4929 | 8479 | None |
| | | | ENST00000370077 | | | | |
| Genewiz | TFORF1290 | GMEB1 | NM_006582, XM_011540519, XM_011540518, | 1380 | 4930 | 8480 | None |
| | | | XM_017000087, ENST00000294409 | | | | |
| Genewiz | TFORF1291 | SP140L | NM_001308163, ENST00000396563 | 1381 | 4931 | 8481 | None |
| Genewiz | TFORF1292 | SP140L | NM_138402, ENST00000415673 | 1382 | 4932 | 8482 | None |
| Genewiz | TFORF1293 | SP140L | NM_001308162, ENST00000243810 | 1383 | 4933 | 8483 | None |
| Genewiz | TFORF1294 | ZFP64 | NM_022088, ENST00000346617 | 1384 | 4934 | 8484 | None |
| Genewiz | TFORF1295 | ZFP64 | NM_001319146, ENST00000371523 | 1385 | 4935 | 8485 | None |
| Genewiz | TFORF1296 | ZFP64 | NM_199427, ENST00000361387 | 1386 | 4936 | 8486 | None |
| Genewiz | TFORF1297 | ZFP64 | NM_199426, ENST00000371515 | 1387 | 4937 | 8487 | None |
| Genewiz | TFORF1298 | ZFP64 | NM_018197, ENST00000216923 | 1388 | 4938 | 8488 | None |
| Genewiz | TFORF1299 | MAEL | XM_017002602, NM_001286378, XM_017002603, | 1389 | 4939 | 8489 | None |
| | | | ENST00000622874 | | | | |
| Genewiz | TFORF1300 | MAEL | NM_001286377, ENST00000367870 | 1390 | 4940 | 8490 | None |
| Genewiz | TFORF1301 | HMG20A | NM_001304504, NM_018200, XM_011521158, | 1391 | 4941 | 8491 | None |
| | | | ENST00000336216, ENST00000381714 | | | | |
| Genewiz | TFORF1302 | ZMIZ2 | XM_005249872, NM_174929, ENST00000265346 | 1392 | 4942 | 8492 | None |
| Genewiz | TFORF1303 | ZMIZ2 | XM_005249873, ENST00000433667 | 1393 | 4943 | 8493 | None |
| Genewiz | TFORF1304 | ZMIZ2 | XM_005249869, NM_031449, ENST00000309315, | 1394 | 4944 | 8494 | None |
| | | | ENST00000441627 | | | | |
| Genewiz | TFORF1305 | ZMIZ1 | NM_020338, ENST00000334512 | 1395 | 4945 | 8495 | None |
| Genewiz | TFORF1306 | ZSCAN9 | NM_001199479, ENST00000425468 | 1396 | 4946 | 8496 | None |
| Genewiz | TFORF1307 | JARID2 | NM_004973, ENST00000341776 | 1397 | 4947 | 8497 | None |
| Genewiz | TFORF1308 | JARID2 | XM_017010834, NM_001267040, XM_005249089, | 1398 | 4948 | 8498 | None |
| | | | XM_017010835, ENST00000397311 | | | | |
| Genewiz | TFORF1309 | TTF1 | NM_007344, XM_006717273, ENST00000334270 | 1399 | 4949 | 8499 | None |
| Genewiz | TFORF1310 | TTF1 | NM_001205296, ENST00000612514 | 1400 | 4950 | 8500 | None |
| Genewiz | TFORF1311 | RBMS1 | NM_016836, ENST00000348849 | 1401 | 4951 | 8501 | None |
| Genewiz | TFORF1312 | AEBP2 | NM_001267043, ENST00000360995 | 1402 | 4952 | 8502 | None |
| Genewiz | TFORF1313 | AEBP2 | NM_153207, ENST00000266508 | 1403 | 4953 | 8503 | None |
| Genewiz | TFORF1314 | AEBP2 | NM_001114176, ENST00000398864 | 1404 | 4954 | 8504 | None |
| Genewiz | TFORF1315 | ZNF813 | NM_001004301, ENST00000396403 | 1405 | 4955 | 8505 | None |
| Genewiz | TFORF1316 | RB1CC1 | NM_001083617, XM_017014107, ENST00000435644 | 1406 | 4956 | 8506 | None |
| Genewiz | TFORF1317 | RB1CC1 | NM_014781, XM_011517643, ENST00000025008 | 1407 | 4957 | 8507 | None |
| Genewiz | TFORF1318 | MKX | NM_173576, NM_001242702, XM_017016106, | 1408 | 4958 | 8508 | None |
| | | | XM_017016105, ENST00000419761, ENST00000375790 | | | | |
| Genewiz | TFORF1319 | KLF13 | NM_015995, ENST00000307145 | 1409 | 4959 | 8509 | None |
| Genewiz | TFORF1320 | KLF11 | NM_001177716, NM_001177718, ENST00000540845, | 1410 | 4960 | 8510 | None |
| | | | ENST00000535335 | | | | |
| Genewiz | TFORF1321 | KLF11 | NM_003597, ENST00000305883 | 1411 | 4961 | 8511 | None |
| Genewiz | TFORF1322 | KLF10 | NM_005655, ENST00000285407 | 1412 | 4962 | 8512 | None |
| Genewiz | TFORF1323 | KLF10 | NM_001032282, ENST00000395884 | 1413 | 4963 | 8513 | None |
| Genewiz | TFORF1324 | KLF17 | NM_173484, ENST00000372299 | 1414 | 4964 | 8514 | None |
| Genewiz | TFORF1325 | KLF16 | NM_031918, ENST00000541015, ENST00000250916, | 1415 | 4965 | 8515 | None |
| | | | ENST00000617223 | | | | |
| Genewiz | TFORF1326 | KLF15 | NM_014079, XM_005247400, ENST00000296233 | 1416 | 4966 | 8516 | None |
| Genewiz | TFORF1327 | KLF14 | NM_138693, ENST00000583337 | 1417 | 4967 | 8517 | None |
| Genewiz | TFORF1328 | TFAP2A | NM_001042425, ENST00000319516 | 1418 | 4968 | 8518 | None |
| Genewiz | TFORF1329 | TFAP2A | NM_003220, ENST00000482890 | 1419 | 4969 | 8519 | None |
| Genewiz | TFORF1330 | TFAP2C | NM_003222, ENST00000201031 | 1420 | 4970 | 8520 | None |
| Genewiz | TFORF1331 | TFAP2B | NM_003221, ENST00000393655 | 1421 | 4971 | 8521 | None |
| Genewiz | TFORF1332 | TFAP2E | NM_178548, ENST00000373235 | 1422 | 4972 | 8522 | None |
| Genewiz | TFORF1333 | TFAP2D | NM_172238, ENST00000008391 | 1423 | 4973 | 8523 | None |
| Genewiz | TFORF1334 | POU3F3 | NM_006236, ENST00000361360 | 1424 | 4974 | 8524 | None |
| Genewiz | TFORF1335 | POU3F2 | NM_005604, ENST00000328345 | 1425 | 4975 | 8525 | None |
| Genewiz | TFORF1336 | POU3F1 | NM_002699, ENST00000373012 | 1426 | 4976 | 8526 | None |
| Genewiz | TFORF1337 | ZBTB7A | NM_001317990, NM_015898, XM_005259571, | 1427 | 4977 | 8527 | None |
| | | | ENST00000322357, ENST00000601588 | | | | |
| Genewiz | TFORF1338 | ZBTB7C | XM_017025609, XM_011525870, XM_005258229, | 1428 | 4978 | 8528 | None |
| | | | NM_001318841, NM_001039360, XM_011525871, | | | | |
| | | | ENST00000535628, ENST00000586438, ENST00000588982, | | | | |
| | | | ENST00000590800 | | | | |
| Genewiz | TFORF1339 | POU3F4 | NM_000307, ENST00000373200 | 1429 | 4979 | 8529 | None |
| Genewiz | TFORF1340 | POU5F1 | NM_001285986, ENST00000441888, ENST00000471529, | 1430 | 4980 | 8530 | None |
| | | | ENST00000512818, ENST00000513407 | | | | |
| Genewiz | TFORF1341 | POU5F1 | NM_203289, NM_001173531, ENST00000606567, | 1431 | 4981 | 8531 | None |
| | | | ENST00000620031 | | | | |
| Genewiz | TFORF1342 | POU5F2 | NM_153216, ENST00000606183 | 1432 | 4982 | 8532 | None |
| Genewiz | TFORF1343 | FEZF1 | XM_011516202, NM_001160264, ENST00000427185 | 1433 | 4983 | 8533 | None |
| Genewiz | TFORF1344 | FEZF2 | NM_018008, ENST00000486811, ENST00000283268, | 1434 | 4984 | 8534 | None |
| | | | ENST00000475839 | | | | |
| Genewiz | TFORF1345 | RPA1 | NM_002945, ENST00000254719 | 1435 | 4985 | 8535 | None |
| Genewiz | TFORF1346 | ZNF541 | NM_001277075, XM_005259311, ENST00000391901 | 1436 | 4986 | 8536 | None |
| Genewiz | TFORF1347 | RPA3 | NM_002947, ENST00000223129, ENST00000396682 | 1437 | 4987 | 8537 | None |
| Genewiz | TFORF1348 | RPA2 | NM_001297558, ENST00000373909 | 1438 | 4988 | 8538 | None |
| Genewiz | TFORF1349 | POGZ | NM_207171, XM_017000749, XM_005245006, | 1439 | 4989 | 8539 | None |
| | | | XM_017000748, XM_005245005, ENST00000392723 | | | | |
| Genewiz | TFORF1350 | POGZ | NM_001194937, XM_017000745, XM_017000746, | 1440 | 4990 | 8540 | None |
| | | | ENST00000409503 | | | | |
| Genewiz | TFORF1351 | POGZ | NM_145796, ENST00000368863 | 1441 | 4991 | 8541 | None |
| Genewiz | TFORF1352 | POGZ | NM_015100, XM_005244999, XM_005245000, | 1442 | 4992 | 8542 | None |
| | | | XM_005245001, ENST00000271715 | | | | |
| Genewiz | TFORF1353 | POGZ | NM_001194938, ENST00000531094 | 1443 | 4993 | 8543 | None |
| Genewiz | TFORF1354 | ILF3 | NM_017620, XM_017026763, XM_011527984, | 1444 | 4994 | 8544 | None |
| | | | ENST00000449870, ENST00000588657 | | | | |
| Genewiz | TFORF1355 | ILF3 | NM_012218, ENST00000590261 | 1445 | 4995 | 8545 | None |
| Genewiz | TFORF1356 | ILF3 | NM_004516, ENST00000589998 | 1446 | 4996 | 8546 | None |
| Genewiz | TFORF1357 | ILF3 | NM_153464, ENST00000250241 | 1447 | 4997 | 8547 | None |
| Genewiz | TFORF1358 | SP100 | NM_003113, ENST00000264052 | 1448 | 4998 | 8548 | None |
| Genewiz | TFORF1359 | SP100 | NM_001206701, ENST00000409112 | 1449 | 4999 | 8549 | None |
| Genewiz | TFORF1360 | SP100 | NM_001206703, ENST00000427101 | 1450 | 5000 | 8550 | None |
| Genewiz | TFORF1361 | SP100 | NM_001080391, ENST00000340126 | 1451 | 5001 | 8551 | None |
| Genewiz | TFORF1362 | SP100 | NM_001206704, ENST00000409897 | 1452 | 5002 | 8552 | None |
| Genewiz | TFORF1363 | ELOF1 | XM_017027356, ENST00000587806 | 1453 | 5003 | 8553 | None |
| Genewiz | TFORF1364 | ELOF1 | XM_017027357, ENST00000591674 | 1454 | 5004 | 8554 | None |
| Genewiz | TFORF1365 | ISL1 | NM_002202, ENST00000230658 | 1455 | 5005 | 8555 | None |
| Genewiz | TFORF1366 | ISL2 | NM_145805, ENST00000290759 | 1456 | 5006 | 8556 | None |
| Genewiz | TFORF1367 | RREB1 | NM_001003699, XM_006715157, ENST00000379938 | 1457 | 5007 | 8557 | None |
| Genewiz | TFORF1368 | RREB1 | NM_001003700, ENST00000334984 | 1458 | 5008 | 8558 | None |
| Genewiz | TFORF1369 | RREB1 | NM_001168344, NM_001003698, ENST00000379933, | 1459 | 5009 | 8559 | None |
| | | | ENST00000349384 | | | | |
| Genewiz | TFORF1370 | ZNF141 | NM_003441, ENST00000240499 | 1460 | 5010 | 8560 | None |
| Genewiz | TFORF1371 | ZNF140 | XM_017019925, NM_001300776, NM_001300778, | 1461 | 5011 | 8561 | None |
| | | | XM_011534840, XM_017019924, ENST00000544426 | | | | |
| Genewiz | TFORF1372 | ZNF143 | NM_001282657, ENST00000396597 | 1462 | 5012 | 8562 | None |
| Genewiz | TFORF1373 | ZNF143 | NM_001282656, XM_017018254, XM_017018255, | 1463 | 5013 | 8563 | None |
| | | | ENST00000396604, ENST00000530463 | | | | |
| Genewiz | TFORF1374 | ZNF143 | NM_003442, XM_011520349, ENST00000396602 | 1464 | 5014 | 8564 | None |
| Genewiz | TFORF1375 | ZNF142 | XM_017004872, NM_001105537, XM_011511789, | 1465 | 5015 | 8565 | None |
| | | | ENST00000449707, ENST00000411696 | | | | |
| Genewiz | TFORF1376 | ZNF146 | NM_001099639, NM_001099638, NM_007145, | 1466 | 5016 | 8566 | None |
| | | | XM_005259214, XM_017027247, XM_017027245, | | | | |
| | | | XM_017027246, XM_017027244, ENST0456324, | | | | |
| | | | ENST00000443387 | | | | |
| Genewiz | TFORF1377 | ZNF148 | NM_021964, ENST00000360647, ENST00000484491, | 1467 | 5017 | 8567 | None |
| | | | ENST00000492394, ENST00000485866 | | | | |
| Genewiz | TFORF1378 | ZNF783 | NM_001195220, ENST00000434415 | 1468 | 5018 | 8568 | None |
| Genewiz | TFORF1379 | ZNF782 | XM_011518315, XM_005251742, XM_011518318, | 1469 | 5019 | 8569 | None |
| | | | NM_001001662, ENST00000481138, ENST00000535338 | | | | |
| Genewiz | TFORF1380 | ZNF787 | NM_001002836, XM_011526445, ENST00000610935 | 1470 | 5020 | 8570 | None |
| Genewiz | TFORF1381 | ZNF789 | NM_001013258, ENST00000379724 | 1471 | 5021 | 8571 | None |
| Genewiz | TFORF1382 | ZNF789 | XM_017012018, NM_213603, ENST00000331410 | 1472 | 5022 | 8572 | None |
| Genewiz | TFORF1383 | ZNF788 | ENST00000430298 | 1473 | 5023 | 8573 | None |
| Genewiz | TFORF1384 | ZNF788 | ENST00000596883 | 1474 | 5024 | 8574 | None |
| Genewiz | TFORF1385 | TMF | NM_007114, ENST00000398559 | 1475 | 5025 | 8575 | None |
| Genewiz | TFORF1386 | ZNF362 | NM_152493, XM_017000415, ENST00000539719, | 1476 | 5026 | 8576 | None |
| | | | ENST00000373428 | | | | |
| Genewiz | TFORF1387 | ZNF367 | NM_153695, ENST00000375256 | 1477 | 5027 | 8577 | None |
| Genewiz | TFORF1388 | PMS1 | NM_001128144, XM_017004348, ENST00000447232 | 1478 | 5028 | 8578 | None |
| Genewiz | TFORF1389 | PMS1 | NM_001321051, ENST00000374826 | 1479 | 5029 | 8579 | None |
| Genewiz | TFORF1390 | PMS1 | NM_001289409, NM_001289408, XM_011511356, | 1480 | 5030 | 8580 | None |
| | | | ENST00000432292, ENST00000624204 | | | | |
| Genewiz | TFORF1391 | PMS1 | NM_001321048, NM_000534, NM_001321045, | 1481 | 5031 | 8581 | None |
| | | | NM_001321047, ENST00000441310 | | | | |
| Genewiz | TFORF1392 | PMS1 | NM_001128143, XM_017004344, ENST00000409823 | 1482 | 5032 | 8582 | None |
| Genewiz | TFORF1393 | PMS1 | NM_001321049, ENST00000409985 | 1483 | 5033 | 8583 | None |
| Genewiz | TFORF1394 | ZNF569 | XM_017026381, XM_017026380, XM_017026379, | 1484 | 5034 | 8584 | None |
| | | | XM_017026382, ENST00000392150 | | | | |
| Genewiz | TFORF1395 | ZNF569 | XM_011526539, XM_017026376, XM_017026377, | 1485 | 5035 | 8585 | None |
| | | | NM_152484, ENST00000392149, ENST00000316950 | | | | |
| Genewiz | TFORF1396 | ZNF568 | NM_198539, ENST00000333987, ENST00000619231 | 1486 | 5036 | 8586 | None |
| Genewiz | TFORF1397 | ZNF568 | NM_001204837, NM_001204836, XM_017026773, | 1487 | 5037 | 8587 | None |
| | | | XM_017026774, ENST00000415168 | | | | |
| Genewiz | TFORF1398 | ZNF568 | NM_001204839, XM_017026775, ENST00000455427 | 1488 | 5038 | 8588 | None |
| Genewiz | TFORF1399 | ZNF568 | NM_001204838, XM_017026772, ENST00000617745 | 1489 | 5039 | 8589 | None |
| Genewiz | TFORF1400 | ZNF567 | XM_017026420, NM_001322911, NM_152603, | 1490 | 5040 | 8590 | None |
| | | | NM_001322912, XM_017026421, XM_011526584, | | | | |
| | | | ENST00000360729, ENST00000585696 | | | | |
| Genewiz | TFORF1401 | ZNF567 | XM_017026417, NM_001322916, NM_001322915, | 1491 | 5041 | 8591 | None |
| | | | NM_001322919, NM_001322917, NM_001322918, | | | | |
| | | | NM_001322914, NM_001300979, NM_001322920, | | | | |
| | | | NM_001322913, XM_017026418, ENST00000536254 | | | | |
| Genewiz | TFORF1402 | ZNF567 | XM_011526585, ENST00000588311 | 1492 | 5042 | 8592 | None |
| Genewiz | TFORF1403 | ZNF566 | NM_001300970, XM_017027400, XM_005259356, | 1493 | 5043 | 8593 | None |
| | | | XM_017027399, XM_011527428, ENST00000493391 | | | | |
| Genewiz | TFORF1404 | ZNF566 | NM_001145343, XM_006723447, ENST00000392170 | 1494 | 5044 | 8594 | None |
| Genewiz | TFORF1405 | ZNF566 | NM_032838, NM_001145345, NM_001145344, | 1495 | 5045 | 8595 | None |
| | | | ENST00000434377, ENST00000424129 | | | | |
| Genewiz | TFORF1406 | ZNF565 | NM_152477, NM_001042474, XM_011526514, | 1496 | 5046 | 8596 | None |
| | | | XM_011526512, XM_017026341, ENST00000304116, | | | | |
| | | | ENST00000392173 | | | | |
| Genewiz | TFORF1407 | ZNF559 | NM_001202409, ENST00000592896 | 1497 | 5047 | 8597 | None |
| Genewiz | TFORF1408 | ZNF559 | NM_001202406, ENST00000587557 | 1498 | 5048 | 8598 | None |
| Genewiz | TFORF1409 | ZNF559 | NM_001202410, NM_001202411, NM_001202412, | 1499 | 5049 | 8599 | None |
| | | | ENST00000585352, ENST00000317221 | | | | |
| Genewiz | TFORF1410 | RNF2 | NM_007212, XM_011509852, XM_011509851, | 1500 | 5050 | 8600 | None |
| | | | ENST00000367510 | | | | |
| Genewiz | TFORF1411 | ZNF562 | XM_017026898, NM_001300885, ENST00000590155 | 1501 | 5051 | 8601 | None |
| Genewiz | TFORF1412 | ZNF562 | NM_017656, ENST00000293648 | 1502 | 5052 | 8602 | None |
| Genewiz | TFORF1413 | ZNF561 | XM_017027481, XM_017027479, XM_017027480, | 1503 | 5053 | 8603 | None |
| | | | ENST00000424629 | | | | |
| Genewiz | TFORF1414 | ZNF561 | NM_152289, XM_005260150, ENST00000302851 | 1504 | 5054 | 8604 | None |
| Genewiz | TFORF1415 | ZNF560 | XM_011527696, XM_017026327, XM_017026329, | 1505 | 5055 | 8605 | None |
| | | | XM_017026328, XM_011527697, NM_152476, | | | | |
| | | | ENST00000301480 | | | | |
| Genewiz | TFORF1416 | ZNF215 | NM_013250, XM_006718311, ENST00000278319, | 1506 | 5056 | 8606 | None |
| | | | ENST00000414517 | | | | |
| Genewiz | TFORF1417 | ZNF214 | XM_005253128, XM_006718308, NM_013249, | 1507 | 5057 | 8607 | None |
| | | | ENST00000278314, ENST00000536068 | | | | |
| Genewiz | TFORF1418 | ZNF217 | NM_006526, XM_017028059, ENST00000371471, | 1508 | 5058 | 8608 | None |
| | | | ENST00000302342 | | | | |
| Genewiz | TFORF1419 | VDR | NM_001017536, ENST00000550325 | 1509 | 5059 | 8609 | None |
| Genewiz | TFORF1420 | ZNF211 | NM_006385, ENST00000240731 | 1510 | 5060 | 8610 | None |
| Genewiz | TFORF1421 | ZNF211 | NM_001265599, ENST00000254182 | 1511 | 5061 | 8611 | None |
| Genewiz | TFORF1422 | ZNF211 | NM_001265600, ENST00000391703 | 1512 | 5062 | 8612 | None |
| Genewiz | TFORF1423 | ZNF211 | NM_001265597, ENST00000299871 | 1513 | 5063 | 8613 | None |
| Genewiz | TFORF1424 | ZNF211 | NM_001265598, ENST00000541801 | 1514 | 5064 | 8614 | None |
| Genewiz | TFORF1425 | ZNF211 | NM_198855, ENST00000347302 | 1515 | 5065 | 8615 | None |
| Genewiz | TFORF1426 | FOXK2 | NM_004514, ENST00000335255 | 1516 | 5066 | 8616 | None |
| Genewiz | TFORF1427 | FOXK1 | NM_001037165, ENST00000328914 | 1517 | 5067 | 8617 | None |
| Genewiz | TFORF1428 | NR3C2 | NM_001166104, ENST00000512865 | 1518 | 5068 | 8618 | None |
| Genewiz | TFORF1429 | NR3C2 | XM_011531975, XM_011531976, XM_011531977, | 1519 | 5069 | 8619 | None |
| | | | ENST00000625323, ENST00000511528 | | | | |
| Genewiz | TFORF1430 | NFKBIB | NM_001243116, ENST00000392079 | 1520 | 5070 | 8620 | None |
| Genewiz | TFORF1431 | ZNF219 | NM_001102454, XM_006720164, NM_016423, | 1521 | 5071 | 8621 | None |
| | | | NM_001101672, XM_017021354, XM_006720163, | | | | |
| | | | XM_017021355, ENST00000360947, ENST00000451119, | | | | |
| | | | ENST00000421093 | | | | |
| Genewiz | TFORF1432 | NR3C1 | NM_001024094, XM_005268420, XM_005268423, | 1522 | 5072 | 8622 | None |
| | | | XM_005268419, XM_005268422, ENST00000504572, | | | | |
| | | | ENST00000394466, ENST00000231509 | | | | |
| Genewiz | TFORF1433 | NR3C1 | NM_001020825, ENST00000415690 | 1523 | 5073 | 8623 | None |
| Genewiz | TFORF1434 | NFKBID | XM_011527419, ENST00000606253 | 1524 | 5074 | 8624 | None |
| Genewiz | TFORF1435 | NFKBIE | NM_004556, ENST00000275015 | 1525 | 5075 | 8625 | None |
| Genewiz | TFORF1436 | NFKBIZ | NM_031419, ENST00000326172 | 1526 | 5076 | 8626 | None |
| Genewiz | TFORF1437 | NFKBIZ | NM_001005474, ENST00000394054 | 1527 | 5077 | 8627 | None |
| Genewiz | TFORF1438 | EP400 | NM_015409, ENST00000389561, ENST00000389562 | 1528 | 5078 | 8628 | None |
| Genewiz | TFORF1439 | ZNF846 | XM_011527717, XM_005259772, NM_001077624, | 1529 | 5079 | 8629 | None |
| | | | ENST00000397902 | | | | |
| Genewiz | TFORF1440 | ARID4A | NM_002892, ENST00000355431 | 1530 | 5080 | 8630 | None |
| Genewiz | TFORF1441 | ARID4A | NM_023001, ENST00000348476, ENST00000431317 | 1531 | 5081 | 8631 | None |
| Genewiz | TFORF1442 | ARID4A | NM_023000, ENST00000395168 | 1532 | 5082 | 8632 | None |
| Genewiz | TFORF1443 | ARID4B | NM_031371, ENST00000349213 | 1533 | 5083 | 8633 | None |
| Genewiz | TFORF1444 | ARID4B | NM_001206794, NM_016374, XM_011544212, | 1534 | 5084 | 8634 | None |
| | | | ENST00000366603, ENST00000264183 | | | | |
| Genewiz | TFORF1445 | GTF2H3 | NM_001271868, XM_017019228, ENST00000618160 | 1535 | 5085 | 8635 | None |
| Genewiz | TFORF1446 | GTF2H3 | NM_001271867, ENST00000228955 | 1536 | 5086 | 8636 | None |
| Genewiz | TFORF1447 | NR5A2 | XM_011509382, XM_005245062, NM_001276464, | 1537 | 5087 | 8637 | None |
| | | | ENST00000544748 | | | | |
| Genewiz | TFORF1448 | NR5A2 | NM_205860, ENST00000367362 | 1538 | 5088 | 8638 | None |
| Genewiz | TFORF1449 | DLX4 | XM_017024291, NM_001934, ENST00000411890 | 1539 | 5089 | 8639 | None |
| Genewiz | TFORF1450 | DLX6 | NM_005222, ENST00000518156 | 1540 | 5090 | 8640 | None |
| Genewiz | TFORF1451 | DLX1 | NM_178120, ENST00000361725 | 1541 | 5091 | 8641 | None |
| Genewiz | TFORF1452 | DLX1 | NM_001038493, ENST00000341900 | 1542 | 5092 | 8642 | None |
| Genewiz | TFORF1453 | DLX2 | NM_004405, ENST00000234198 | 1543 | 5093 | 8643 | None |
| Genewiz | TFORF1454 | TFEC | NM_001018058, ENST00000320239 | 1544 | 5094 | 8644 | None |
| Genewiz | TFORF1455 | TFEC | NM_012252, XM_017011875, ENST00000265440 | 1545 | 5095 | 8645 | None |
| Genewiz | TFORF1456 | TFEC | NM_001244583, ENST00000457268 | 1546 | 5096 | 8646 | None |
| Genewiz | TFORF1457 | TFEB | NM_001271943, ENST00000420312 | 1547 | 5097 | 8647 | None |
| Genewiz | TFORF1458 | TFEB | NM_001167827, ENST00000358871 | 1548 | 5098 | 8648 | None |
| Genewiz | TFORF1459 | LMX1A | NM_001174069, NM_177398, ENST00000342310, | 1549 | 5099 | 8649 | None |
| | | | ENST00000294816, ENST00000367893 | | | | |
| Genewiz | TFORF1460 | LMX1B | NM_001174147, ENST00000373474 | 1550 | 5100 | 8650 | None |
| Genewiz | TFORF1461 | LMX1B | NM_001174146, ENST00000355497 | 1551 | 5101 | 8651 | None |
| Genewiz | TFORF1462 | LMX1B | NM_002316, ENST00000526117 | 1552 | 5102 | 8652 | None |
| Genewiz | TFORF1463 | VAV1 | NM_001258206, ENST00000304076 | 1553 | 5103 | 8653 | None |
| Genewiz | TFORF1464 | VAV1 | NM_001258207, ENST00000596764 | 1554 | 5104 | 8654 | None |
| Genewiz | TFORF1465 | VAV1 | NM_005428, ENST00000602142 | 1555 | 5105 | 8655 | None |
| Genewiz | TFORF1466 | HOXD12 | NM_021193, ENST00000406506 | 1556 | 5106 | 8656 | None |
| Genewiz | TFORF1467 | HOXD13 | NM_000523, ENST00000392539 | 1557 | 5107 | 8657 | None |
| Genewiz | TFORF1468 | HOXD11 | NM_021192, ENST00000249504 | 1558 | 5108 | 8658 | None |
| Genewiz | TFORF1469 | TOX3 | NM_001080430, ENST00000219746 | 1559 | 5109 | 8659 | None |
| Genewiz | TFORF1470 | TOX3 | NM_001146188, ENST00000407228 | 1560 | 5110 | 8660 | None |
| Genewiz | TFORF1471 | TOX2 | NM_001098797, ENST00000341197 | 1561 | 5111 | 8661 | None |
| Genewiz | TFORF1472 | TOX2 | NM_001098798, ENST00000358131 | 1562 | 5112 | 8662 | None |
| Genewiz | TFORF1473 | LIN54 | NM_001115008, NM_001288997, NM_001115007, | 1563 | 5113 | 8663 | None |
| | | | ENST00000442461, ENST00000446851, ENST00000510557 | | | | |
| Genewiz | TFORF1474 | LIN54 | NM_194282, XM_006714081, XM_005262750, | 1564 | 5114 | 8664 | None |
| | | | ENST00000340417, ENST00000505397 | | | | |
| Genewiz | TFORF1475 | LIN54 | NM_001288996, XM_017007728, ENST00000506560 | 1565 | 5115 | 8665 | None |
| Genewiz | TFORF1476 | VAX1 | NM_199131, ENST00000277905 | 1566 | 5116 | 8666 | None |
| Genewiz | TFORF1477 | VAX1 | NM_001112704, ENST00000369206 | 1567 | 5117 | 8667 | None |
| Genewiz | TFORF1478 | TP63 | XM_017007387, ENST00000456148 | 1568 | 5118 | 8668 | None |
| Genewiz | TFORF1479 | TP63 | NM_001114980, ENST00000354600 | 1569 | 5119 | 8669 | None |
| Genewiz | TFORF1480 | TP63 | NM_001114978, ENST00000392460 | 1570 | 5120 | 8670 | None |
| Genewiz | TFORF1481 | TP63 | NM_001114982, ENST00000437221 | 1571 | 5121 | 8671 | None |
| Genewiz | TFORF1482 | TP63 | NM_001114979, ENST00000418709 | 1572 | 5122 | 8672 | None |
| Genewiz | TFORF1483 | TP63 | NM_001114981, ENST00000392463 | 1573 | 5123 | 8673 | None |
| Genewiz | TFORF1484 | TP63 | XM_005247843, ENST00000440651 | 1574 | 5124 | 8674 | None |
| Genewiz | TFORF1485 | NANOG | NM_024865, ENST00000229307 | 1575 | 5125 | 8675 | None |
| Genewiz | TFORF1486 | NANOG | NM_001297698, ENST00000526286 | 1576 | 5126 | 8676 | None |
| Genewiz | TFORF1487 | NR6A1 | XM_005251917, ENST00000344523 | 1577 | 5127 | 8677 | None |
| Genewiz | TFORF1488 | NR6A1 | NM_001278546, ENST00000373584 | 1578 | 5128 | 8678 | None |
| Genewiz | TFORF1489 | NR6A1 | NM_033334, ENST00000487099 | 1579 | 5129 | 8679 | None |
| Genewiz | TFORF1490 | NR6A1 | NM_001489, ENST00000416460 | 1580 | 5130 | 8680 | None |
| Genewiz | TFORF1491 | ZNF57 | NM_001319083, XM_011527682, ENST00000523428 | 1581 | 5131 | 8681 | None |
| Genewiz | TFORF1492 | FOSL1 | NM_001300855, ENST00000532401 | 1582 | 5132 | 8682 | None |
| Genewiz | TFORF1493 | FOSL1 | NM_001300844, ENST00000531493 | 1583 | 5133 | 8683 | None |
| Genewiz | TFORF1494 | FOSL1 | NM_001300857, ENST00000448083 | 1584 | 5134 | 8684 | None |
| Genewiz | TFORF1495 | FOXN3 | NM_001085471, ENST00000345097, ENST00000261302 | 1585 | 5135 | 8685 | None |
| Genewiz | TFORF1496 | HHEX | NM_002729, ENST00000282728 | 1586 | 5136 | 8686 | None |
| Genewiz | TFORF1497 | LYL1 | NM_005583, ENST00000264824 | 1587 | 5137 | 8687 | None |
| Genewiz | TFORF1498 | RBL1 | NM_002895, ENST00000373664 | 1588 | 5138 | 8688 | None |
| Genewiz | TFORF1499 | RBL1 | NM_183404, ENST00000344359 | 1589 | 5139 | 8689 | None |
| Genewiz | TFORF1500 | RBL2 | NM_001323608, NM_005611, ENST00000262133 | 1590 | 5140 | 8690 | None |
| Genewiz | TFORF1501 | STOX2 | NM_020225, ENST00000308497 | 1591 | 5141 | 8691 | None |
| Genewiz | TFORF1502 | GABPB1 | NM_016654, XM_017022053, ENST00000380877 | 1592 | 5142 | 8692 | None |
| Genewiz | TFORF1503 | GABPB1 | NM_181427, NM_016655, ENST00000396464, | 1593 | 5143 | 8693 | None |
| | | | ENST00000359031 | | | | |
| Genewiz | TFORF1504 | GABPB1 | NM_002041, ENST00000429662 | 1594 | 5144 | 8694 | None |
| Genewiz | TFORF1505 | ZNF696 | NM_030895, ENST00000330143 | 1595 | 5145 | 8695 | None |
| Genewiz | TFORF1506 | HEY2 | XM_017010629, XM_017010628, XM_017010627, | 1596 | 5146 | 8696 | None |
| | | | ENST00000368365 | | | | |
| Genewiz | TFORF1507 | HEY1 | NM_001282851, ENST00000523976 | 1597 | 5147 | 8697 | None |
| Genewiz | TFORF1508 | MTF1 | NM_005955, XM_011541491, ENST00000373036 | 1598 | 5148 | 8698 | None |
| Genewiz | TFORF1509 | STAT5B | NM_012448, ENST00000293328 | 1599 | 5149 | 8699 | None |
| Genewiz | TFORF1510 | STAT5A | NM_001288719, ENST00000546010 | 1600 | 5150 | 8700 | None |
| Genewiz | TFORF1511 | STAT5A | NM_001288720, ENST00000588868 | 1601 | 5151 | 8701 | None |
| Genewiz | TFORF1512 | NKX3-2 | NM_001189, ENST00000382438 | 1602 | 5152 | 8702 | None |
| Genewiz | TFORF1513 | NKX3-1 | NM_006167, ENST00000380871 | 1603 | 5153 | 8703 | None |
| Genewiz | TFORF1514 | NKX3-1 | NM_001256339, ENST00000523261 | 1604 | 5154 | 8704 | None |
| Genewiz | TFORF1515 | NANOGNB | NM_001145465, ENST00000382119 | 1605 | 5155 | 8705 | None |
| Genewiz | TFORF1516 | ZNF737 | NM_001159293, ENST00000427401 | 1606 | 5156 | 8706 | None |
| Genewiz | TFORF1517 | FOXD4L4 | NM_199244, ENST00000377413 | 1607 | 5157 | 8707 | None |
| Genewiz | TFORF1518 | FOXD4L5 | NM_001126334, ENST00000377420 | 1608 | 5158 | 8708 | None |
| Genewiz | TFORF1519 | FOXD4L6 | NM_001085476, ENST00000622588 | 1609 | 5159 | 8709 | None |
| Genewiz | TFORF1520 | NR2E1 | NM_001286102, ENST00000368983 | 1610 | 5160 | 8710 | None |
| Genewiz | TFORF1521 | NR2E3 | NM_016346, ENST00000621098 | 1611 | 5161 | 8711 | None |
| Genewiz | TFORF1522 | NR2E3 | NM_014249, ENST00000617575 | 1612 | 5162 | 8712 | None |
| Genewiz | TFORF1523 | NFRKB | NM_006165, XM_011542852, XM_011542851, | 1613 | 5163 | 8713 | None |
| | | | ENST00000524794 | | | | |
| Genewiz | TFORF1524 | NFRKB | NM_001143835, XM_017017796, ENST00000446488, | 1614 | 5164 | 8714 | None |
| | | | ENST00000524746 | | | | |
| Genewiz | TFORF1525 | GFI1 | XM_005270749, XM_011541245, XM_011541246, | 1615 | 5165 | 8715 | None |
| | | | NM_001127215, NM_001127216, NM_005263, | | | | |
| | | | ENST00000370332, ENST00000427103, ENST00000294702 | | | | |
| Genewiz | TFORF1526 | MXI1 | NM_005962, ENST00000239007 | 1616 | 5166 | 8716 | None |
| Genewiz | TFORF1527 | MXI1 | NM_001008541, ENST00000361248 | 1617 | 5167 | 8717 | None |
| Genewiz | TFORF1528 | MXI1 | NM_130439, ENST00000332674 | 1618 | 5168 | 8718 | None |
| Genewiz | TFORF1529 | ZNF605 | NM_001164715, ENST00000392321 | 1619 | 5169 | 8719 | None |
| Genewiz | TFORF1530 | ZNF605 | NM_183238, ENST00000360187 | 1620 | 5170 | 8720 | None |
| Genewiz | TFORF1531 | ZBTB40 | XM_011542499, NM_014870, NM_001083621, | 1621 | 5171 | 8721 | None |
| | | | ENST00000404138, ENST00000375647 | | | | |
| Genewiz | TFORF1532 | ZBTB40 | XM_017003003, ENST00000374651 | 1622 | 5172 | 8722 | None |
| Genewiz | TFORF1533 | ZBTB41 | NM_194314, ENST00000367405 | 1623 | 5173 | 8723 | None |
| Genewiz | TFORF1534 | ZBTB42 | XM_017020911, NM_001137601, ENST00000555360, | 1624 | 5174 | 8724 | None |
| | | | ENST00000342537 | | | | |
| Genewiz | TFORF1535 | ZBTB44 | NM_001301098, ENST00000397753, ENST00000357899 | 1625 | 5175 | 8725 | None |
| Genewiz | TFORF1536 | ZBTB44 | NM_001301099, XM_017017623, ENST00000530205 | 1626 | 5176 | 8726 | None |
| Genewiz | TFORF1537 | ZBTB45 | NM_001316978, NM_032792, NM_001316981, | 1627 | 5177 | 8727 | None |
| | | | NM_001316979, NM_001316982, NM_001316980, | | | | |
| | | | XM_006723445, ENST00000354590, ENST00000594051, | | | | |
| | | | ENST00000600990 | | | | |
| Genewiz | TFORF1538 | ZBTB46 | XM_005260197, XM_011528548, NM_025224, | 1628 | 5178 | 8728 | None |
| | | | XM_005260195, XM_006723700, XM_005260198, | | | | |
| | | | XM_005260196, ENST00000245663, ENST0395104, | | | | |
| | | | ENST00000302995 | | | | |
| Genewiz | TFORF1539 | ZBTB47 | NM_145166, ENST00000232974 | 1629 | 5179 | 8729 | None |
| Genewiz | TFORF1540 | ZBTB49 | NM_145291, XM_006713864, ENST00000337872 | 1630 | 5180 | 8730 | None |
| Genewiz | TFORF1541 | ZBTB49 | XM_017007835, ENST00000515012 | 1631 | 5181 | 8731 | None |
| Genewiz | TFORF1542 | ZNF286B | NM_001145045, ENST00000545289 | 1632 | 5182 | 8732 | None |
| Genewiz | TFORF1543 | ZNF160 | XM_017027446, NM_001322136, NM_001322130, | 1633 | 5183 | 8733 | None |
| | | | NM_001322131, NM_001322129, NM_001322134, | | | | |
| | | | NM_001322133, NM_001102603, NM_001322132, | | | | |
| | | | NM_198893, NM_001322128, NM_033288, | | | | |
| | | | NM_001322135, ENST00000599056, ENST00000418871, | | | | |
| | | | ENST00000429604 | | | | |
| Genewiz | TFORF1544 | ZNF160 | XM_017027448, NM_001322126, NM_001322125, | 1634 | 5184 | 8734 | None |
| | | | ENST00000355147 | | | | |
| Genewiz | TFORF1545 | ZNF160 | NM_001322139, NM_001322137, NM_001322138, | 1635 | 5185 | 8735 | None |
| | | | ENST00000601421 | | | | |
| Genewiz | TFORF1546 | BHMG1 | NM_001310124, ENST00000457052 | 1636 | 5186 | 8736 | None |
| Genewiz | TFORF1547 | SUPT5H | NM_001319991, NM_001130825, ENST00000402194, | 1637 | 5187 | 8737 | None |
| | | | ENST00000359191 | | | | |
| Genewiz | TFORF1548 | TAZ | NM_181311, ENST00000612460 | 1638 | 5188 | 8738 | None |
| Genewiz | TFORF1549 | TAZ | NM_181313, ENST00000613002 | 1639 | 5189 | 8739 | None |
| Genewiz | TFORF1550 | TAZ | NM_181312, ENST00000475699 | 1640 | 5190 | 8740 | None |
| Genewiz | TFORF1551 | TAZ | NM_000116, ENST00000601016 | 1641 | 5191 | 8741 | None |
| Genewiz | TFORF1552 | SP110 | NM_001185015, ENST00000540870 | 1642 | 5192 | 8742 | None |
| Genewiz | TFORF1553 | SP110 | NM_004510, ENST00000258382 | 1643 | 5193 | 8743 | None |
| Genewiz | TFORF1554 | SP110 | NM_004509, ENST00000358662 | 1644 | 5194 | 8744 | None |
| Genewiz | TFORF1555 | SP110 | NM_080424, ENST00000258381 | 1645 | 5195 | 8745 | None |
| Genewiz | TFORF1556 | YAF2 | XM_017018670, ENST00000552928 | 1646 | 5196 | 8746 | None |
| Genewiz | TFORF1557 | YAF2 | NM_005748, ENST00000534854 | 1647 | 5197 | 8747 | None |
| Genewiz | TFORF1558 | YAF2 | NM_001190980, ENST00000555248 | 1648 | 5198 | 8748 | None |
| Genewiz | TFORF1559 | YAF2 | NM_001190977, ENST00000380790 | 1649 | 5199 | 8749 | None |
| Genewiz | TFORF1560 | IL18 | NM_001243211, XM_011542805, ENST00000524595 | 1650 | 5200 | 8750 | None |
| Genewiz | TFORF1561 | ZNF688 | NM_145271, ENST00000223459 | 1651 | 5201 | 8751 | None |
| Genewiz | TFORF1562 | ZNF688 | NM_001024683, ENST00000563276 | 1652 | 5202 | 8752 | None |
| Genewiz | TFORF1563 | ZNF682 | XM_017027455, ENST00000597972 | 1653 | 5203 | 8753 | None |
| Genewiz | TFORF1564 | ZNF682 | NM_033196, ENST00000397165 | 1654 | 5204 | 8754 | None |
| Genewiz | TFORF1565 | ZNF682 | XM_017027456, ENST00000595736 | 1655 | 5205 | 8755 | None |
| Genewiz | TFORF1566 | ZNF682 | NM_001077349, ENST00000397162, ENST00000358523 | 1656 | 5206 | 8756 | None |
| Genewiz | TFORF1567 | ZNF683 | XM_005245832, XM_011541198, XM_005245830, | 1657 | 5207 | 8757 | None |
| | | | NM_001307925, ENST00000403843, ENST00000436292 | | | | |
| Genewiz | TFORF1568 | ZNF683 | NM_001114759, NM_173574, ENST00000349618 | 1658 | 5208 | 8758 | None |
| Genewiz | TFORF1569 | ZNF680 | NM_001130022, ENST00000447137 | 1659 | 5209 | 8759 | None |
| Genewiz | TFORF1570 | ZNF680 | NM_178558, ENST00000309683 | 1660 | 5210 | 8760 | None |
| Genewiz | TFORF1571 | ZNF681 | NM_138286, ENST00000402377 | 1661 | 5211 | 8761 | None |
| Genewiz | TFORF1572 | ZNF687 | NM_001304764, XM_011509812, XM_011509813, | 1662 | 5212 | 8762 | None |
| | | | NM_020832, NM_001304763, ENST00000336715, | | | | |
| | | | ENST00000324048 | | | | |
| Genewiz | TFORF1573 | ZNF684 | XM_011540672, XM_011540671, XM_017000290, | 1663 | 5213 | 8763 | None |
| | | | NM_152373, XM_011540673, ENST00000372699 | | | | |
| Genewiz | TFORF1574 | ZNF174 | NM_001032292, ENST00000575752, ENST00000344823 | 1664 | 5214 | 8764 | None |
| Genewiz | TFORF1575 | ZNF174 | NM_003450, ENST00000571936, ENST00000268655 | 1665 | 5215 | 8765 | None |
| Genewiz | TFORF1576 | ZNF177 | NM_001172651, ENST00000589262 | 1666 | 5216 | 8766 | None |
| Genewiz | TFORF1577 | AHR | NM_001621, ENST00000242057, ENST00000463496 | 1667 | 5217 | 8767 | None |
| Genewiz | TFORF1578 | ZNF778 | XM_011522940, NM_001201407, XM_005256288, | 1668 | 5218 | 8768 | None |
| | | | ENST00000433976 | | | | |
| Genewiz | TFORF1579 | ZNF778 | XM_017023015, ENST00000306502 | 1669 | 5219 | 8769 | None |
| Genewiz | TFORF1580 | ZNF778 | NM_182531, ENST00000620195 | 1670 | 5220 | 8770 | None |
| Genewiz | TFORF1581 | ATMIN | NM_015251, ENST00000299575 | 1671 | 5221 | 8771 | None |
| Genewiz | TFORF1582 | ZNF777 | NM_015694, XM_011516055, ENST00000247930 | 1672 | 5222 | 8772 | None |
| Genewiz | TFORF1583 | ZNF774 | NM_001004309, ENST00000354377 | 1673 | 5223 | 8773 | None |
| Genewiz | TFORF1584 | ZNF775 | NM_173680, ENST00000329630 | 1674 | 5224 | 8774 | None |
| Genewiz | TFORF1585 | ZNF772 | NM_001144068, ENST00000356584 | 1675 | 5225 | 8775 | None |
| Genewiz | TFORF1586 | ZNF772 | NM_001024596, ENST00000343280 | 1676 | 5226 | 8776 | None |
| Genewiz | TFORF1587 | ZNF772 | XM_005258943, XM_005258944, ENST00000427512 | 1677 | 5227 | 8777 | None |
| Genewiz | TFORF1588 | ZNF773 | NM_198542, ENST00000282292 | 1678 | 5228 | 8778 | None |
| Genewiz | TFORF1589 | ZNF773 | NM_001304334, ENST00000598770 | 1679 | 5229 | 8779 | None |
| Genewiz | TFORF1590 | ZNF773 | NM_001304337, ENST00000593916 | 1680 | 5230 | 8780 | None |
| Genewiz | TFORF1591 | CTCF | NM_001191022, ENST00000401394 | 1681 | 5231 | 8781 | None |
| Genewiz | TFORF1592 | ZNF771 | NM_001142305, NM_016643, ENST00000319296, | 1682 | 5232 | 8782 | None |
| | | | ENST00000434417 | | | | |
| Genewiz | TFORF1593 | ZNF197 | NM_001024855, XM_017005495, ENST00000383744, | 1683 | 5233 | 8783 | None |
| | | | ENST00000383745 | | | | |
| Genewiz | TFORF1594 | ZNF197 | XM_005264783, NM_006991, ENST00000344387, | 1684 | 5234 | 8784 | None |
| | | | ENST00000396058 | | | | |
| Genewiz | TFORF1595 | ZNF195 | NM_001130519, ENST00000005082 | 1685 | 5235 | 8785 | None |
| Genewiz | TFORF1596 | ZNF195 | NM_007152, ENST00000354599 | 1686 | 5236 | 8786 | None |
| Genewiz | TFORF1597 | ZNF195 | NM_001256825, NM_001242843, ENST00000343338, | 1687 | 5237 | 8787 | None |
| | | | ENST00000429541 | | | | |
| Genewiz | TFORF1598 | ZNF195 | NM_001242841, XM_017018263, ENST00000526601 | 1688 | 5238 | 8788 | None |
| Genewiz | TFORF1599 | ZNF195 | NM_001130520, ENST00000399602 | 1689 | 5239 | 8789 | None |
| Genewiz | TFORF1600 | ZNF195 | NM_001256823, ENST00000438262, ENST00000528218, | 1690 | 5240 | 8790 | None |
| | | | ENST00000618467 | | | | |
| Genewiz | TFORF1601 | ZNF195 | XM_011520350, XM_017018261, XM_011520351, | 1691 | 5241 | 8791 | None |
| | | | ENST00000620374 | | | | |
| Genewiz | TFORF1602 | ZNF256 | NM_005773, ENST00000282308 | 1692 | 5242 | 8792 | None |
| Genewiz | TFORF1603 | HINFP | NM_198971, NM_015517, XM_011542745, | 1693 | 5243 | 8793 | None |
| | | | ENST00000350777 | | | | |
| Genewiz | TFORF1604 | HINFP | NM_001243259, ENST00000527410 | 1694 | 5244 | 8794 | None |
| Genewiz | TFORF1605 | BAZ2A | NM_013449, ENST00000551812 | 1695 | 5245 | 8795 | None |
| Genewiz | TFORF1606 | BAZ2A | NM_001300905, ENST00000549884 | 1696 | 5246 | 8796 | None |
| Genewiz | TFORF1607 | BAZ2B | NM_001289975, ENST00000392782 | 1697 | 5247 | 8797 | None |
| Genewiz | TFORF1608 | BAZ2B | NM_013450, ENST00000392783 | 1698 | 5248 | 8798 | None |
| Genewiz | TFORF1609 | ZZZ3 | XM_005270729, NM_001308237, ENST00000370798 | 1699 | 5249 | 8799 | None |
| Genewiz | TFORF1610 | ZZZ3 | XM_005270725, NM_015534, XM_005270726, | 1700 | 5250 | 8800 | None |
| | | | ENST00000370801 | | | | |
| Genewiz | TFORF1611 | GSX2 | NM_133267, ENST00000611459, ENST00000326902 | 1701 | 5251 | 8801 | None |
| Genewiz | TFORF1612 | TADA2A | NM_001291918, NM_133439, ENST00000620367 | 1702 | 5252 | 8802 | None |
| Genewiz | TFORF1613 | TADA2A | NM_001166105, NM_001488, ENST00000615182, | 1703 | 5253 | 8803 | None |
| | | | ENST00000620628, ENST00000612272 | | | | |
| Genewiz | TFORF1614 | TADA2B | NM_152293, ENST00000310074 | 1704 | 5254 | 8804 | None |
| Genewiz | TFORF1615 | GSX1 | NM_145657, ENST00000302945 | 1705 | 5255 | 8805 | None |
| Genewiz | TFORF1616 | ZNF519 | XM_017025562, XM_017025563, XM_017025565, | 1706 | 5256 | 8806 | None |
| | | | XM_017025564, NM_145287, ENST00000590202 | | | | |
| Genewiz | TFORF1617 | NF1 | NM_001128147, ENST00000431387 | 1707 | 5257 | 8807 | None |
| Genewiz | TFORF1618 | NF1 | NM_001042492, ENST00000358273 | 1708 | 5258 | 8808 | None |
| Genewiz | TFORF1619 | NF1 | NM_000267, ENST00000356175 | 1709 | 5259 | 8809 | None |
| Genewiz | TFORF1620 | ZNF512 | NM_032434, ENST00000355467 | 1710 | 5260 | 8810 | None |
| Genewiz | TFORF1621 | ZNF512 | NM_001271286, ENST00000416005 | 1711 | 5261 | 8811 | None |
| Genewiz | TFORF1622 | ZNF513 | NM_001201459, XM_005264142, ENST00000407879 | 1712 | 5262 | 8812 | None |
| Genewiz | TFORF1623 | ZNF510 | NM_001314059, NM_014930, XM_017014483, | 1713 | 5263 | 8813 | None |
| | | | ENST00000223428, ENST00000375231 | | | | |
| Genewiz | TFORF1624 | ZNF516 | NM_014643, XM_011526271, XM_011526270, | 1714 | 5264 | 8814 | None |
| | | | XM_011526272, XM_011526269, XM_011526275, | | | | |
| | | | XM_017026097, XM_011526274, XM_011526273, | | | | |
| | | | ENST00000443185 | | | | |
| Genewiz | TFORF1625 | ZNF517 | NM_213605, XM_011517014, XM_011517015, | 1715 | 5265 | 8815 | None |
| | | | ENST00000359971, ENST00000533965, ENST00000531720 | | | | |
| Genewiz | TFORF1626 | ZNF514 | NM_032788, XM_006712806, ENST00000295208, | 1716 | 5266 | 8816 | None |
| | | | ENST00000411425 | | | | |
| Genewiz | TFORF1627 | FOXJ3 | NM_001198851, NM_014947, NM_001198850, | 1717 | 5267 | 8817 | None |
| | | | XM_011541026, ENST00000372572, ENST00000372573, | | | | |
| | | | ENST00000545068, ENST00000361346 | | | | |
| Genewiz | TFORF1628 | FOXJ3 | NM_001198852, ENST00000361776 | 1718 | 5268 | 8818 | None |
| Genewiz | TFORF1629 | ZNF224 | NM_013398, NM_001321645, XM_017027261, | 1719 | 5269 | 8819 | None |
| | | | ENST00000336976 | | | | |
| Genewiz | TFORF1630 | ZNF226 | NM_001146220, NM_015919, NM_001032374, | 1720 | 5270 | 8820 | None |
| | | | XM_017027265, ENST00000413984, ENST00000588742, | | | | |
| | | | ENST00000300823 | | | | |
| Genewiz | TFORF1631 | ZNF226 | NM_001319089, NM_001319088, NM_001319090, | 1721 | 5271 | 8821 | None |
| | | | XM_006723368, XM_006723367, NM_001032373, | | | | |
| | | | XM_006723369, XM_005259227, XM_017027262, | | | | |
| | | | NM_016444, NM_001032372, ENST00000337433, | | | | |
| | | | ENST0590089, ENST00000454662 | | | | |
| Genewiz | TFORF1632 | ZNF227 | XM_017027270, XM_017027271, NM_001289168, | 1722 | 5272 | 8822 | None |
| | | | NM_001289167, NM_001289169, XM_017027268, | | | | |
| | | | XM_017027269, ENST00000391961, ENST00000589005 | | | | |
| Genewiz | TFORF1633 | ZNF229 | NM_001278510, XM_011527292, ENST00000613197 | 1723 | 5273 | 8823 | None |
| Genewiz | TFORF1634 | ZNF229 | NM_014518, ENST00000614049 | 1724 | 5274 | 8824 | None |
| Genewiz | TFORF1635 | HOXC11 | NM_014212, ENST00000546378 | 1725 | 5275 | 8825 | None |
| Genewiz | TFORF1636 | HOXC13 | NM_017410, ENST00000243056 | 1726 | 5276 | 8826 | None |
| Genewiz | TFORF1637 | HOXC12 | NM_173860, ENST00000243103 | 1727 | 5277 | 8827 | None |
| Genewiz | TFORF1638 | BNIP3 | NM_004052, ENST00000368636 | 1728 | 5278 | 8828 | None |
| Genewiz | TFORF1639 | PSIP1 | NM_033222, NM_001128217, ENST00000380738, | 1729 | 5279 | 8829 | None |
| | | | ENST00000380733 | | | | |
| Genewiz | TFORF1640 | PSIP1 | NM_021144, ENST00000380716, ENST00000397519 | 1730 | 5280 | 8830 | None |
| Genewiz | TFORF1641 | PSIP1 | NM_001317898, ENST00000380715 | 1731 | 5281 | 8831 | None |
| Genewiz | TFORF1642 | ZNF426 | NM_001300883, XM_017027293, ENST00000593003 | 1732 | 5282 | 8832 | None |
| Genewiz | TFORF1643 | ZNF426 | NM_001318056, ENST00000589289 | 1733 | 5283 | 8833 | None |
| Genewiz | TFORF1644 | ZNF425 | NM_001001661, ENST00000378061 | 1734 | 5284 | 8834 | None |
| Genewiz | TFORF1645 | ZNF423 | XM_005255857, ENST00000535559, ENST00000567169 | 1735 | 5285 | 8835 | None |
| Genewiz | TFORF1646 | ZNF423 | NM_001271620, XM_017023078, XM_005255856, | 1736 | 5286 | 8836 | None |
| | | | XM_017023077, ENST00000563137, ENST00000562871, | | | | |
| | | | ENST00000562520 | | | | |
| Genewiz | TFORF1647 | ZNF358 | XM_005272460, NM_018083, XM_011527695, | 1737 | 5287 | 8837 | None |
| | | | ENST00000597229 | | | | |
| Genewiz | TFORF1648 | ZNF429 | NM_001001415, ENST00000358491 | 1738 | 5288 | 8838 | None |
| Genewiz | TFORF1649 | REL | NM_002908, ENST00000295025 | 1739 | 5289 | 8839 | None |
| Genewiz | TFORF1650 | ZSCAN5A | NM_001322075, NM_001322076, NM_001322073, | 1740 | 5290 | 8840 | None |
| | | | NM_001322074, XM_017027299, ENST00000592355 | | | | |
| Genewiz | TFORF1651 | ZSCAN5B | NM_001080456, XM_006723189, ENST00000586855, | 1741 | 5291 | 8841 | None |
| | | | ENST00000358992 | | | | |
| Genewiz | TFORF1652 | SPI1 | NM_001080547, ENST00000227163 | 1742 | 5292 | 8842 | None |
| Genewiz | TFORF1653 | SPI1 | NM_003120, ENST00000378538 | 1743 | 5293 | 8843 | None |
| Genewiz | TFORF1654 | TCFL5 | NM_006602, ENST00000335351 | 1744 | 5294 | 8844 | None |
| Genewiz | TFORF1655 | SPIB | NM_001243999, ENST00000270632 | 1745 | 5295 | 8845 | None |
| Genewiz | TFORF1656 | SPIB | NM_003121, ENST00000595883 | 1746 | 5296 | 8846 | None |
| Genewiz | TFORF1657 | SPIB | NM_001243998, ENST00000439922 | 1747 | 5297 | 8847 | None |
| Genewiz | TFORF1658 | LEF1 | NM_001166119, ENST00000510624 | 1748 | 5298 | 8848 | None |
| Genewiz | TFORF1659 | LEF1 | NM_001130714, ENST00000379951 | 1749 | 5299 | 8849 | None |
| Genewiz | TFORF1660 | LEF1 | NM_001130713, ENST00000438313 | 1750 | 5300 | 8850 | None |
| Genewiz | TFORF1661 | ARID5B | NM_001244638, ENST00000309334 | 1751 | 5301 | 8851 | None |
| Genewiz | TFORF1662 | ARIDSB | NM_032199, ENST00000279873 | 1752 | 5302 | 8852 | None |
| Genewiz | TFORF1663 | ARIDSA | NM_001319092, ENST00000454558 | 1753 | 5303 | 8853 | None |
| Genewiz | TFORF1664 | ARIDSA | NM_212481, ENST00000357485 | 1754 | 5304 | 8854 | None |
| Genewiz | TFORF1665 | TP73 | NM_005427, ENST00000378295 | 1755 | 5305 | 8855 | None |
| Genewiz | TFORF1666 | TP73 | NM_001126242, ENST00000378280 | 1756 | 5306 | 8856 | None |
| Genewiz | TFORF1667 | TP73 | NM_001204184, ENST00000354437 | 1757 | 5307 | 8857 | None |
| Genewiz | TFORF1668 | TP73 | NM_001204192, ENST00000378290 | 1758 | 5308 | 8858 | None |
| Genewiz | TFORF1669 | TP73 | NM_001204186, ENST00000604074 | 1759 | 5309 | 8859 | None |
| Genewiz | TFORF1670 | TP73 | NM_001204187, ENST00000357733, ENST00000603362 | 1760 | 5310 | 8860 | None |
| Genewiz | TFORF1671 | TP73 | NM_001126241, ENST00000378285 | 1761 | 5311 | 8861 | None |
| Genewiz | TFORF1672 | TP73 | NM_001126240, ENST00000378288 | 1762 | 5312 | 8862 | None |
| Genewiz | TFORF1673 | TP73 | NM_001204188, ENST00000346387, ENST00000604479 | 1763 | 5313 | 8863 | None |
| Genewiz | TFORF1674 | RUNX1T1 | NM_001198679, ENST00000436581 | 1764 | 5314 | 8864 | None |
| Genewiz | TFORF1675 | RUNX1T1 | NM_001198633, ENST00000615601 | 1765 | 5315 | 8865 | None |
| Genewiz | TFORF1676 | RUNX1T1 | NM_001198630, NM_001198629, NM_001198627, | 1766 | 5316 | 8866 | None |
| | | | NM_001198626, NM_001198631, NM_001198628, | | | | |
| | | | NM_175634, XM_017013931, XM_011517351, | | | | |
| | | | ENST00000613302, ENST00000614812, ENST00000617740, | | | | |
| | | | ENST00000265814, ENST00000523629 | | | | |
| Genewiz | TFORF1677 | RUNX1T1 | NM_001198634, ENST00000520724 | 1767 | 5317 | 8867 | None |
| Genewiz | TFORF1678 | RUNX1T1 | NM_004349, NM_001198632, NM_001198625, | 1768 | 5318 | 8868 | None |
| | | | XM_017013932, XM_017013933, XM_011517352, | | | | |
| | | | ENST00000613886, ENST00000396218, ENST00000518844 | | | | |
| Genewiz | TFORF1679 | RUNX1T1 | NM_175636, NM_175635, XM_011517353, | 1769 | 5319 | 8869 | None |
| | | | XM_017013935, XM_017013937, XM_017013934, | | | | |
| | | | XM_006716676, XM_017013936, ENST00000360348, | | | | |
| | | | ENST00000422361 | | | | |
| Genewiz | TFORF1680 | GTF2IRD2B | NM_001003795, ENST00000472837 | 1770 | 5320 | 8870 | None |
| Genewiz | TFORF1681 | SIM2 | NM_005069, ENST00000290399 | 1771 | 5321 | 8871 | None |
| Genewiz | TFORF1682 | SIM1 | XM_017011197, XM_005267100, NM_005068, | 1772 | 5322 | 8872 | None |
| | | | ENST00000369208, ENST00000262901 | | | | |
| Genewiz | TFORF1683 | TWIST1 | XM_011515496, NM_000474, ENST00000242261 | 1773 | 5323 | 8873 | None |
| Genewiz | TFORF1684 | HNF1B | NM_000458, ENST00000617811 | 1774 | 5324 | 8874 | None |
| Genewiz | TFORF1685 | HNF1B | XM_011525160, ENST00000614313 | 1775 | 5325 | 8875 | None |
| Genewiz | TFORF1686 | HNF1B | NM_001165923, ENST00000621123 | 1776 | 5326 | 8876 | None |
| Genewiz | TFORF1687 | HNF1B | NM_001304286, ENST00000613727 | 1777 | 5327 | 8877 | None |
| Genewiz | TFORF1688 | HNF1A | NM_001306179, ENST00000544413 | 1778 | 5328 | 8878 | None |
| Genewiz | TFORF1689 | HNF1A | XM_005253931, ENST00000541395 | 1779 | 5329 | 8879 | None |
| Genewiz | TFORF1690 | HNF1A | NM_000545, ENST00000257555 | 1780 | 5330 | 8880 | None |
| Genewiz | TFORF1691 | PGR | NM_001271162, ENST00000534013 | 1781 | 5331 | 8881 | None |
| Genewiz | TFORF1692 | ZNF814 | NM_001144989, ENST00000435989 | 1782 | 5332 | 8882 | None |
| Genewiz | TFORF1693 | E4F1 | NM_004424, ENST00000301727 | 1783 | 5333 | 8883 | None |
| Genewiz | TFORF1694 | E4F1 | NM_001288778, ENST00000565090 | 1784 | 5334 | 8884 | None |
| Genewiz | TFORF1695 | ZNF114 | NM_153608, XM_017026415, ENST00000595607, | 1785 | 5335 | 8885 | None |
| | | | ENST00000600687, ENST00000315849 | | | | |
| Genewiz | TFORF1696 | SOX21 | NM_007084, ENST00000376945 | 1786 | 5336 | 8886 | None |
| Genewiz | TFORF1697 | E2F6 | NM_001278277, NM_001278276, NM_001278278, | 1787 | 5337 | 8887 | None |
| | | | ENST00000542100, ENST00000546212 | | | | |
| Genewiz | TFORF1698 | E2F6 | NM_001278275, ENST00000307236 | 1788 | 5338 | 8888 | None |
| Genewiz | TFORF1699 | E2F5 | NM_001083588, ENST00000418930 | 1789 | 5339 | 8889 | None |
| Genewiz | TFORF1700 | E2F5 | NM_001951, ENST00000416274 | 1790 | 5340 | 8890 | None |
| Genewiz | TFORF1701 | E2F5 | NM_001083589, ENST00000517476 | 1791 | 5341 | 8891 | None |
| Genewiz | TFORF1702 | E2F4 | NM_001950, ENST00000379378 | 1792 | 5342 | 8892 | None |
| Genewiz | TFORF1703 | E2F3 | NM_001949, ENST00000346618 | 1793 | 5343 | 8893 | None |
| Genewiz | TFORF1704 | E2F3 | NM_001243076, ENST00000535432 | 1794 | 5344 | 8894 | None |
| Genewiz | TFORF1705 | E2F2 | NM_004091, ENST00000361729 | 1795 | 5345 | 8895 | None |
| Genewiz | TFORF1706 | E2F1 | NM_005225, ENST00000343380 | 1796 | 5346 | 8896 | None |
| Genewiz | TFORF1707 | BNC2 | NM_017637, ENST00000380672 | 1797 | 5347 | 8897 | None |
| Genewiz | TFORF1708 | PPP1R13L | NM_006663, NM_001142502, XM_017026177, | 1798 | 5348 | 8898 | None |
| | | | XM_017026178, ENST00000360957, ENST00000418234 | | | | |
| Genewiz | TFORF1709 | ZFP41 | NM_173832, NM_001271156, ENST00000520584, | 1799 | 5349 | 8899 | None |
| | | | ENST00000330701 | | | | |
| Genewiz | TFORF1710 | CBFB | NM_022845, ENST00000412916 | 1800 | 5350 | 8900 | None |
| Genewiz | TFORF1711 | FOXE1 | NM_004473, ENST00000375123 | 1801 | 5351 | 8901 | None |
| Genewiz | TFORF1712 | DPRX | XM_011527011, XM_011527012, NM_001012728, | 1802 | 5352 | 8902 | None |
| | | | ENST00000376650 | | | | |
| Genewiz | TFORF1713 | LDB2 | NM_001304434, ENST00000515064 | 1803 | 5353 | 8903 | None |
| Genewiz | TFORF1714 | LDB2 | NM_001130834, ENST00000441778 | 1804 | 5354 | 8904 | None |
| Genewiz | TFORF1715 | LDB2 | NM_001290, ENST00000304523 | 1805 | 5355 | 8905 | None |
| Genewiz | TFORF1716 | LDB2 | NM_001304435, ENST00000502640 | 1806 | 5356 | 8906 | None |
| Genewiz | TFORF1717 | LDB1 | NM_003893, ENST00000361198 | 1807 | 5357 | 8907 | None |
| Genewiz | TFORF1718 | LDB1 | NM_001113407, ENST00000425280 | 1808 | 5358 | 8908 | None |
| Genewiz | TFORF1719 | ZNF699 | NM_198535, ENST00000591998, ENST00000308650 | 1809 | 5359 | 8909 | None |
| Genewiz | TFORF1720 | DMRT2 | XM_011517690, XM_017014213, XM_011517687, | 1810 | 5360 | 8910 | None |
| | | | XM_017014215, XM_017014214, NM_181872, | | | | |
| | | | ENST00000382251, ENST00000358146 | | | | |
| Genewiz | TFORF1721 | DMRT2 | XM_017014216, NM_006557, NM_001130865, | 1811 | 5361 | 8911 | None |
| | | | ENST00000635183, ENST00000382255, ENST00000412350, | | | | |
| | | | ENST00000259622 | | | | |
| Genewiz | TFORF1722 | DMRT3 | NM_021240, ENST00000190165 | 1812 | 5362 | 8912 | None |
| Genewiz | TFORF1723 | ZNF691 | NM_001242739, XM_017001400, XM_017001401, | 1813 | 5363 | 8913 | None |
| | | | ENST00000372502 | | | | |
| Genewiz | TFORF1724 | ZNF691 | XM_017001402, XM_017001403, ENST00000372504, | 1814 | 5364 | 8914 | None |
| | | | ENST00000630961 | | | | |
| Genewiz | TFORF1725 | ZNF691 | NM_015911, ENST00000372508, ENST00000372507, | 1815 | 5365 | 8915 | None |
| | | | ENST00000372506 | | | | |
| Genewiz | TFORF1726 | ZNF692 | NM_001136036, ENST00000451251 | 1816 | 5366 | 8916 | None |
| Genewiz | TFORF1727 | ZNF692 | NM_001193328, ENST00000366471 | 1817 | 5367 | 8917 | None |
| Genewiz | TFORF1728 | ZNF695 | NM_001204221, ENST00000487338 | 1818 | 5368 | 8918 | None |
| Genewiz | TFORF1729 | ZNF695 | NM_020394, ENST00000339986 | 1819 | 5369 | 8919 | None |
| Genewiz | TFORF1730 | CRAMP1 | NM_020825, ENST00000397412, ENST00000293925 | 1820 | 5370 | 8920 | None |
| Genewiz | TFORF1731 | ZNF697 | NM_001080470, XM_011542416, XM_005271315, | 1821 | 5371 | 8921 | None |
| | | | ENST00000421812 | | | | |
| Genewiz | TFORF1732 | HDX | NM_001177478, XM_006724619, ENST00000506585 | 1822 | 5372 | 8922 | None |
| Genewiz | TFORF1733 | ZNF169 | NM_194320, ENST00000395395 | 1823 | 5373 | 8923 | None |
| Genewiz | TFORF1734 | RUVBL1 | NM_001319086, ENST00000464873 | 1824 | 5374 | 8924 | None |
| Genewiz | TFORF1735 | ADAR | NM_001111, ENST00000368474 | 1825 | 5375 | 8925 | None |
| Genewiz | TFORF1736 | ADAR | NM_001193495, NM_001025107, XM_006711111, | 1826 | 5376 | 8926 | None |
| | | | XM_006711113, XM_006711112, ENST00000368471 | | | | |
| Genewiz | TFORF1737 | ZBTB7B | XM_006711359, NM_001256455, XM_006711354, | 1827 | 5377 | 8927 | None |
| | | | XM_006711353, XM_006711349, XM_011509599, | | | | |
| | | | XM_006711357, XM_006711358, XM_006711356, | | | | |
| | | | ENST00000535420, ENST00000368426, ENST00000292176 | | | | |
| Genewiz | TFORF1738 | ZBTB7B | NM_001252406, XM_011509598, ENST00000417934 | 1828 | 5378 | 8928 | None |
| Genewiz | TFORF1739 | ZNF165 | NM_003447, XM_017011258, XM_017011260, | 1829 | 5379 | 8929 | None |
| | | | XM_017011259, ENST00000377325 | | | | |
| Genewiz | TFORF1740 | ZNF768 | XM_017023666, ENST00000562803 | 1830 | 5380 | 8930 | None |
| Genewiz | TFORF1741 | ZNF768 | NM_024671, ENST00000380412 | 1831 | 5381 | 8931 | None |
| Genewiz | TFORF1742 | ZNF765 | NM_001040185, ENST00000396408 | 1832 | 5382 | 8932 | None |
| Genewiz | TFORF1743 | ZNF764 | NM_001172679, ENST00000395091 | 1833 | 5383 | 8933 | None |
| Genewiz | TFORF1744 | ZNF764 | NM_033410, ENST00000252797 | 1834 | 5384 | 8934 | None |
| Genewiz | TFORF1745 | ZNF766 | NM_001010851, ENST00000439461 | 1835 | 5385 | 8935 | None |
| Genewiz | TFORF1746 | ZNF761 | NM_001289951, NM_001008401, NM_001289952, | 1836 | 5386 | 8936 | None |
| | | | ENST00000432094, ENST00000454407 | | | | |
| Genewiz | TFORF1747 | ZNF761 | NM_001289953, ENST00000613950 | 1837 | 5387 | 8937 | None |
| Genewiz | TFORF1748 | ZNF763 | NM_001012753, ENST00000343949 | 1838 | 5388 | 8938 | None |
| Genewiz | TFORF1749 | ZNF184 | NM_001318892, NM_001318891, NM_007149, | 1839 | 5389 | 8939 | None |
| | | | ENST00000211936, ENST00000377419 | | | | |
| Genewiz | TFORF1750 | ZNF181 | XM_017026739, XM_005258850, NM_001145665, | 1840 | 5390 | 8940 | None |
| | | | ENST00000459757 | | | | |
| Genewiz | TFORF1751 | ZNF180 | NM_001278508, ENST00000391956 | 1841 | 5391 | 8941 | None |
| Genewiz | TFORF1752 | ZNF180 | NM_013256, ENST00000221327 | 1842 | 5392 | 8942 | None |
| Genewiz | TFORF1753 | ZNF180 | NM_001278509, NM_001291633, ENST00000592529 | 1843 | 5393 | 8943 | None |
| Genewiz | TFORF1754 | ZNF182 | NM_001007088, ENST00000376943 | 1844 | 5394 | 8944 | None |
| Genewiz | TFORF1755 | ZNF182 | NM_006962, NM_001178099, ENST00000396965 | 1845 | 5395 | 8945 | None |
| Genewiz | TFORF1756 | ZNF189 | NM_001278240, ENST00000615466 | 1846 | 5396 | 8946 | None |
| Genewiz | TFORF1757 | ZNF189 | XM_006717281, XM_011518998, XM_006717280, | 1847 | 5397 | 8947 | None |
| | | | NM_197977, XM_017015121, ENST00000259395 | | | | |
| Genewiz | TFORF1758 | ZNF189 | NM_003452, ENST00000339664 | 1848 | 5398 | 8948 | None |
| Genewiz | TFORF1759 | ALYREF | NM_005782, ENST00000505490 | 1849 | 5399 | 8949 | None |
| Genewiz | TFORF1760 | ZNF25 | XM_005252385, XM_005252386, XM_005252384, | 1850 | 5400 | 8950 | None |
| | | | NM_145011, ENST00000302609 | | | | |
| Genewiz | TFORF1761 | ZNF24 | NM_006965, XM_005258341, ENST00000261332, | 1851 | 5401 | 8951 | None |
| | | | ENST00000399061 | | | | |
| Genewiz | TFORF1762 | ZNF24 | NM_001308123, ENST00000589881 | 1852 | 5402 | 8952 | None |
| Genewiz | TFORF1763 | ZNF26 | XM_011534829, XM_005266182, XM_017019923, | 1853 | 5403 | 8953 | None |
| | | | XM_005266183, XM_017019922, ENST00000534834 | | | | |
| Genewiz | TFORF1764 | ZNF20 | NM_021143, ENST00000334213 | 1854 | 5404 | 8954 | None |
| Genewiz | TFORF1765 | ZNF23 | NM_145911, NM_001304492, ENST00000393539, | 1855 | 5405 | 8955 | None |
| | | | ENST00000357254, ENST00000428724 | | | | |
| Genewiz | TFORF1766 | ZNF23 | NM_001304493, NM_001304494, ENST00000564528 | 1856 | 5406 | 8956 | None |
| Genewiz | TFORF1767 | ZNF22 | NM_006963, ENST00000298299 | 1857 | 5407 | 8957 | None |
| Genewiz | TFORF1768 | ZNF28 | NM_006969, XM_011527262, ENST00000457749 | 1858 | 5408 | 8958 | None |
| Genewiz | TFORF1769 | MGA | NM_001080541, ENST00000545763, ENST00000566586 | 1859 | 5409 | 8959 | None |
| Genewiz | TFORF1770 | MGA | NM_001164273, ENST00000219905, ENST00000570161 | 1860 | 5410 | 8960 | None |
| Genewiz | TFORF1771 | TBP | NM_003194, ENST00000392092, ENST00000230354 | 1861 | 5411 | 8961 | None |
| Genewiz | TFORF1772 | TBP | NM_001172085, ENST00000540980 | 1862 | 5412 | 8962 | None |
| Genewiz | TFORF1773 | ZNF501 | NM_145044, NM_001258280, ENST00000396048, | 1863 | 5413 | 8963 | None |
| | | | ENST00000620116 | | | | |
| Genewiz | TFORF1774 | ZNF500 | NM_021646, ENST00000219478 | 1864 | 5414 | 8964 | None |
| Genewiz | TFORF1775 | ZNF500 | NM_001303450, ENST00000545009 | 1865 | 5415 | 8965 | None |
| Genewiz | TFORF1776 | WHSC1 | NM_007331, ENST00000514045, ENST00000420906 | 1866 | 5416 | 8966 | None |
| Genewiz | TFORF1777 | WHSC1 | NM_001042424, XM_011513557, NM_133331, | 1867 | 5417 | 8967 | None |
| | | | NM_133330, NM_133335, XM_005248001, | | | | |
| | | | ENST00000508803, ENST00000382892, ENST082891, | | | | |
| | | | ENST00000382895 | | | | |
| Genewiz | TFORF1778 | WHSC1 | XM_005248005, XM_006713914, NM_133334, | 1868 | 5418 | 8968 | None |
| | | | ENST00000353275, ENST00000312087, ENST00000503128, | | | | |
| | | | ENST00000398261 | | | | |
| Genewiz | TFORF1779 | ZNF507 | NM_014910, NM_001136156, ENST00000311921, | 1869 | 5419 | 8969 | None |
| | | | ENST00000355898 | | | | |
| Genewiz | TFORF1780 | ZNF506 | NM_001099269, ENST00000591639, ENST00000443905, | 1870 | 5420 | 8970 | None |
| | | | ENST00000540806 | | | | |
| Genewiz | TFORF1781 | ZNF506 | NM_001145404, ENST00000450683 | 1871 | 5421 | 8971 | None |
| Genewiz | TFORF1782 | ZNF239 | XM_011540238, XM_005271832, XM_006718003, | 1872 | 5422 | 8972 | None |
| | | | NM_005674, NM_001099282, NM_001324349, | | | | |
| | | | NM_001324350, NM_001324351, NM_001324348, | | | | |
| | | | NM_001324347, NM_001099284, NM_001099283, | | | | |
| | | | ENST00000306006, ENST00000374446, ENST00000426961, | | | | |
| | | | ENST00000535642 | | | | |
| Genewiz | TFORF1783 | ZNF236 | NM_001306089, ENST00000320610 | 1873 | 5423 | 8973 | None |
| Genewiz | TFORF1784 | ZNF236 | XM_011526165, NM_007345, ENST00000253159 | 1874 | 5424 | 8974 | None |
| Genewiz | TFORF1785 | ZNF235 | NM_004234, ENST00000291182 | 1875 | 5425 | 8975 | None |
| Genewiz | TFORF1786 | ZNF234 | NM_001144824, NM_006630, XM_017026149, | 1876 | 5426 | 8976 | None |
| | | | XM_006722974, ENST00000592437, ENST00000426739 | | | | |
| Genewiz | TFORF1787 | TCERG1 | NM_006706, ENST00000296702 | 1877 | 5427 | 8977 | None |
| Genewiz | TFORF1788 | TCERG1 | NM_001040006, ENST00000394421 | 1878 | 5428 | 8978 | None |
| Genewiz | TFORF1789 | ZNF232 | NM_014519, XM_017025021, ENST00000250076 | 1879 | 5429 | 8979 | None |
| Genewiz | TFORF1790 | ZNF232 | NM_001320952, ENST00000575898 | 1880 | 5430 | 8980 | None |
| Genewiz | TFORF1791 | FOXE3 | NM_012186, ENST00000335071 | 1881 | 5431 | 8981 | None |
| Genewiz | TFORF1792 | CNBP | NM_001127194, ENST00000446936 | 1882 | 5432 | 8982 | None |
| Genewiz | TFORF1793 | CNBP | NM_001127193, ENST00000451728 | 1883 | 5433 | 8983 | None |
| Genewiz | TFORF1794 | CNBP | NM_001127192, ENST00000441626 | 1884 | 5434 | 8984 | None |
| Genewiz | TFORF1795 | CNBP | NM_003418, ENST00000422453 | 1885 | 5435 | 8985 | None |
| Genewiz | TFORF1796 | WDHD1 | NM_001008396, ENST00000420358 | 1886 | 5436 | 8986 | None |
| Genewiz | TFORF1797 | WDHD1 | NM_007086, ENST00000360586 | 1887 | 5437 | 8987 | None |
| Genewiz | TFORF1798 | USF2 | NM_003367, ENST00000222305 | 1888 | 5438 | 8988 | None |
| Genewiz | TFORF1799 | USF2 | NM_207291, ENST00000343550 | 1889 | 5439 | 8989 | None |
| Genewiz | TFORF1800 | USF2 | NM_001321150, ENST00000379134 | 1890 | 5440 | 8990 | None |
| Genewiz | TFORF1801 | TBX10 | NM_005995, ENST00000335385 | 1891 | 5441 | 8991 | None |
| Genewiz | TFORF1802 | USF3 | NM_001009899, XM_017005871, ENST00000316407, | 1892 | 5442 | 8992 | None |
| | | | ENST00000478658 | | | | |
| Genewiz | TFORF1803 | USF1 | NM_001276373, NM_007122, ENST00000368020, | 1893 | 5443 | 8993 | None |
| | | | ENST00000368021 | | | | |
| Genewiz | TFORF1804 | ZNF347 | XM_017027384, XM_005259335, NM_032584, | 1894 | 5444 | 8994 | None |
| | | | ENST00000334197 | | | | |
| Genewiz | TFORF1805 | ZNF347 | NM_001172674, NM_001172675, ENST00000452676, | 1895 | 5445 | 8995 | None |
| | | | ENST00000601469 | | | | |
| Genewiz | TFORF1806 | TBX15 | XM_005271162, ENST00000369429 | 1896 | 5446 | 8996 | None |
| Genewiz | TFORF1807 | ZNF432 | NM_001322285, NM_001322284, NM_014650, | 1897 | 5447 | 8997 | None |
| | | | ENST00000594154, ENST00000221315 | | | | |
| Genewiz | TFORF1808 | TBX18 | NM_001080508, ENST00000369663 | 1898 | 5448 | 8998 | None |
| Genewiz | TFORF1809 | TBX19 | NM_005149, ENST00000367821 | 1899 | 5449 | 8999 | None |
| Genewiz | TFORF1810 | ZNF439 | NM_152262, ENST00000304030 | 1900 | 5450 | 9000 | None |
| Genewiz | TFORF1811 | ZNF438 | XM_017015877, XM_017015875, XM_017015881, | 1901 | 5451 | 9001 | None |
| | | | XM_017015879, XM_017015878, XM_017015880, | | | | |
| | | | XM_017015882, XM_017015876, ENST00000375311 | | | | |
| Genewiz | TFORF1812 | ZNF438 | NM_001143770, NM_001143771, XM_017015873, | 1902 | 5452 | 9002 | None |
| | | | XM_011519376, XM_011519377, XM_006717399, | | | | |
| | | | XM_006717398, XM_017015874, ENST00000331737, | | | | |
| | | | ENST00000452305 | | | | |
| Genewiz | TFORF1813 | ZNF438 | NM_001143769, ENST00000538351 | 1903 | 5453 | 9003 | None |
| Genewiz | TFORF1814 | ZNF430 | NM_025189, ENST00000261560 | 1904 | 5454 | 9004 | None |
| Genewiz | TFORF1815 | ZNF433 | NM_001080411, ENST00000344980 | 1905 | 5455 | 9005 | None |
| Genewiz | TFORF1816 | SATB1 | NM_001195470, NM_001322871, XM_011533988, | 1906 | 5456 | 9006 | None |
| | | | XM_011533989, ENST00000417717 | | | | |
| Genewiz | TFORF1817 | UHRF1 | NM_013282, ENST00000622802 | 1907 | 5457 | 9007 | None |
| Genewiz | TFORF1818 | UHRF1 | NM_001290050, NM_001048201, NM_001290051, | 1908 | 5458 | 9008 | None |
| | | | NM_001290052, ENST00000612630, ENST00000624301, | | | | |
| | | | ENST00000615884, ENST00000616255 | | | | |
| Genewiz | TFORF1819 | ZNF138 | NM_006524, ENST00000440155 | 1909 | 5459 | 9009 | None |
| Genewiz | TFORF1820 | ZNF138 | NM_001271637, ENST00000440598 | 1910 | 5460 | 9010 | None |
| Genewiz | TFORF1821 | ZNF138 | NM_001271640, ENST00000359735 | 1911 | 5461 | 9011 | None |
| Genewiz | TFORF1822 | ZNF138 | NM_001160183, ENST00000494380 | 1912 | 5462 | 9012 | None |
| Genewiz | TFORF1823 | ZNF138 | NM_001271638, ENST00000437743 | 1913 | 5463 | 9013 | None |
| Genewiz | TFORF1824 | ZNF138 | NM_001271639, ENST00000307355 | 1914 | 5464 | 9014 | None |
| Genewiz | TFORF1825 | ARNT | NM_178427, ENST00000505755 | 1915 | 5465 | 9015 | None |
| Genewiz | TFORF1826 | ARNT | NM_001286036, ENST00000354396 | 1916 | 5466 | 9016 | None |
| Genewiz | TFORF1827 | ARNT | NM_001668, ENST00000358595 | 1917 | 5467 | 9017 | None |
| Genewiz | TFORF1828 | ARNT | NM_001286035, XM_017001289, ENST00000515192 | 1918 | 5468 | 9018 | None |
| Genewiz | TFORF1829 | DMRTA2 | XM_011541937, NM_032110, ENST00000418121, | 1919 | 5469 | 9019 | None |
| | | | ENST00000404795 | | | | |
| Genewiz | TFORF1830 | ZNF717 | NM_001324026, NM_001290210, XM_017005487, | 1920 | 5470 | 9020 | None |
| | | | ENST00000477374 | | | | |
| Genewiz | TFORF1831 | ZNF717 | NM_001290209, ENST00000478296 | 1921 | 5471 | 9021 | None |
| Genewiz | TFORF1832 | MTERF1 | NM_006980, XM_005250593, XM_006716126, | 1922 | 5472 | 9022 | None |
| | | | ENST00000351870 | | | | |
| Genewiz | TFORF1833 | MTERF1 | NM_001301135, NM_001301134, XM_017012620, | 1923 | 5473 | 9023 | None |
| | | | ENST00000419292, ENST00000406735 | | | | |
| Genewiz | TFORF1834 | EZH1 | NM_001321081, ENST00000415827 | 1924 | 5474 | 9024 | None |
| Genewiz | TFORF1835 | EZH1 | NM_001321082, ENST00000585893 | 1925 | 5475 | 9025 | None |
| Genewiz | TFORF1836 | EZH2 | NM_152998, ENST00000350995 | 1926 | 5476 | 9026 | None |
| Genewiz | TFORF1837 | EZH2 | NM_001203249, ENST00000478654, ENST00000476773 | 1927 | 5477 | 9027 | None |
| Genewiz | TFORF1838 | EZH2 | NM_001203247, ENST00000460911 | 1928 | 5478 | 9028 | None |
| Genewiz | TFORF1839 | EZH2 | NM_001203248, ENST00000483967 | 1929 | 5479 | 9029 | None |
| Genewiz | TFORF1840 | GTF2A1 | NM_201595, ENST00000434192 | 1930 | 5480 | 9030 | None |
| Genewiz | TFORF1841 | HBP1 | XM_017011967, NM_012257, XM_005250266, | 1931 | 5481 | 9031 | None |
| | | | XM_005250267, ENST00000468410, ENST00000222574, | | | | |
| | | | ENST00000485846 | | | | |
| Genewiz | TFORF1842 | YWHAZ | NM_001135702, NM_001135701, NM_001135700, | 1932 | 5482 | 9032 | None |
| | | | NM_145690, NM_001135699, NM_003406, | | | | |
| | | | XM_005251063, XM_017013811, XM_017013810, | | | | |
| | | | XM_005251061, ENST00000395957, ENST00000395958, | | | | |
| | | | ENST057309, ENST00000395956, ENST00000353245, | | | | |
| | | | ENST00000395953, ENST00000395951, ENST00000419477 | | | | |
| Genewiz | TFORF1843 | ALX1 | NM_006982, ENST00000316824 | 1933 | 5483 | 9033 | None |
| Genewiz | TFORF1844 | RB1 | NM_000321, ENST00000267163 | 1934 | 5484 | 9034 | None |
| Genewiz | TFORF1845 | ALX4 | NM_021926, ENST00000329255 | 1935 | 5485 | 9035 | None |
| Genewiz | TFORF1846 | ETS1 | NM_005238, ENST00000319397 | 1936 | 5486 | 9036 | None |
| Genewiz | TFORF1847 | ETS1 | NM_001143820, XM_017017314, ENST00000392668 | 1937 | 5487 | 9037 | None |
| Genewiz | TFORF1848 | ETS1 | XM_011542652, ENST00000526145 | 1938 | 5488 | 9038 | None |
| Genewiz | TFORF1849 | ETS1 | NM_001162422, ENST00000535549 | 1939 | 5489 | 9039 | None |
| Genewiz | TFORF1850 | YWHAE | NM_006761, ENST00000264335 | 1940 | 5490 | 9040 | None |
| Genewiz | TFORF1851 | ZBTB3 | NM_024784, ENST00000394807 | 1941 | 5491 | 9041 | None |
| Genewiz | TFORF1852 | SOX18 | NM_018419, ENST00000340356 | 1942 | 5492 | 9042 | None |
| Genewiz | TFORF1853 | ZBTB1 | NM_014950, XM_011536568, ENST00000358738 | 1943 | 5493 | 9043 | None |
| Genewiz | TFORF1854 | ZBTB5 | NM_014872, XM_005251634, ENST00000307750 | 1944 | 5494 | 9044 | None |
| Genewiz | TFORF1855 | ZBTB4 | NM_001128833, NM_020899, XM_006721563, | 1945 | 5495 | 9045 | None |
| | | | XM_006721564, XM_011523972, ENST00000380599, | | | | |
| | | | ENST00000311403 | | | | |
| Genewiz | TFORF1856 | NR4A2 | NM_006186, XM_017004219, ENST00000339562, | 1946 | 5496 | 9046 | None |
| | | | ENST00000409572 | | | | |
| Genewiz | TFORF1857 | NR4A2 | XM_005246622, ENST00000426264 | 1947 | 5497 | 9047 | None |
| Genewiz | TFORF1858 | NR4A3 | NM_006981, XM_017015162, ENST00000395097 | 1948 | 5498 | 9048 | None |
| Genewiz | TFORF1859 | NR4A3 | NM_173199, ENST00000338488 | 1949 | 5499 | 9049 | None |
| Genewiz | TFORF1860 | NR4A3 | NM_173200, ENST00000618101, ENST00000330847 | 1950 | 5500 | 9050 | None |
| Genewiz | TFORF1861 | DRGX | NM_001276451, ENST00000374139, ENST00000434016 | 1951 | 5501 | 9051 | None |
| Genewiz | TFORF1862 | OTP | NM_032109, ENST00000306422 | 1952 | 5502 | 9052 | None |
| Genewiz | TFORF1863 | POU2F2 | XM_005259010, ENST00000342301 | 1953 | 5503 | 9053 | None |
| Genewiz | TFORF1864 | POU2F2 | NM_001207025, ENST00000526816 | 1954 | 5504 | 9054 | None |
| Genewiz | TFORF1865 | POU2F2 | XM_011527042, ENST00000560398 | 1955 | 5505 | 9055 | None |
| Genewiz | TFORF1866 | POU2F2 | NM_002698, ENST00000389341 | 1956 | 5506 | 9056 | None |
| Genewiz | TFORF1867 | POU2F2 | NM_001207026, ENST00000529952 | 1957 | 5507 | 9057 | None |
| Genewiz | TFORF1868 | MMP3 | NM_002422, ENST00000299855 | 1958 | 5508 | 9058 | None |
| Genewiz | TFORF1869 | POU2F1 | NM_001198783, ENST00000367862 | 1959 | 5509 | 9059 | None |
| Genewiz | TFORF1870 | POU2F1 | NM_001198786, ENST00000429375 | 1960 | 5510 | 9060 | None |
| Genewiz | TFORF1871 | POU2F1 | NM_002697, ENST00000367866 | 1961 | 5511 | 9061 | None |
| Genewiz | TFORF1872 | BPTF | NM_182641, ENST00000306378 | 1962 | 5512 | 9062 | None |
| Genewiz | TFORF1873 | BBX | NM_020235, XM_017006882, XM_011513004, | 1963 | 5513 | 9063 | None |
| | | | ENST00000415149, ENST00000406780 | | | | |
| Genewiz | TFORF1874 | BBX | NM_001142568, XM_005247644, XM_011513001, | 1964 | 5514 | 9064 | None |
| | | | XM_011513000, XM_017006881, XM_005247642, | | | | |
| | | | XM_005247643, ENST00000325805 | | | | |
| Genewiz | TFORF1875 | CCNT1 | NM_001277842, ENST00000618666, ENST00000417344 | 1965 | 5515 | 9065 | None |
| Genewiz | TFORF1876 | CONT1 | NM_001240, ENST00000261900 | 1966 | 5516 | 9066 | None |
| Genewiz | TFORF1877 | CCNT2 | NM_001241, ENST00000295238 | 1967 | 5517 | 9067 | None |
| Genewiz | TFORF1878 | CCNT2 | NM_058241, ENST00000264157 | 1968 | 5518 | 9068 | None |
| Genewiz | TFORF1879 | CREBZF | NM_001039618, XM_017018089, XM_017018092, | 1969 | 5519 | 9069 | None |
| | | | XM_017018091, XM_017018088, XM_011545195, | | | | |
| | | | XM_017018090, ENST00000490820, ENST00000527447 | | | | |
| Genewiz | TFORF1880 | CREBZF | XM_017018087, XM_006718642, XM_017018086, | 1970 | 5520 | 9070 | None |
| | | | ENST00000525639 | | | | |
| Genewiz | TFORF1881 | SOX30 | NM_178424, ENST00000265007 | 1971 | 5521 | 9071 | None |
| Genewiz | TFORF1882 | SOX30 | NM_007017, ENST00000311371 | 1972 | 5522 | 9072 | None |
| Genewiz | TFORF1883 | SOX30 | XM_011534420, XM_005265803, NM_001308165, | 1973 | 5523 | 9073 | None |
| | | | ENST00000519442 | | | | |
| Genewiz | TFORF1884 | ZIC2 | NM_007129, ENST00000376335 | 1974 | 5524 | 9074 | None |
| Genewiz | TFORF1885 | BRCA1 | NM_007294, ENST00000357654 | 1975 | 5525 | 9075 | None |
| Genewiz | TFORF1886 | BRCA1 | NM_007300, ENST00000471181 | 1976 | 5526 | 9076 | None |
| Genewiz | TFORF1887 | BRCA1 | NM_007298, ENST00000491747 | 1977 | 5527 | 9077 | None |
| Genewiz | TFORF1888 | BRCA1 | NM_007297, ENST00000493795 | 1978 | 5528 | 9078 | None |
| Genewiz | TFORF1889 | WNK1 | NM_001184985, ENST00000537687 | 1979 | 5529 | 9079 | None |
| Genewiz | TFORF1890 | WNK1 | NM_014823, ENST00000535572 | 1980 | 5530 | 9080 | None |
| Genewiz | TFORF1891 | WNK1 | NM_018979, ENST00000315939 | 1981 | 5531 | 9081 | None |
| Genewiz | TFORF1892 | WNK1 | NM_213655, ENST00000340908 | 1982 | 5532 | 9082 | None |
| Genewiz | TFORF1893 | AHRR | NM_001242412, ENST00000505113 | 1983 | 5533 | 9083 | None |
| Genewiz | TFORF1894 | AHRR | NM_020731, ENST00000316418 | 1984 | 5534 | 9084 | None |
| Genewiz | TFORF1895 | NR2C2 | NM_001291694, XM_017007120, ENST00000425241, | 1985 | 5535 | 9085 | None |
| | | | ENST00000393102, ENST00000406272 | | | | |
| Genewiz | TFORF1896 | NR2C1 | NM_003297, ENST00000333003 | 1986 | 5536 | 9086 | None |
| Genewiz | TFORF1897 | NR2C1 | NM_001127362, ENST00000330677 | 1987 | 5537 | 9087 | None |
| Genewiz | TFORF1898 | PATZ1 | NM_014323, ENST00000266269 | 1988 | 5538 | 9088 | None |
| Genewiz | TFORF1899 | PATZ1 | NM_032050, ENST00000351933 | 1989 | 5539 | 9089 | None |
| Genewiz | TFORF1900 | PATZ1 | NM_032052, ENST00000405309 | 1990 | 5540 | 9090 | None |
| Genewiz | TFORF1901 | TCF7L1 | NM_031283, ENST00000282111 | 1991 | 5541 | 9091 | None |
| Genewiz | TFORF1902 | TCF7L2 | NM_001198528, ENST00000352065 | 1992 | 5542 | 9092 | None |
| Genewiz | TFORF1903 | TCF7L2 | XM_005270096, ENST00000538897 | 1993 | 5543 | 9093 | None |
| Genewiz | TFORF1904 | TCF7L2 | NM_001198530, ENST00000534894 | 1994 | 5544 | 9094 | None |
| Genewiz | TFORF1905 | TCF7L2 | XM_005270084, ENST00000355995 | 1995 | 5545 | 9095 | None |
| Genewiz | TFORF1906 | TCF7L2 | NM_001146274, ENST00000627217 | 1996 | 5546 | 9096 | None |
| Genewiz | TFORF1907 | TCF7L2 | NM_030756, ENST00000369397 | 1997 | 5547 | 9097 | None |
| Genewiz | TFORF1908 | TCF7L2 | NM_001146283, ENST00000355717 | 1998 | 5548 | 9098 | None |
| Genewiz | TFORF1909 | TCF7L2 | NM_001146285, ENST00000536810 | 1999 | 5549 | 9099 | None |
| Genewiz | TFORF1910 | TCF7L2 | XM_005270089, ENST00000629706 | 2000 | 5550 | 9100 | None |
| Genewiz | TFORF1911 | TCF7L2 | NM_001198527, ENST00000369395 | 2001 | 5551 | 9101 | None |
| Genewiz | TFORF1912 | TCF7L2 | NM_001198525, ENST00000545257 | 2002 | 5552 | 9102 | None |
| Genewiz | TFORF1913 | TCF7L2 | XM_005270085, ENST00000543371 | 2003 | 5553 | 9103 | None |
| Genewiz | TFORF1914 | RUNX2 | NM_001024630, ENST00000465038, ENST00000371438 | 2004 | 5554 | 9104 | None |
| Genewiz | TFORF1915 | RUNX2 | XM_017011396, ENST00000478660 | 2005 | 5555 | 9105 | None |
| Genewiz | TFORF1916 | RUNX2 | NM_001278478, ENST00000625924 | 2006 | 5556 | 9106 | None |
| Genewiz | TFORF1917 | RUNX2 | NM_001015051, ENST00000371432, ENST00000371436 | 2007 | 5557 | 9107 | None |
| Genewiz | TFORF1918 | RUNX3 | NM_004350, ENST00000308873 | 2008 | 5558 | 9108 | None |
| Genewiz | TFORF1919 | RUNX1 | NM_001122607, ENST00000358356 | 2009 | 5559 | 9109 | None |
| Genewiz | TFORF1920 | RUNX1 | NM_001001890, ENST00000344691 | 2010 | 5560 | 9110 | None |
| Genewiz | TFORF1921 | ZBTB22 | NM_005453, NM_001145338, ENST00000418724, | 2011 | 5561 | 9111 | None |
| | | | ENST00000431845 | | | | |
| Genewiz | TFORF1922 | ZBTB20 | NM_001164342, ENST00000474710 | 2012 | 5562 | 9112 | None |
| Genewiz | TFORF1923 | ZBTB20 | NM_001164347, NM_001164346, NM_001164344, | 2013 | 5563 | 9113 | None |
| | | | NM_001164345, NM_001164343, NM_015642, | | | | |
| | | | ENST00000357258, ENST00000462705, ENST00000393785, | | | | |
| | | | ENST00000481632, ENST00000471418, ENST00000464560 | | | | |
| Genewiz | TFORF1924 | ZBTB21 | NM_001320731, NM_001098402, NM_020727, | 2014 | 5564 | 9114 | None |
| | | | XM_011529590, XM_005261121, XM_017028361, | | | | |
| | | | XM_017028360, XM_011529588, ENST0310826, | | | | |
| | | | ENST00000398499, ENST00000398511 | | | | |
| Genewiz | TFORF1925 | ZBTB21 | NM_001098403, NM_001320729, ENST00000398505 | 2015 | 5565 | 9115 | None |
| Genewiz | TFORF1926 | ZBTB25 | NM_001304508, ENST00000555220 | 2016 | 5566 | 9116 | None |
| Genewiz | TFORF1927 | ZNF75D | NM_001185063, ENST00000370764 | 2017 | 5567 | 9117 | None |
| Genewiz | TFORF1928 | XRCC5 | NM_021141, ENST00000392133, ENST00000392132 | 2018 | 5568 | 9118 | None |
| Genewiz | TFORF1929 | XRCC4 | NM_003401, NM_022550, ENST00000282268, | 2019 | 5569 | 9119 | None |
| | | | ENST00000396027 | | | | |
| Genewiz | TFORF1930 | XRCC6 | NM_001288977, ENST00000402580 | 2020 | 5570 | 9120 | None |
| Genewiz | TFORF1931 | XRCC6 | NM_001288978, ENST00000428575, ENST00000405506 | 2021 | 5571 | 9121 | None |
| Genewiz | TFORF1932 | JUN | NM_002228, ENST00000371222 | 2022 | 5572 | 9122 | None |
| Genewiz | TFORF1933 | MEIS2 | NM_170677, ENST00000424352 | 2023 | 5573 | 9123 | None |
| Genewiz | TFORF1934 | MEIS2 | NM_170674, ENST00000559561 | 2024 | 5574 | 9124 | None |
| Genewiz | TFORF1935 | MEIS2 | NM_170675, ENST00000561208 | 2025 | 5575 | 9125 | None |
| Genewiz | TFORF1936 | MEIS2 | NM_172316, XM_017022205, ENST00000397624, | 2026 | 5576 | 9126 | None |
| | | | ENST00000397620 | | | | |
| Genewiz | TFORF1937 | MEIS2 | NM_172315, ENST00000559085 | 2027 | 5577 | 9127 | None |
| Genewiz | TFORF1938 | MEIS1 | NM_002398, ENST00000272369 | 2028 | 5578 | 9128 | None |
| Genewiz | TFORF1939 | MEIS1 | XM_005264325, ENST00000495021 | 2029 | 5579 | 9129 | None |
| Genewiz | TFORF1940 | JUP | NM_002230, NM_021991, XM_017024590, | 2030 | 5580 | 9130 | None |
| | | | XM_011524756, XM_011524758, XM_006721878, | | | | |
| | | | XM_011524753, XM_006721875, XM_011524755, | | | | |
| | | | XM_006721874, XM_011524757, XM_006721873, | | | | |
| | | | ENST00000393930, ENST00000310706, ENST00000393931 | | | | |
| Genewiz | TFORF1941 | MIER1 | NM_001077702, ENST00000371016 | 2031 | 5581 | 9131 | None |
| Genewiz | TFORF1942 | MIER1 | NM_020948, NM_001146110, XM_017001926, | 2032 | 5582 | 9132 | None |
| | | | XM_017001924, XM_005271076, XM_017001925, | | | | |
| | | | ENST00000357692 | | | | |
| Genewiz | TFORF1943 | MIER1 | NM_001077704, ENST00000401042 | 2033 | 5583 | 9133 | None |
| Genewiz | TFORF1944 | MIER1 | NM_001146111, ENST00000371018 | 2034 | 5584 | 9134 | None |
| Genewiz | TFORF1945 | MIER1 | NM_001077701, ENST00000355356 | 2035 | 5585 | 9135 | None |
| Genewiz | TFORF1946 | MIER1 | NM_001077703, ENST00000371014 | 2036 | 5586 | 9136 | None |
| Genewiz | TFORF1947 | MIER1 | NM_001278215, ENST00000371012 | 2037 | 5587 | 9137 | None |
| Genewiz | TFORF1948 | MIER1 | NM_001077700, ENST00000401041 | 2038 | 5588 | 9138 | None |
| Genewiz | TFORF1949 | MIER2 | NM_017550, ENST00000264819 | 2039 | 5589 | 9139 | None |
| Genewiz | TFORF1950 | MIER3 | NM_001297598, ENST00000381226 | 2040 | 5590 | 9140 | None |
| Genewiz | TFORF1951 | MIER3 | NM_152622, ENST00000381213 | 2041 | 5591 | 9141 | None |
| Genewiz | TFORF1952 | MIER3 | NM_001297599, ENST00000381199 | 2042 | 5592 | 9142 | None |
| Genewiz | TFORF1953 | PARP1 | NM_001618, ENST00000366794 | 2043 | 5593 | 9143 | None |
| Genewiz | TFORF1954 | ESR2 | NM_001271877, ENST00000267525 | 2044 | 5594 | 9144 | None |
| Genewiz | TFORF1955 | ESR2 | NM_001291712, NM_001040275, NM_001291723, | 2045 | 5595 | 9145 | None |
| | | | XM_017021084, ENST00000554572, ENST00000353772, | | | | |
| | | | ENST00000358599 | | | | |
| Genewiz | TFORF1956 | ESR2 | NM_001271876, ENST00000553796 | 2046 | 5596 | 9146 | None |
| Genewiz | TFORF1957 | ESR2 | NM_001214902, ENST00000555278 | 2047 | 5597 | 9147 | None |
| Genewiz | TFORF1958 | CUX1 | NM_181552, ENST00000292535 | 2048 | 5598 | 9148 | None |
| Genewiz | TFORF1959 | CUX1 | NM_001202543, ENST00000360264 | 2049 | 5599 | 9149 | None |
| Genewiz | TFORF1960 | CUX1 | NM_181500, ENST00000622516 | 2050 | 5600 | 9150 | None |
| Genewiz | TFORF1961 | CUX1 | NM_001202544, ENST00000547394 | 2051 | 5601 | 9151 | None |
| Genewiz | TFORF1962 | CUX1 | NM_001202546, ENST00000393824 | 2052 | 5602 | 9152 | None |
| Genewiz | TFORF1963 | CUX1 | NM_001913, ENST00000437600, ENST00000292538 | 2053 | 5603 | 9153 | None |
| Genewiz | TFORF1964 | CUX1 | NM_001202545, ENST00000425244 | 2054 | 5604 | 9154 | None |
| Genewiz | TFORF1965 | PPARD | NM_006238, NM_001171818, XM_006715123, | 2055 | 5605 | 9155 | None |
| | | | XM_017010973, XM_011514710, XM_006715120, | | | | |
| | | | XM_017010972, XM_011514709, XM_011514707, | | | | |
| | | | XM_017010971, XM_005249193, XM_017010974, | | | | |
| | | | ENST00000360694, ENST00000311565 | | | | |
| Genewiz | TFORF1966 | PPARD | NM_001171819, ENST00000448077 | 2056 | 5606 | 9156 | None |
| Genewiz | TFORF1967 | PPARD | NM_001171820, ENST00000418635 | 2057 | 5607 | 9157 | None |
| Genewiz | TFORF1968 | YY1 | NM_003403, ENST00000262238 | 2058 | 5608 | 9158 | None |
| Genewiz | TFORF1969 | ZNF233 | XM_017026759, XM_017026760, ENST00000592581 | 2059 | 5609 | 9159 | None |
| Genewiz | TFORF1970 | ZNF233 | NM_001207005, NM_181756, ENST00000391958 | 2060 | 5610 | 9160 | None |
| Genewiz | TFORF1971 | YY2 | NM_206923, ENST00000429584 | 2061 | 5611 | 9161 | None |
| Genewiz | TFORF1972 | TBX2 | NM_005994, ENST00000240328 | 2062 | 5612 | 9162 | None |
| Genewiz | TFORF1973 | TBX3 | NM_016569, ENST00000257566 | 2063 | 5613 | 9163 | None |
| Genewiz | TFORF1974 | TBX3 | NM_005996, ENST00000349155 | 2064 | 5614 | 9164 | None |
| Genewiz | TFORF1975 | ZNF34 | NM_030580, XM_017013874, XM_017013873, | 2065 | 5615 | 9165 | None |
| | | | XM_017013872, XM_011517314, ENST00000343459 | | | | |
| Genewiz | TFORF1976 | TBX1 | NM_080647, XM_017028926, XM_006724312, | 2066 | 5616 | 9166 | None |
| | | | ENST00000332710 | | | | |
| Genewiz | TFORF1977 | TBX1 | NM_005992, ENST00000359500 | 2067 | 5617 | 9167 | None |
| Genewiz | TFORF1978 | TBX1 | NM_080646, ENST00000329705 | 2068 | 5618 | 9168 | None |
| Genewiz | TFORF1979 | TBX6 | NM_004608, XM_017023614, XM_011545926, | 2069 | 5619 | 9169 | None |
| | | | XM_005255523, ENST00000395224, ENST00000279386 | | | | |
| Genewiz | TFORF1980 | TBX4 | NM_001321120, ENST00000393853 | 2070 | 5620 | 9170 | None |
| Genewiz | TFORF1981 | TBX4 | NM_018488, ENST00000240335 | 2071 | 5621 | 9171 | None |
| Genewiz | TFORF1982 | TBX5 | NM_080717, ENST00000349716 | 2072 | 5622 | 9172 | None |
| Genewiz | TFORF1983 | TBX5 | NM_181486, NM_000192, ENST00000310346, | 2073 | 5623 | 9173 | None |
| | | | ENST00000405440 | | | | |
| Genewiz | TFORF1984 | ZNF534 | NM_001291369, ENST00000432303 | 2074 | 5624 | 9174 | None |
| Genewiz | TFORF1985 | ZNF534 | NM_001291368, ENST00000301085, ENST00000617900 | 2075 | 5625 | 9175 | None |
| Genewiz | TFORF1986 | ZNF534 | NM_001143938, ENST00000433050 | 2076 | 5626 | 9176 | None |
| Genewiz | TFORF1987 | ZNF534 | NM_001143939, ENST00000332323 | 2077 | 5627 | 9177 | None |
| Genewiz | TFORF1988 | ZNF536 | XM_017027542, NM_014717, ENST00000355537 | 2078 | 5628 | 9178 | None |
| Genewiz | TFORF1989 | ZNF530 | NM_020880, ENST00000332854, ENST00000600619 | 2079 | 5629 | 9179 | None |
| Genewiz | TFORF1990 | ZNF532 | NM_001318726, NM_018181, XM_017025815, | 2080 | 5630 | 9180 | None |
| | | | XM_017025818, NM_001318727, XM_017025812, | | | | |
| | | | XM_017025816, NM_001318728, XM_017025814, | | | | |
| | | | XM_017025817, XM_017025813, ENST00000336078, | | | | |
| | | | ENST0591083, ENST00000589288, ENST00000591230, | | | | |
| | | | ENST00000591808 | | | | |
| Genewiz | TFORF1991 | ZHX2 | XM_005250837, NM_014943, XM_005250836, | 2081 | 5631 | 9181 | None |
| | | | XM_011516932, XM_011516931, ENST00000314393 | | | | |
| Genewiz | TFORF1992 | ZHX3 | NM_015035, XM_011528720, XM_017027737, | 2082 | 5632 | 9182 | None |
| | | | XM_017027738, ENST00000309060, ENST00000559234, | | | | |
| | | | ENST00000560361, ENST00000432768 | | | | |
| Genewiz | TFORF1993 | ZHX3 | XM_005260341, ENST00000544979 | 2083 | 5633 | 9183 | None |
| Genewiz | TFORF1994 | ZHX1 | NM_001017926, NM_007222, ENST00000297857, | 2084 | 5634 | 9184 | None |
| | | | ENST00000395571, ENST00000522655 | | | | |
| Genewiz | TFORF1995 | KDR | NM_002253, ENST00000263923 | 2085 | 5635 | 9185 | None |
| Genewiz | TFORF1996 | ZNF248 | XM_017016451, ENST00000485560 | 2086 | 5636 | 9186 | None |
| Genewiz | TFORF1997 | ZNF248 | XM_017016449, NM_001267607, ENST00000615949 | 2087 | 5637 | 9187 | None |
| Genewiz | TFORF1998 | ZNF248 | NM_001267606, NM_001267605, XM_011519599, | 2088 | 5638 | 9188 | None |
| | | | XM_017016450, XM_011519600, XM_011519598, | | | | |
| | | | ENST00000611278, ENST00000374648 | | | | |
| Genewiz | TFORF1999 | TAL1 | NM_001287347, NM_001290404, NM_001290405, | 2089 | 5639 | 9189 | None |
| | | | NM_003189, NM_001290403, XM_005271160, | | | | |
| | | | XM_017002187, XM_017002188, XM_017002190, | | | | |
| | | | XM_017002191, XM_017002189, ENST00000371884, | | | | |
| | | | ENST00000294339 | | | | |
| Genewiz | TFORF2000 | MYEF2 | NM_016132, ENST00000324324 | 2090 | 5640 | 9190 | None |
| Genewiz | TFORF2001 | MYEF2 | NM_001301210, ENST00000267836 | 2091 | 5641 | 9191 | None |
| Genewiz | TFORF2002 | FOXD2 | NM_004474, ENST00000334793 | 2092 | 5642 | 9192 | None |
| Genewiz | TFORF2003 | FOXD3 | NM_012183, ENST00000371116 | 2093 | 5643 | 9193 | None |
| Genewiz | TFORF2004 | FOXD1 | NM_004472, ENST00000615637 | 2094 | 5644 | 9194 | None |
| Genewiz | TFORF2005 | ZNF664 | NM_001204298, NM_152437, ENST00000539644, | 2095 | 5645 | 9195 | None |
| | | | ENST00000392404, ENST00000538932, ENST00000337815 | | | | |
| Genewiz | TFORF2006 | CAPN15 | NM_005632, ENST00000219611 | 2096 | 5646 | 9196 | None |
| Genewiz | TFORF2007 | PREB | XM_006711914, ENST00000406567 | 2097 | 5647 | 9197 | None |
| Genewiz | TFORF2008 | ZNF404 | NM_001033719, ENST00000587539 | 2098 | 5648 | 9198 | None |
| Genewiz | TFORF2009 | ZNF407 | NM_001146189, ENST00000577538 | 2099 | 5649 | 9199 | None |
| Genewiz | TFORF2010 | ZNF407 | XM_011526070, NM_001146190, ENST00000582337, | 2100 | 5650 | 9200 | None |
| | | | ENST00000309902 | | | | |
| Genewiz | TFORF2011 | ZNF407 | XM_005266726, XM_011526068, NM_017757, | 2101 | 5651 | 9201 | None |
| | | | ENST00000299687 | | | | |
| Genewiz | TFORF2012 | GATAD2A | XM_011528105, NM_001300946, ENST00000404158 | 2102 | 5652 | 9202 | None |
| Genewiz | TFORF2013 | GATAD2A | NM_017660, ENST00000360315, ENST00000358713 | 2103 | 5653 | 9203 | None |
| Genewiz | TFORF2014 | HMGXB3 | NM_014983, ENST00000502717 | 2104 | 5654 | 9204 | None |
| Genewiz | TFORF2015 | HMGXB4 | NM_001003681, ENST00000216106 | 2105 | 5655 | 9205 | None |
| Genewiz | TFORF2016 | PITX2 | NM_153427, NM_001204399, XM_011532027, | 2106 | 5656 | 9206 | None |
| | | | ENST00000355080, ENST00000616641 | | | | |
| Genewiz | TFORF2017 | PITX2 | NM_001204397, NM_153426, NM_001204398, | 2107 | 5657 | 9207 | None |
| | | | ENST00000394598, ENST00000354925, ENST00000613094, | | | | |
| | | | ENST00000614423 | | | | |
| Genewiz | TFORF2018 | PITX3 | NM_005029, ENST00000539804, ENST00000370002 | 2108 | 5658 | 9208 | None |
| Genewiz | TFORF2019 | MYBL2 | NM_001278610, ENST00000396863 | 2109 | 5659 | 9209 | None |
| Genewiz | TFORF2020 | MYBL2 | NM_002466, ENST00000217026 | 2110 | 5660 | 9210 | None |
| Genewiz | TFORF2021 | NPAS4 | XM_017017539, ENST00000525148 | 2111 | 5661 | 9211 | None |
| Genewiz | TFORF2022 | NPAS4 | NM_178864, ENST00000311034 | 2112 | 5662 | 9212 | None |
| Genewiz | TFORF2023 | NPAS3 | NM_173159, ENST00000357798 | 2113 | 5663 | 9213 | None |
| Genewiz | TFORF2024 | NPAS3 | NM_022123, ENST00000346562 | 2114 | 5664 | 9214 | None |
| Genewiz | TFORF2025 | NPAS3 | NM_001165893, ENST00000548645 | 2115 | 5665 | 9215 | None |
| Genewiz | TFORF2026 | NPAS3 | NM_001164749, ENST00000356141 | 2116 | 5666 | 9216 | None |
| Genewiz | TFORF2027 | NPAS2 | NM_002518, ENST00000335681 | 2117 | 5667 | 9217 | None |
| Genewiz | TFORF2028 | NPAS1 | NM_001321086, ENST00000439365 | 2118 | 5668 | 9218 | None |
| Genewiz | TFORF2029 | SMARCA5 | NM_003601, ENST00000283131 | 2119 | 5669 | 9219 | None |
| Genewiz | TFORF2030 | TGIF2LX | NM_138960, ENST00000283891, ENST00000561129 | 2120 | 5670 | 9220 | None |
| Genewiz | TFORF2031 | PRDM1 | NM_001198, ENST00000369096 | 2121 | 5671 | 9221 | None |
| Genewiz | TFORF2032 | PRDM1 | XM_017011187, XM_011536063, ENST00000369091 | 2122 | 5672 | 9222 | None |
| Genewiz | TFORF2033 | OSR1 | NM_145260, XM_006711942, ENST00000272223 | 2123 | 5673 | 9223 | None |
| Genewiz | TFORF2034 | OSR2 | NM_001286841, ENST00000457907 | 2124 | 5674 | 9224 | None |
| Genewiz | TFORF2035 | OSR2 | NM_001142462, XM_017013018, XM_011516827, | 2125 | 5675 | 9225 | None |
| | | | ENST00000297565, ENST00000522510 | | | | |
| Genewiz | TFORF2036 | TP53BP1 | XM_011521985, ENST00000382039 | 2126 | 5676 | 9226 | None |
| Genewiz | TFORF2037 | TP53BP1 | NM_001141979, ENST00000450115 | 2127 | 5677 | 9227 | None |
| Genewiz | TFORF2038 | TP53BP1 | NM_005657, ENST00000263801 | 2128 | 5678 | 9228 | None |
| Genewiz | TFORF2039 | TP53BP1 | NM_001141980, ENST00000382044 | 2129 | 5679 | 9229 | None |
| Genewiz | TFORF2040 | TP53BP2 | NM_001031685, ENST00000343537 | 2130 | 5680 | 9230 | None |
| Genewiz | TFORF2041 | ZNF850 | NM_001193552, ENST00000591344 | 2131 | 5681 | 9231 | None |
| Genewiz | TFORF2042 | ZNF850 | NM_001267779, ENST00000614887 | 2132 | 5682 | 9232 | None |
| Genewiz | TFORF2043 | ARID3A | XM_017026445, XM_005259514, NM_005224, | 2133 | 5683 | 9233 | None |
| | | | XM_005259513, ENST00000263620 | | | | |
| Genewiz | TFORF2044 | ARID3C | NM_001017363, ENST00000378909 | 2134 | 5684 | 9234 | None |
| Genewiz | TFORF2045 | ARID3B | NM_001307939, ENST00000622429 | 2135 | 5685 | 9235 | None |
| Genewiz | TFORF2046 | ARID3B | NM_006465, ENST00000346246 | 2136 | 5686 | 9236 | None |
| Genewiz | TFORF2047 | PRDM8 | XM_005263146, NM_020226, NM_001099403, | 2137 | 5687 | 9237 | None |
| | | | ENST00000504452, ENST00000339711, ENST00000415738 | | | | |
| Genewiz | TFORF2048 | PRDM9 | NM_020227, ENST00000296682 | 2138 | 5688 | 9238 | None |
| Genewiz | TFORF2049 | PURA | NM_005859, ENST00000331327 | 2139 | 5689 | 9239 | None |
| Genewiz | TFORF2050 | ATF6B | NM_004381, ENST00000375203 | 2140 | 5690 | 9240 | None |
| Genewiz | TFORF2051 | ATF6B | NM_001136153, ENST00000375201 | 2141 | 5691 | 9241 | None |
| Genewiz | TFORF2052 | BCL6 | NM_001134738, XM_011513062, ENST00000621333, | 2142 | 5692 | 9242 | None |
| | | | ENST00000450123 | | | | |
| Genewiz | TFORF2053 | BCL6 | NM_001130845, NM_001706, XM_005247694, | 2143 | 5693 | 9243 | None |
| | | | ENST00000406870, ENST00000232014 | | | | |
| Genewiz | TFORF2054 | BCL3 | NM_005178, ENST00000164227 | 2144 | 5694 | 9244 | None |
| Genewiz | TFORF2055 | CDX1 | NM_001804, ENST00000231656 | 2145 | 5695 | 9245 | None |
| Genewiz | TFORF2056 | NKX2-8 | NM_014360, ENST00000258829 | 2146 | 5696 | 9246 | None |
| Genewiz | TFORF2057 | ARGFX | NM_001012659, ENST00000334384 | 2147 | 5697 | 9247 | None |
| Genewiz | TFORF2058 | NKX2-2 | NM_002509, ENST00000377142 | 2148 | 5698 | 9248 | None |
| Genewiz | TFORF2059 | NKX2-3 | NM_145285, ENST00000344586 | 2149 | 5699 | 9249 | None |
| Genewiz | TFORF2060 | NKX2-1 | NM_001079668, ENST00000354822 | 2150 | 5700 | 9250 | None |
| Genewiz | TFORF2061 | NKX2-1 | NM_003317, ENST00000498187, ENST00000518149, | 2151 | 5701 | 9251 | None |
| | | | ENST00000522719 | | | | |
| Genewiz | TFORF2062 | NKX2-6 | NM_001136271, ENST00000325017 | 2152 | 5702 | 9252 | None |
| Genewiz | TFORF2063 | NKX2-4 | NM_033176, ENST00000351817 | 2153 | 5703 | 9253 | None |
| Genewiz | TFORF2064 | NKX2-5 | NM_001166176, ENST00000521848 | 2154 | 5704 | 9254 | None |
| Genewiz | TFORF2065 | NKX2-5 | NM_001166175, ENST00000424406 | 2155 | 5705 | 9255 | None |
| Genewiz | TFORF2066 | FLII | NM_001256265, ENST00000545457 | 2156 | 5706 | 9256 | None |
| Genewiz | TFORF2067 | FLII | NM_001256264, ENST00000579294 | 2157 | 5707 | 9257 | None |
| Genewiz | TFORF2068 | FLII | NM_002018, ENST00000327031 | 2158 | 5708 | 9258 | None |
| Genewiz | TFORF2069 | MYC | NM_002467, ENST00000621592, ENST00000613283 | 2159 | 5709 | 9259 | None |
| Genewiz | TFORF2070 | MYB | NM_001161660, ENST00000533624 | 2160 | 5710 | 9260 | None |
| Genewiz | TFORF2071 | MYB | NM_001161659, ENST00000534044 | 2161 | 5711 | 9261 | None |
| Genewiz | TFORF2072 | MYB | NM_005375, ENST00000367814 | 2162 | 5712 | 9262 | None |
| Genewiz | TFORF2073 | MYB | NM_001161656, ENST00000528774 | 2163 | 5713 | 9263 | None |
| Genewiz | TFORF2074 | MYB | NM_001161658, ENST00000534121 | 2164 | 5714 | 9264 | None |
| Genewiz | TFORF2075 | MYB | NM_001130173, ENST00000341911 | 2165 | 5715 | 9265 | None |
| Genewiz | TFORF2076 | MYB | NM_001161657, ENST00000525369 | 2166 | 5716 | 9266 | None |
| Genewiz | TFORF2077 | MYB | NM_001130172, ENST00000442647 | 2167 | 5717 | 9267 | None |
| Genewiz | TFORF2078 | FLI1 | NM_001271012, ENST00000344954 | 2168 | 5718 | 9268 | None |
| Genewiz | TFORF2079 | FLI1 | XM_017017405, XM_017017406, XM_011542701, | 2169 | 5719 | 9269 | None |
| | | | NM_001167681, ENST00000534087 | | | | |
| Genewiz | TFORF2080 | FLI1 | NM_001271010, ENST00000281428 | 2170 | 5720 | 9270 | None |
| Genewiz | TFORF2081 | FLI1 | NM_002017, ENST00000527786 | 2171 | 5721 | 9271 | None |
| Genewiz | TFORF2082 | IGHMBP2 | NM_002180, ENST00000255078 | 2172 | 5722 | 9272 | None |
| Genewiz | TFORF2083 | SNAPC4 | NM_003086, XM_006717242, XM_006717241, | 2173 | 5723 | 9273 | None |
| | | | XM_005266096, ENST00000298532 | | | | |
| Genewiz | TFORF2084 | ZNF441 | NM_152355, ENST00000357901 | 2174 | 5724 | 9274 | None |
| Genewiz | TFORF2085 | NFAT5 | NM_006599, ENST00000354436 | 2175 | 5725 | 9275 | None |
| Genewiz | TFORF2086 | NFAT5 | NM_138713, ENST00000627621 | 2176 | 5726 | 9276 | None |
| Genewiz | TFORF2087 | NFAT5 | NM_001113178, ENST00000567239 | 2177 | 5727 | 9277 | None |
| Genewiz | TFORF2088 | NFAT5 | XM_011522818, NM_173215, NM_173214, | 2178 | 5728 | 9278 | None |
| | | | NM_138714, XM_017022870, ENST00000349945, | | | | |
| | | | ENST00000393742, ENST00000566899 | | | | |
| Genewiz | TFORF2089 | ZNF442 | NM_030824, XM_017027318, ENST00000242804, | 2179 | 5729 | 9279 | None |
| | | | ENST00000545749 | | | | |
| Genewiz | TFORF2090 | FANCD2 | NM_033084, ENST00000287647 | 2180 | 5730 | 9280 | None |
| Genewiz | TFORF2091 | FANCD2 | NM_001018115, NM_001319984, ENST00000383807, | 2181 | 5731 | 9281 | None |
| | | | ENST00000419585 | | | | |
| Genewiz | TFORF2092 | ZBTB2 | NM_020861, XM_011536004, XM_005267076, | 2182 | 5732 | 9282 | None |
| | | | ENST00000325144 | | | | |
| Genewiz | TFORF2093 | ZFP14 | NM_020917, XM_017027038, ENST00000270001 | 2183 | 5733 | 9283 | None |
| Genewiz | TFORF2094 | DEK | NM_001134709, ENST00000244776 | 2184 | 5734 | 9284 | None |
| Genewiz | TFORF2095 | ST18 | NM_014682, XM_011517633, XM_017014063, | 2185 | 5735 | 9285 | None |
| | | | XM_017014058, XM_011517632, XM_017014061, | | | | |
| | | | XM_017014071, XM_017014067, XM_017014054, | | | | |
| | | | XM_017014065, XM_017014053, XM_017014068, | | | | |
| | | | XM_017014048, XM_017014047, XM_017014051, | | | | |
| | | | XM_017014069, XM_017014064, XM_011517636, | | | | |
| | | | XM_017014062, XM_017014070, XM_011517635, | | | | |
| | | | XM_011517634, XM_017014066, XM_011517631, | | | | |
| | | | XM_011517629, XM_006716487, XM_011517637, | | | | |
| | | | XM_017014056, XM_017014052, XM_017014049, | | | | |
| | | | XM_017014057, XM_017014060, XM_017014059, | | | | |
| | | | XM_017014050, XM_017014055, XM_011517638, | | | | |
| | | | ENST00000276480 | | | | |
| Genewiz | TFORF2096 | ZKSCAN1 | NM_001287055, ENST00000535170 | 2186 | 5736 | 9286 | None |
| Genewiz | TFORF2097 | ZKSCAN1 | NM_003439, XM_011516559, ENST00000324306 | 2187 | 5737 | 9287 | None |
| Genewiz | TFORF2098 | ZKSCAN1 | NM_001287054, ENST00000426572, ENST00000620510 | 2188 | 5738 | 9288 | None |
| Genewiz | TFORF2099 | SOHLH2 | NM_017826, ENST00000379881 | 2189 | 5739 | 9289 | None |
| Genewiz | TFORF2100 | SOHLH2 | NM_001282147, ENST00000317764 | 2190 | 5740 | 9290 | None |
| Genewiz | TFORF2101 | ZBTB38 | NM_001080412, XM_005247257, XM_011512611, | 2191 | 5741 | 9291 | None |
| | | | XM_017006061, XM_{——}017006055, XM_017006054, | | | | |
| | | | XM_017006053, XM_017006060, XM_017006056, | | | | |
| | | | XM_005247258, XM_017006052, XM_005247261, | | | | |
| | | | XM_017006059, XM_017006058, XM_017006057, | | | | |
| | | | ENST00000514251, ENST037056, ENST00000441582, | | | | |
| | | | ENST00000321464 | | | | |
| Genewiz | TFORF2102 | NEUROG2 | NM_024019, ENST00000313341 | 2192 | 5742 | 9292 | None |
| Genewiz | TFORF2103 | ZBTB32 | NM_014383, XM_017026589, XM_011526718, | 2193 | 5743 | 9293 | None |
| | | | ENST00000392197, ENST00000262630 | | | | |
| Genewiz | TFORF2104 | ZBTB34 | XM_011518699, ENST00000319119 | 2194 | 5744 | 9294 | None |
| Genewiz | TFORF2105 | ZBTB34 | NM_001099270, ENST00000373452 | 2195 | 5745 | 9295 | None |
| Genewiz | TFORF2106 | ZBTB37 | XM_017002558, XM_011510062, XM_017002557, | 2196 | 5746 | 9296 | None |
| | | | ENST00000367704 | | | | |
| Genewiz | TFORF2107 | ZBTB37 | XM_006711578, XM_005245546, NM_001122770, | 2197 | 5747 | 9297 | None |
| | | | XM_017002556, ENST00000427304, ENST00000367701 | | | | |
| Genewiz | TFORF2108 | L3MBTL4 | XM_011525761, NM_173464, ENST00000400105 | 2198 | 5748 | 9298 | None |
| Genewiz | TFORF2109 | L3MBTL4 | XM_005258166, ENST00000317931 | 2199 | 5749 | 9299 | None |
| Genewiz | TFORF2110 | NR4A1 | NM_001202233, ENST00000360284, ENST00000550082 | 2200 | 5750 | 9300 | None |
| Genewiz | TFORF2111 | NR4A1 | NM_001202234, ENST00000545748 | 2201 | 5751 | 9301 | None |
| Genewiz | TFORF2112 | SIRT6 | NM_001321063, ENST00000601488 | 2202 | 5752 | 9302 | None |
| Genewiz | TFORF2113 | SIRT6 | NM_001193285, ENST00000305232 | 2203 | 5753 | 9303 | None |
| Genewiz | TFORF2114 | SIRT6 | NM_001321064, ENST00000594279 | 2204 | 5754 | 9304 | None |
| Genewiz | TFORF2115 | NCOA6 | NM_001242539, XM_017027751, ENST00000612493 | 2205 | 5755 | 9305 | None |
| Genewiz | TFORF2116 | NCOA6 | NM_014071, NM_001318240, ENST00000374796, | 2206 | 5756 | 9306 | None |
| | | | ENST00000359003 | | | | |
| Genewiz | TFORF2117 | TBPL2 | NM_199047, ENST00000247219 | 2207 | 5757 | 9307 | None |
| Genewiz | TFORF2118 | TBPL1 | NM_001253676, XM_017011513, NM_004865, | 2208 | 5758 | 9308 | None |
| | | | ENST00000613034, ENST00000237264 | | | | |
| Genewiz | TFORF2119 | HOPX | NM_001145460, ENST00000554144 | 2209 | 5759 | 9309 | None |
| Genewiz | TFORF2120 | HOPX | NM_032495, ENST00000420433 | 2210 | 5760 | 9310 | None |
| Genewiz | TFORF2121 | HOPX | NM_001145459, NM_139211, NM_139212, | 2211 | 5761 | 9311 | None |
| | | | XM_017008734, XM_017008731, XM_017008730, | | | | |
| | | | XM_017008733, XM_017008729, XM_017008732, | | | | |
| | | | ENST00000337881, ENST00000503639, ENST00000553379, | | | | |
| | | | ENST0381255, ENST00000317745, ENST00000555760, | | | | |
| | | | ENST00000556614, ENST00000556376, ENST00000508121 | | | | |
| Genewiz | TFORF2122 | ZNF563 | XM_005259751, ENST00000595977 | 2212 | 5762 | 9312 | None |
| Genewiz | TFORF2123 | ZNF273 | XM_017011688, NM_021148, ENST00000476120 | 2213 | 5763 | 9313 | None |
| Genewiz | TFORF2124 | ZNF747 | NM_001305019, ENST00000568028 | 2214 | 5764 | 9314 | None |
| Genewiz | TFORF2125 | ZNF747 | NM_001305020, ENST00000395094 | 2215 | 5765 | 9315 | None |
| Genewiz | TFORF2126 | ZNF746 | NM_152557, ENST00000340622 | 2216 | 5766 | 9316 | None |
| Genewiz | TFORF2127 | ZNF746 | NM_001163474, ENST00000458143 | 2217 | 5767 | 9317 | None |
| Genewiz | TFORF2128 | ZNF740 | NM_001004304, ENST00000416904 | 2218 | 5768 | 9318 | None |
| Genewiz | TFORF2129 | ZNF749 | XM_017026802, NM_001023561, ENST00000334181 | 2219 | 5769 | 9319 | None |
| Genewiz | TFORF2130 | PFDN5 | NM_145897, ENST00000351500 | 2220 | 5770 | 9320 | None |
| Genewiz | TFORF2131 | ZGLP1 | NM_001103167, ENST00000403903 | 2221 | 5771 | 9321 | None |
| Genewiz | TFORF2132 | LCOR | XM_017016787, NM_001170765, XM_017016788, | 2222 | 5772 | 9322 | None |
| | | | XM_017016786, NM_032440, ENST00000371103, | | | | |
| | | | ENST00000356016, ENST00000371097 | | | | |
| Genewiz | TFORF2133 | MNAT1 | NM_001177963, ENST00000539616 | 2223 | 5773 | 9323 | None |
| Genewiz | TFORF2134 | ZNF521 | NM_015461, ENST00000361524, ENST00000538137 | 2224 | 5774 | 9324 | None |
| Genewiz | TFORF2135 | ZNF521 | NM_001308225, XM_017025698, XM_011525911, | 2225 | 5775 | 9325 | None |
| | | | ENST00000584787 | | | | |
| Genewiz | TFORF2136 | TRPS1 | NM_014112, XM_006716625, XM_011517264, | 2226 | 5776 | 9326 | None |
| | | | XM_011517266, ENST00000395715 | | | | |
| Genewiz | TFORF2137 | TRPS1 | XM_011517268, XM_005251049, ENST00000640765, | 2227 | 5777 | 9327 | None |
| | | | ENST00000220888 | | | | |
| Genewiz | TFORF2138 | TRPS1 | NM_001282902, ENST00000520276 | 2228 | 5778 | 9328 | None |
| Genewiz | TFORF2139 | ZNF527 | NM_032453, ENST00000436120 | 2229 | 5779 | 9329 | None |
| Genewiz | TFORF2140 | ZNF525 | ENST00000474037 | 2230 | 5780 | 9330 | None |
| Genewiz | TFORF2141 | ZNF525 | ENST00000491101 | 2231 | 5781 | 9331 | None |
| Genewiz | TFORF2142 | ZNF525 | ENST00000593918 | 2232 | 5782 | 9332 | None |
| Genewiz | TFORF2143 | ZNF525 | ENST00000467003 | 2233 | 5783 | 9333 | None |
| Genewiz | TFORF2144 | ZNF525 | ENST00000475179 | 2234 | 5784 | 9334 | None |
| Genewiz | TFORF2145 | ZNF529 | NM_020951, NM_001145649, XM_006723302, | 2235 | 5785 | 9335 | None |
| | | | XM_011527164, ENST00000591340 | | | | |
| Genewiz | TFORF2146 | ZNF529 | NM_001321351, XM_011527167, XM_017027044, | 2236 | 5786 | 9336 | None |
| | | | XM_017027041, XM_017027043, XM_017027042, | | | | |
| | | | ENST00000334116 | | | | |
| Genewiz | TFORF2147 | ZNF528 | NM_032423, ENST00000360465 | 2237 | 5787 | 9337 | None |
| Genewiz | TFORF2148 | ZNF251 | NM_138367, ENST00000292562 | 2238 | 5788 | 9338 | None |
| Genewiz | TFORF2149 | ZNF250 | NM_001109689, XM_011517209, XM_005272327, | 2239 | 5789 | 9339 | None |
| | | | XM_005272328, ENST00000417550 | | | | |
| Genewiz | TFORF2150 | ZNF250 | NM_021061, XM_006716613, XM_006716612, | 2240 | 5790 | 9340 | None |
| | | | ENST00000292579 | | | | |
| Genewiz | TFORF2151 | FOXG1 | NM_005249, ENST00000313071 | 2241 | 5791 | 9341 | None |
| Genewiz | TFORF2152 | BCL11A | NM_018014, ENST00000356842 | 2242 | 5792 | 9342 | None |
| Genewiz | TFORF2153 | BCL11A | XM_017004334, ENST00000358510 | 2243 | 5793 | 9343 | None |
| Genewiz | TFORF2154 | BCL11A | NM_138559, ENST00000359629 | 2244 | 5794 | 9344 | None |
| Genewiz | TFORF2155 | BCL11A | XM_011532909, NM_022893, ENST00000335712 | 2245 | 5795 | 9345 | None |
| Genewiz | TFORF2156 | RHOXF2 | NM_032498, ENST00000371388 | 2246 | 5796 | 9346 | None |
| Genewiz | TFORF2157 | RHOXF1 | NM_139282, ENST00000217999 | 2247 | 5797 | 9347 | None |
| Genewiz | TFORF2158 | BCL11B | NM_138576, ENST00000357195 | 2248 | 5798 | 9348 | None |
| Genewiz | TFORF2159 | BCL11B | NM_022898, ENST00000345514 | 2249 | 5799 | 9349 | None |
| Genewiz | TFORF2160 | TXK | NM_003328, ENST00000264316 | 2250 | 5800 | 9350 | None |
| Genewiz | TFORF2161 | GRHL1 | NM_198182, ENST00000324907 | 2251 | 5801 | 9351 | None |
| Genewiz | TFORF2162 | GRHL1 | XM_005246159, ENST00000405379 | 2252 | 5802 | 9352 | None |
| Genewiz | TFORF2163 | GRHL2 | XM_011517306, XM_011517305, ENST00000395927 | 2253 | 5803 | 9353 | None |
| Genewiz | TFORF2164 | GRHL2 | NM_024915, ENST00000251808 | 2254 | 5804 | 9354 | None |
| Genewiz | TFORF2165 | GRHL3 | NM_198173, ENST00000361548 | 2255 | 5805 | 9355 | None |
| Genewiz | TFORF2166 | GRHL3 | NM_198174, ENST00000350501 | 2256 | 5806 | 9356 | None |
| Genewiz | TFORF2167 | GRHL3 | NM_021180, ENST00000236255 | 2257 | 5807 | 9357 | None |
| Genewiz | TFORF2168 | GRHL3 | NM_001195010, XM_011541869, ENST00000356046 | 2258 | 5808 | 9358 | None |
| Genewiz | TFORF2169 | BLZF1 | NM_001320972, ENST00000367807 | 2259 | 5809 | 9359 | None |
| Genewiz | TFORF2170 | BHLHE22 | NM_152414, ENST00000321870 | 2260 | 5810 | 9360 | None |
| Genewiz | TFORF2171 | BHLHE23 | NM_080606, ENST00000612929 | 2261 | 5811 | 9361 | None |
| Genewiz | TFORF2172 | ZNF419 | NM_024691, ENST00000221735 | 2262 | 5812 | 9362 | None |
| Genewiz | TFORF2173 | ZNF419 | NM_001098496, ENST00000415379 | 2263 | 5813 | 9363 | None |
| Genewiz | TFORF2174 | ZNF419 | NM_001098491, ENST00000424930 | 2264 | 5814 | 9364 | None |
| Genewiz | TFORF2175 | ZNF419 | NM_001098494, ENST00000347466 | 2265 | 5815 | 9365 | None |
| Genewiz | TFORF2176 | ZNF419 | NM_001098492, ENST00000426954 | 2266 | 5816 | 9366 | None |
| Genewiz | TFORF2177 | ZNF419 | NM_001098493, ENST00000442920 | 2267 | 5817 | 9367 | None |
| Genewiz | TFORF2178 | ZNF418 | XM_017026305, NM_001317027, XM_017026304, | 2268 | 5818 | 9368 | None |
| | | | ENST00000425570 | | | | |
| Genewiz | TFORF2179 | ZNF418 | NM_001317030, ENST00000599852 | 2269 | 5819 | 9369 | None |
| Genewiz | TFORF2180 | ZNF417 | NM_152475, ENST00000312026 | 2270 | 5820 | 9370 | None |
| Genewiz | TFORF2181 | ZNF417 | NM_001297734, ENST00000595559 | 2271 | 5821 | 9371 | None |
| Genewiz | TFORF2182 | ZNF415 | XM_006723281, XM_017026972, XM_006723282, | 2272 | 5822 | 9372 | None |
| | | | ENST00000601493 | | | | |
| Genewiz | TFORF2183 | ZNF415 | NM_001164309, NM_018355, XM_017026964, | 2273 | 5823 | 9373 | None |
| | | | XM_011527103, ENST00000243643, ENST00000421033 | | | | |
| Genewiz | TFORF2184 | ZNF415 | NM_001136038, XM_017026966, XM_017026965, | 2274 | 5824 | 9374 | None |
| | | | XM_017026967, ENST00000500065 | | | | |
| Genewiz | TFORF2185 | ZNF414 | NM_032370, ENST00000255616 | 2275 | 5825 | 9375 | None |
| Genewiz | TFORF2186 | ZNF414 | NM_001146175, ENST00000393927 | 2276 | 5826 | 9376 | None |
| Genewiz | TFORF2187 | ZNF81 | XM_005272600, XM_017029486, NM_007137, | 2277 | 5827 | 9377 | None |
| | | | XM_011543900, XM_017029487, XM_011543899, | | | | |
| | | | ENST00000376954, ENST00000338637 | | | | |
| Genewiz | TFORF2188 | ZNF410 | NM_021188, ENST00000555044 | 2278 | 5828 | 9378 | None |
| Genewiz | TFORF2189 | ZNF410 | NM_001242924, ENST00000442160, ENST00000615736 | 2279 | 5829 | 9379 | None |
| Genewiz | TFORF2190 | ZNF410 | NM_001242927, ENST00000540593 | 2280 | 5830 | 9380 | None |
| Genewiz | TFORF2191 | RAX2 | NM_032753, ENST00000555978, ENST00000555633 | 2281 | 5831 | 9381 | None |
| Genewiz | TFORF2192 | RFXANK | NM_134440, NM_001278728, ENST00000392324 | 2282 | 5832 | 9382 | None |
| Genewiz | TFORF2193 | TFAM | NM_003201, ENST00000487519 | 2283 | 5833 | 9383 | None |
| Genewiz | TFORF2194 | TFAM | NM_001270782, ENST00000373895 | 2284 | 5834 | 9384 | None |
| Genewiz | TFORF2195 | MLXIPL | NM_032954, ENST00000354613 | 2285 | 5835 | 9385 | None |
| Genewiz | TFORF2196 | MLXIPL | NM_032953, ENST00000414749 | 2286 | 5836 | 9386 | None |
| Genewiz | TFORF2197 | MLXIPL | NM_032952, ENST00000429400 | 2287 | 5837 | 9387 | None |
| Genewiz | TFORF2198 | MLXIPL | NM_032951, ENST00000313375 | 2288 | 5838 | 9388 | None |
| Genewiz | TFORF2199 | RXRA | NM_002957, ENST00000481739 | 2289 | 5839 | 9389 | None |
| Genewiz | TFORF2200 | POU4F1 | NM_006237, ENST00000377208 | 2290 | 5840 | 9390 | None |
| Genewiz | TFORF2201 | POU4F2 | NM_004575, ENST00000281321 | 2291 | 5841 | 9391 | None |
| Genewiz | TFORF2202 | POU4F3 | NM_002700, ENST00000230732 | 2292 | 5842 | 9392 | None |
| Genewiz | TFORF2203 | MYNN | XM_011512987, XM_017006864, NM_018657, | 2293 | 5843 | 9393 | None |
| | | | NM_001185118, ENST00000349841, ENST00000356716 | | | | |
| Genewiz | TFORF2204 | MYNN | NM_001185119, ENST00000544106 | 2294 | 5844 | 9394 | None |
| Genewiz | TFORF2205 | POU2F3 | NM_001244682, ENST00000260264 | 2295 | 5845 | 9395 | None |
| Genewiz | TFORF2206 | POU2F3 | NM_014352, ENST00000543440 | 2296 | 5846 | 9396 | None |
| Genewiz | TFORF2207 | CREB3L2 | NM_194071, ENST00000330387 | 2297 | 5847 | 9397 | None |
| Genewiz | TFORF2208 | CREB3L2 | NM_001253775, ENST00000452463 | 2298 | 5848 | 9398 | None |
| Genewiz | TFORF2209 | CREB3L3 | NM_032607, ENST00000078445 | 2299 | 5849 | 9399 | None |
| Genewiz | TFORF2210 | CREB3L3 | NM_001271997, ENST00000602147 | 2300 | 5850 | 9400 | None |
| Genewiz | TFORF2211 | CREB3L3 | NM_001271995, ENST00000595923 | 2301 | 5851 | 9401 | None |
| Genewiz | TFORF2212 | CREB3L3 | NM_001271996, ENST00000602257 | 2302 | 5852 | 9402 | None |
| Genewiz | TFORF2213 | CREB3L1 | NM_052854, ENST00000621158 | 2303 | 5853 | 9403 | None |
| Genewiz | TFORF2214 | CREB3L4 | XM_017000372, NM_001255980, XM_006711172, | 2304 | 5854 | 9404 | None |
| | | | NM_001255981, ENST00000368600 | | | | |
| Genewiz | TFORF2215 | CREB3L4 | NM_001255978, NM_130898, NM_001255979, | 2305 | 5855 | 9405 | None |
| | | | ENST00000368607, ENST00000271889, ENST00000368603 | | | | |
| Genewiz | TFORF2216 | NOTO | NM_001134462, ENST00000398468 | 2306 | 5856 | 9406 | None |
| Genewiz | TFORF2217 | YAP1 | NM_001282098, ENST00000629586 | 2307 | 5857 | 9407 | None |
| Genewiz | TFORF2218 | YAP1 | NM_001282099, ENST00000345877 | 2308 | 5858 | 9408 | None |
| Genewiz | TFORF2219 | YAP1 | NM_001130145, ENST00000282441 | 2309 | 5859 | 9409 | None |
| Genewiz | TFORF2220 | YAP1 | NM_006106, ENST00000526343 | 2310 | 5860 | 9410 | None |
| Genewiz | TFORF2221 | YAP1 | NM_001282101, ENST00000615667 | 2311 | 5861 | 9411 | None |
| Genewiz | TFORF2222 | YAP1 | NM_001195044, ENST00000531439 | 2312 | 5862 | 9412 | None |
| Genewiz | TFORF2223 | YAP1 | NM_001195045, ENST00000524575 | 2313 | 5863 | 9413 | None |
| Genewiz | TFORF2224 | YAP1 | NM_001282100, ENST00000537274 | 2314 | 5864 | 9414 | None |
| Genewiz | TFORF2225 | ZNF343 | NM_001282498, ENST00000617391 | 2315 | 5865 | 9415 | None |
| Genewiz | TFORF2226 | ZNF343 | NM_001321801, NM_001282497, ENST00000612935 | 2316 | 5866 | 9416 | None |
| Genewiz | TFORF2227 | ZNF343 | NM_001282499, ENST00000381253, ENST00000358413 | 2317 | 5867 | 9417 | None |
| Genewiz | TFORF2228 | ZNF343 | NM_001321800, NM_024325, NM_001282496, | 2318 | 5868 | 9418 | None |
| | | | NM_001282495, XM_017028062, ENST00000278772 | | | | |
| Genewiz | TFORF2229 | ZNF730 | NM_001277403, ENST00000597761 | 2319 | 5869 | 9419 | None |
| Genewiz | TFORF2230 | EHF | NM_001206615, XM_005252862, ENST00000450654 | 2320 | 5870 | 9420 | None |
| Genewiz | TFORF2231 | EHF | NM_012153, XM_011519984, XM_005252860, | 2321 | 5871 | 9421 | None |
| | | | XM_011519985, ENST00000257831, ENST00000530286, | | | | |
| | | | ENST00000533754 | | | | |
| Genewiz | TFORF2232 | EHF | NM_001206616, ENST00000531794 | 2322 | 5872 | 9422 | None |
| Genewiz | TFORF2233 | SMARCD1 | NM_139071, ENST00000381513 | 2323 | 5873 | 9423 | None |
| Genewiz | TFORF2234 | GATA6 | NM_005257, ENST00000269216, ENST00000581694 | 2324 | 5874 | 9424 | None |
| Genewiz | TFORF2235 | ZNF880 | XM_017026812, NM_001145434, ENST00000422689 | 2325 | 5875 | 9425 | None |
| Genewiz | TFORF2236 | GATA4 | NM_001308094, ENST00000528712 | 2326 | 5876 | 9426 | None |
| Genewiz | TFORF2237 | GATA4 | XM_005272386, XM_011543817, XM_006716248, | 2327 | 5877 | 9427 | None |
| | | | XM_011543818, XM_017013312, XM_005272385, | | | | |
| | | | NM_001308093, ENST00000532059 | | | | |
| Genewiz | TFORF2238 | GATA4 | NM_002052, ENST00000335135 | 2328 | 5878 | 9428 | None |
| Genewiz | TFORF2239 | GATA5 | NM_080473, XM_006723699, ENST00000252997 | 2329 | 5879 | 9429 | None |
| Genewiz | TFORF2240 | GATA3 | NM_002051, ENST00000346208 | 2330 | 5880 | 9430 | None |
| Genewiz | TFORF2241 | GATA3 | XM_005252443, XM_005252442, NM_001002295, | 2331 | 5881 | 9431 | None |
| | | | ENST00000379328 | | | | |
| Genewiz | TFORF2242 | GATA1 | NM_002049, ENST00000376670 | 2332 | 5882 | 9432 | None |
| Genewiz | TFORF2243 | LITAR | NM_001136473, ENST00000413364, ENST00000620789 | 2333 | 5883 | 9433 | None |
| Genewiz | TFORF2244 | TCF15 | NM_004609, ENST00000246080 | 2334 | 5884 | 9434 | None |
| Genewiz | TFORF2245 | TCF12 | NM_001306219, ENST00000543579 | 2335 | 5885 | 9435 | None |
| Genewiz | TFORF2246 | TCF12 | NM_207040, ENST00000343827 | 2336 | 5886 | 9436 | None |
| Genewiz | TFORF2247 | TCF12 | NM_207038, NM_003205, NM_001322157, | 2337 | 5887 | 9437 | None |
| | | | NM_001322165, ENST0267811, ENST00000557843 | | | | |
| Genewiz | TFORF2248 | TCF12 | NM_001306220, ENST00000537840 | 2338 | 5888 | 9438 | None |
| Genewiz | TFORF2249 | TCF12 | NM_001322151, NM_207036, NM_207037, | 2339 | 5889 | 9439 | None |
| | | | NM_001322159, NM_001322162, ENST00000438423, | | | | |
| | | | ENST00000333725 | | | | |
| Genewiz | TFORF2250 | TCF19 | NM_001318908, NM_001077511, NM_007109, | 2340 | 5890 | 9440 | None |
| | | | ENST00000376257, ENST00000376255 | | | | |
| Genewiz | TFORF2251 | ZNF630 | NM_001037735, NM_001282201, ENST00000442455, | 2341 | 5891 | 9441 | None |
| | | | ENST00000409324 | | | | |
| Genewiz | TFORF2252 | ZNF630 | NM_001282202, ENST00000276054 | 2342 | 5892 | 9442 | None |
| Genewiz | TFORF2253 | HMGN3 | NM_004242, ENST00000344726 | 2343 | 5893 | 9443 | None |
| Genewiz | TFORF2254 | HMGN3 | NM_001201363, ENST00000620514 | 2344 | 5894 | 9444 | None |
| Genewiz | TFORF2255 | ARNTL | NM_001297722, NM_001297719, XM_017017742, | 2345 | 5895 | 9445 | None |
| | | | ENST00000403290 | | | | |
| Genewiz | TFORF2256 | ARNTL | NM_001297724, XM_017017746, XM_011520112, | 2346 | 5896 | 9446 | None |
| | | | XM_017017747, ENST00000401424 | | | | |
| Genewiz | TFORF2257 | ARNTL | NM_001030273, XM_011520113, XM_017017748, | 2347 | 5897 | 9447 | None |
| | | | ENST00000403510 | | | | |
| Genewiz | TFORF2258 | SOX11 | NM_003108, ENST00000322002 | 2348 | 5898 | 9448 | None |
| Genewiz | TFORF2259 | SOX13 | NM_005686, ENST00000367204, ENST00000618875 | 2349 | 5899 | 9449 | None |
| Genewiz | TFORF2260 | SOX17 | NM_022454, ENST00000297316 | 2350 | 5900 | 9450 | None |
| Genewiz | TFORF2261 | DMAP1 | NM_001034024, NM_001034023, NM_019100, | 2351 | 5901 | 9451 | None |
| | | | XM_017001808, ENST00000361745, ENST00000315913, | | | | |
| | | | ENST00000372289 | | | | |
| Genewiz | TFORF2262 | ZFP28 | NM_001308440, ENST00000591844 | 2352 | 5902 | 9452 | None |
| Genewiz | TFORF2263 | ZFP28 | NM_020828, ENST00000301318 | 2353 | 5903 | 9453 | None |
| Genewiz | TFORF2264 | ZNF286A | NM_001130842, NM_020652, ENST00000421016, | 2354 | 5904 | 9454 | None |
| | | | ENST00000583566, ENST00000464847 | | | | |
| Genewiz | TFORF2265 | ZNF286A | NM_001288643, ENST00000593105 | 2355 | 5905 | 9455 | None |
| Genewiz | TFORF2266 | ANHX | NM_001191054, ENST00000419717, ENST00000545940 | 2356 | 5906 | 9456 | None |
| Genewiz | TFORF2267 | ARNT2 | NM_014862, ENST00000303329 | 2357 | 5907 | 9457 | None |
| Genewiz | TFORF2268 | ZNF701 | NM_001172655, XM_011527092, ENST00000301093, | 2358 | 5908 | 9458 | None |
| | | | ENST00000540331 | | | | |
| Genewiz | TFORF2269 | ZNF701 | NM_018260, ENST00000391785 | 2359 | 5909 | 9459 | None |
| Genewiz | TFORF2270 | PSAP | NM_002778, ENST00000394936 | 2360 | 5910 | 9460 | None |
| Genewiz | TFORF2271 | PRDM5 | NM_001300824, ENST00000515109 | 2361 | 5911 | 9461 | None |
| Genewiz | TFORF2272 | PRDM5 | NM_018699, ENST00000264808 | 2362 | 5912 | 9462 | None |
| Genewiz | TFORF2273 | PRDM6 | NM_001136239, ENST00000407847 | 2363 | 5913 | 9463 | None |
| Genewiz | TFORF2274 | SLC22A1 | XM_006715552, ENST00000457470 | 2364 | 5914 | 9464 | None |
| Genewiz | TFORF2275 | SLC22A1 | NM_003057, ENST00000366963 | 2365 | 5915 | 9465 | None |
| Genewiz | TFORF2276 | SLC22A1 | NM_153187, ENST00000324965 | 2366 | 5916 | 9466 | None |
| Genewiz | TFORF2277 | PRDM2 | NM_001135610, ENST00000376048 | 2367 | 5917 | 9467 | None |
| Genewiz | TFORF2278 | PRDM2 | NM_015866, XM_017002257, ENST00000311066 | 2368 | 5918 | 9468 | None |
| Genewiz | TFORF2279 | PRDM2 | XM_017002256, NM_012231, XM_017002255, | 2369 | 5919 | 9469 | None |
| | | | ENST00000235372 | | | | |
| Genewiz | TFORF2280 | PRDM2 | NM_001007257, XM_017002262, ENST00000413440, | 2370 | 5920 | 9470 | None |
| | | | ENST00000343137 | | | | |
| Genewiz | TFORF2281 | MYBBP1A | NM_001105538, ENST00000381556 | 2371 | 5921 | 9471 | None |
| Genewiz | TFORF2282 | MYBBP1A | NM_014520, ENST00000254718 | 2372 | 5922 | 9472 | None |
| Genewiz | TFORF2283 | HES1 | NM_005524, ENST00000232424 | 2373 | 5923 | 9473 | None |
| Genewiz | TFORF2284 | HES2 | NM_019089, ENST00000377834 | 2374 | 5924 | 9474 | None |
| Genewiz | TFORF2285 | HES3 | NM_001024598, ENST00000377898 | 2375 | 5925 | 9475 | None |
| Genewiz | TFORF2286 | HES4 | XM_005244771, ENST00000484667 | 2376 | 5926 | 9476 | None |
| Genewiz | TFORF2287 | HES4 | NM_001142467, ENST00000428771 | 2377 | 5927 | 9477 | None |
| Genewiz | TFORF2288 | HES4 | NM_021170, ENST00000304952 | 2378 | 5928 | 9478 | None |
| Genewiz | TFORF2289 | HES5 | NM_001010926, ENST00000378453 | 2379 | 5929 | 9479 | None |
| Genewiz | TFORF2290 | HES6 | NM_001142853, ENST00000409002 | 2380 | 5930 | 9480 | None |
| Genewiz | TFORF2291 | HES6 | NM_001282434, ENST00000409574 | 2381 | 5931 | 9481 | None |
| Genewiz | TFORF2292 | HES7 | NM_001165967, ENST00000541682 | 2382 | 5932 | 9482 | None |
| Genewiz | TFORF2293 | HES7 | NM_032580, ENST00000317814 | 2383 | 5933 | 9483 | None |
| Genewiz | TFORF2294 | TAF13 | NM_005645, ENST00000461096, ENST00000338366 | 2384 | 5934 | 9484 | None |
| Genewiz | TFORF2295 | TAF11 | NM_005643, ENST00000361288 | 2385 | 5935 | 9485 | None |
| Genewiz | TFORF2296 | TAF11 | NM_001270488, ENST00000420584 | 2386 | 5936 | 9486 | None |
| Genewiz | TFORF2297 | TAF10 | NM_006284, ENST00000299424 | 2387 | 5937 | 9487 | None |
| Genewiz | TFORF2298 | ZFP69B | XM_005271137, NM_023070, ENST00000411995, | 2388 | 5938 | 9488 | None |
| | | | ENST00000361584 | | | | |
| Genewiz | TFORF2299 | HIC1 | NM_006497, ENST00000399849, ENST00000619757 | 2389 | 5939 | 9489 | None |
| Genewiz | TFORF2300 | HIC1 | NM_001098202, ENST00000322941 | 2390 | 5940 | 9490 | None |
| Genewiz | TFORF2301 | HIC2 | NM_015094, XM_011530010, XM_011530008, | 2391 | 5941 | 9491 | None |
| | | | XM_011530009, XM_011530007, ENST00000407464, | | | | |
| | | | ENST00000407598, ENST00000443632 | | | | |
| Genewiz | TFORF2302 | CIITA | XM_011522493, NM_000246, ENST00000324288 | 2392 | 5942 | 9492 | None |
| Genewiz | TFORF2303 | CIITA | NM_001286403, ENST00000381835 | 2393 | 5943 | 9493 | None |
| Genewiz | TFORF2304 | CIITA | XM_011522492, NM_001286402, ENST00000618327 | 2394 | 5944 | 9494 | None |
| Genewiz | TFORF2305 | ETV1 | NM_001163152, ENST00000399357 | 2395 | 5945 | 9495 | None |
| Genewiz | TFORF2306 | ETV1 | XM_011515167, ENST00000405358 | 2396 | 5946 | 9496 | None |
| Genewiz | TFORF2307 | ETV1 | NM_001163147, ENST00000405192 | 2397 | 5947 | 9497 | None |
| Genewiz | TFORF2308 | ETV1 | NM_001163149, NM_001163148, ENST00000242066, | 2398 | 5948 | 9498 | None |
| | | | ENST00000403685 | | | | |
| Genewiz | TFORF2309 | ETV1 | NM_001163151, ENST00000420159 | 2399 | 5949 | 9499 | None |
| Genewiz | TFORF2310 | ETV1 | NM_001163150, ENST00000403527 | 2400 | 5950 | 9500 | None |
| Genewiz | TFORF2311 | RXRG | NM_001256571, NM_001256570, ENST00000619224 | 2401 | 5951 | 9501 | None |
| Genewiz | TFORF2312 | ETV3 | XM_006711210, NM_001145312, ENST00000368192 | 2402 | 5952 | 9502 | None |
| Genewiz | TFORF2313 | ETV3 | NM_005240, ENST00000326786 | 2403 | 5953 | 9503 | None |
| Genewiz | TFORF2314 | RXRB | NM_001270401, ENST00000374685 | 2404 | 5954 | 9504 | None |
| Genewiz | TFORF2315 | RXRB | NM_021976, ENST00000374680 | 2405 | 5955 | 9505 | None |
| Genewiz | TFORF2316 | ETV4 | NM_001986, NM_001079675, ENST00000319349, | 2406 | 5956 | 9506 | None |
| | | | ENST00000393664, ENST00000591713 | | | | |
| Genewiz | TFORF2317 | ETV4 | NM_001261438, NM_001261437, ENST00000538265, | 2407 | 5957 | 9507 | None |
| | | | ENST00000545954 | | | | |
| Genewiz | TFORF2318 | ZNF732 | NM_001137608, ENST00000419098 | 2408 | 5958 | 9508 | None |
| Genewiz | TFORF2319 | TAF1B | NM_005680, ENST00000263663 | 2409 | 5959 | 9509 | None |
| Genewiz | TFORF2320 | TAF1A | NM_001201536, NM_005681, ENST00000350027, | 2410 | 5960 | 9510 | None |
| | | | ENST00000352967 | | | | |
| Genewiz | TFORF2321 | TAF1A | NM_139352, XM_017002759, XM_017002760, | 2411 | 5961 | 9511 | None |
| | | | XM_006711613, ENST00000366890 | | | | |
| Genewiz | TFORF2322 | ZNF736 | NM_001170905, ENST00000355095, ENST00000423484 | 2412 | 5962 | 9512 | None |
| Genewiz | TFORF2323 | TAF1 | NM_138923, ENST00000373790 | 2413 | 5963 | 9513 | None |
| Genewiz | TFORF2324 | TAF1 | NM_001286074, ENST00000423759 | 2414 | 5964 | 9514 | None |
| Genewiz | TFORF2325 | TAF1 | NM_004606, ENST00000276072 | 2415 | 5965 | 9515 | None |
| Genewiz | TFORF2326 | ZNF735 | NM_001159524, ENST00000429565 | 2416 | 5966 | 9516 | None |
| Genewiz | TFORF2327 | CIZ1 | NM_001257976, ENST00000629610 | 2417 | 5967 | 9517 | None |
| Genewiz | TFORF2328 | CIZ1 | NM_001131015, XM_017014596, XM_005251891, | 2418 | 5968 | 9518 | None |
| | | | ENST00000372948 | | | | |
| Genewiz | TFORF2329 | CIZ1 | NM_001131016, NM_012127, XM_005251888, | 2419 | 5969 | 9519 | None |
| | | | ENST00000372938, ENST00000634901 | | | | |
| Genewiz | TFORF2330 | CIZ1 | NM_001131018, XM_005251893, ENST00000372954 | 2420 | 5970 | 9520 | None |
| Genewiz | TFORF2331 | CIZ1 | NM_001257975, ENST00000538431 | 2421 | 5971 | 9521 | None |
| Genewiz | TFORF2332 | ZNF492 | NM_020855, ENST00000456783 | 2422 | 5972 | 9522 | None |
| Genewiz | TFORF2333 | ZNF491 | XM_005259730, NM_152356, ENST00000323169 | 2423 | 5973 | 9523 | None |
| Genewiz | TFORF2334 | CTNNB1 | NM_001098210, NM_001098209, NM_001904, | 2424 | 5974 | 9524 | None |
| | | | XM_017005738, XM_005264886, ENST00000405570, | | | | |
| | | | ENST00000396183, ENST00000349496, ENST00000396185 | | | | |
| Genewiz | TFORF2335 | CTNNB1 | XM_006712984, XM_006712983, ENST00000453024 | 2425 | 5975 | 9525 | None |
| Genewiz | TFORF2336 | ZNF14 | NM_021030, ENST00000344099 | 2426 | 5976 | 9526 | None |
| Genewiz | TFORF2337 | ZNF18 | XM_017025009, XM_017025010, XM_017025011, | 2427 | 5977 | 9527 | None |
| | | | XM_017025008, NM_001303282, ENST00000454073 | | | | |
| Genewiz | TFORF2338 | ZNF18 | XM_011524002, XM_017025007, XM_017025006, | 2428 | 5978 | 9528 | None |
| | | | NM_144680, NM_001303281, ENST00000580306, | | | | |
| | | | ENST00000580613, ENST00000322748 | | | | |
| Genewiz | TFORF2339 | ZNF19 | NM_006961, ENST00000288177, ENST00000564230 | 2429 | 5979 | 9529 | None |
| Genewiz | TFORF2340 | MITF | NM_006722, ENST00000328528 | 2430 | 5980 | 9530 | None |
| Genewiz | TFORF2341 | MITF | NM_198177, ENST00000314589 | 2431 | 5981 | 9531 | None |
| Genewiz | TFORF2342 | MITF | NM_198159, ENST00000352241 | 2432 | 5982 | 9532 | None |
| Genewiz | TFORF2343 | MITF | XM_005264754, ENST00000448226 | 2433 | 5983 | 9533 | None |
| Genewiz | TFORF2344 | MITF | NM_198178, ENST00000531774 | 2434 | 5984 | 9534 | None |
| Genewiz | TFORF2345 | MITF | XM_017006448, NM_001184967, ENST00000472437 | 2435 | 5985 | 9535 | None |
| Genewiz | TFORF2346 | MITF | NM_000248, ENST00000394351 | 2436 | 5986 | 9536 | None |
| Genewiz | TFORF2347 | HOXD8 | NM_001199746, ENST00000450510 | 2437 | 5987 | 9537 | None |
| Genewiz | TFORF2348 | HOXD8 | NM_001199747, ENST00000429017 | 2438 | 5988 | 9538 | None |
| Genewiz | TFORF2349 | HOXD8 | NM_019558, ENST00000313173 | 2439 | 5989 | 9539 | None |
| Genewiz | TFORF2350 | ZNF16 | NM_001029976, NM_006958, XM_005272341, | 2440 | 5990 | 9540 | None |
| | | | XM_011517298, ENST00000276816, ENST00000611477, | | | | |
| | | | ENST00000394909 | | | | |
| Genewiz | TFORF2351 | ZNF17 | NM_006959, ENST00000601808 | 2441 | 5991 | 9541 | None |
| Genewiz | TFORF2352 | ZNF17 | XM_017027205, ENST00000307658 | 2442 | 5992 | 9542 | None |
| Genewiz | TFORF2353 | ZNF12 | NM_016265, ENST00000405858 | 2443 | 5993 | 9543 | None |
| Genewiz | TFORF2354 | ZNF12 | NM_006956, ENST00000342651 | 2444 | 5994 | 9544 | None |
| Genewiz | TFORF2355 | PROP1 | NM_006261, ENST00000308304 | 2445 | 5995 | 9545 | None |
| Genewiz | TFORF2356 | ZNF648 | XM_017000301, XM_017000302, NM_001009992, | 2446 | 5996 | 9546 | None |
| | | | ENST00000339948 | | | | |
| Genewiz | TFORF2357 | ZNF649 | NM_023074, ENST00000354957 | 2447 | 5997 | 9547 | None |
| Genewiz | TFORF2358 | ZNF644 | NM_201269, XM_017002491, XM_017002488, | 2448 | 5998 | 9548 | None |
| | | | XM_017002489, XM_017002490, ENST00000370440, | | | | |
| | | | ENST00000337393 | | | | |
| Genewiz | TFORF2359 | ZNF644 | NM_016620, NM_032186, XM_017002492, | 2449 | 5999 | 9549 | None |
| | | | XM_017002493, XM_017002494, ENST00000347275, | | | | |
| | | | ENST00000361321 | | | | |
| Genewiz | TFORF2360 | ZNF641 | XM_017018797, NM_001172682, ENST00000448928 | 2450 | 6000 | 9550 | None |
| Genewiz | TFORF2361 | ZNF641 | XM_011537897, NM_152320, ENST00000544117, | 2451 | 6001 | 9551 | None |
| | | | ENST00000301042 | | | | |
| Genewiz | TFORF2362 | ZNF641 | XM_005268638, XM_011537898, NM_001172681, | 2452 | 6002 | 9552 | None |
| | | | ENST00000547026 | | | | |
| Genewiz | TFORF2363 | TONSL | NM_013432, ENST00000409379 | 2453 | 6003 | 9553 | None |
| Genewiz | TFORF2364 | CREB1 | NM_004379, XM_011510647, ENST00000430624, | 2454 | 6004 | 9554 | None |
| | | | ENST00000353267 | | | | |
| Genewiz | TFORF2365 | ZNF398 | NM_020781, XM_011516441, ENST00000426851, | 2455 | 6005 | 9555 | None |
| | | | ENST00000483892, ENST00000491174 | | | | |
| Genewiz | TFORF2366 | MBD4 | NM_001276271, ENST00000507208 | 2456 | 6006 | 9556 | None |
| Genewiz | TFORF2367 | MBD4 | NM_001276272, ENST00000503197 | 2457 | 6007 | 9557 | None |
| Genewiz | TFORF2368 | MBD4 | NM_001276273, ENST00000393278 | 2458 | 6008 | 9558 | None |
| Genewiz | TFORF2369 | MBD4 | NM_003925, ENST00000249910 | 2459 | 6009 | 9559 | None |
| Genewiz | TFORF2370 | MBD4 | NM_001276270, ENST00000429544 | 2460 | 6010 | 9560 | None |
| Genewiz | TFORF2371 | ZNF468 | NM_001008801, ENST00000595646 | 2461 | 6011 | 9561 | None |
| Genewiz | TFORF2372 | ZNF468 | NM_001277120, ENST00000243639 | 2462 | 6012 | 9562 | None |
| Genewiz | TFORF2373 | MBD1 | NM_002384, XM_017025776, ENST00000398488 | 2463 | 6013 | 9563 | None |
| Genewiz | TFORF2374 | MBD1 | NM_001204136, ENST00000590208 | 2464 | 6014 | 9564 | None |
| Genewiz | TFORF2375 | MBD1 | NM_001204151, ENST00000591535 | 2465 | 6015 | 9565 | None |
| Genewiz | TFORF2376 | MBD1 | XM_011525993, XM_011525994, NM_001204137, | 2466 | 6016 | 9566 | None |
| | | | ENST00000585595, ENST00000457839 | | | | |
| Genewiz | TFORF2377 | MBD1 | NM_015844, XM_017025770, XM_017025771, | 2467 | 6017 | 9567 | None |
| | | | ENST00000347968, ENST00000398493 | | | | |
| Genewiz | TFORF2378 | MBD1 | NM_001204142, ENST00000339998 | 2468 | 6018 | 9568 | None |
| Genewiz | TFORF2379 | MBD1 | NM_015847, ENST00000353909 | 2469 | 6019 | 9569 | None |
| Genewiz | TFORF2380 | MBD1 | NM_001204143, XM_011526006, ENST00000587605 | 2470 | 6020 | 9570 | None |
| Genewiz | TFORF2381 | MBD1 | NM_001204139, NM_015846, XM_005258271, | 2471 | 6021 | 9571 | None |
| | | | XM_017025760, ENST00000382948, ENST00000591416, | | | | |
| | | | ENST00000269468 | | | | |
| Genewiz | TFORF2382 | MBD1 | NM_015845, ENST00000269471, ENST00000588937 | 2472 | 6022 | 9572 | None |
| Genewiz | TFORF2383 | MBD1 | NM_001204141, ENST00000585672 | 2473 | 6023 | 9573 | None |
| Genewiz | TFORF2384 | MBD3 | NM_001281454, ENST00000156825 | 2474 | 6024 | 9574 | None |
| Genewiz | TFORF2385 | MBD3 | NM_001281453, ENST00000434436 | 2475 | 6025 | 9575 | None |
| Genewiz | TFORF2386 | MBD2 | NM_015832, ENST00000583046 | 2476 | 6026 | 9576 | None |
| Genewiz | TFORF2387 | MBD2 | NM_003927, ENST00000256429 | 2477 | 6027 | 9577 | None |
| Genewiz | TFORF2388 | ZNF462 | NM_021224, XM_006717216, ENST00000277225 | 2478 | 6028 | 9578 | None |
| Genewiz | TFORF2389 | ZNF391 | NM_001322288, XM_011514569, XM_006715086, | 2479 | 6029 | 9579 | None |
| | | | NM_001322293, NM_001076781, NM_001322289, | | | | |
| | | | XM_005249082, ENST00000244576 | | | | |
| Genewiz | TFORF2390 | ZNF460 | XM_005258422, ENST00000537645 | 2480 | 6030 | 9580 | None |
| Genewiz | TFORF2391 | ZNF461 | NM_001297623, ENST00000360357 | 2481 | 6031 | 9581 | None |
| Genewiz | TFORF2392 | ZNF461 | NM_153257, ENST00000588268 | 2482 | 6032 | 9582 | None |
| Genewiz | TFORF2393 | ZNF394 | XM_017012711, ENST00000426306 | 2483 | 6033 | 9583 | None |
| Genewiz | TFORF2394 | ZNF396 | NM_001322291, ENST00000586687 | 2484 | 6034 | 9584 | None |
| Genewiz | TFORF2395 | ZNF396 | NM_001322290, NM_001322286, XM_006722432, | 2485 | 6035 | 9585 | None |
| | | | XM_017025688, XM_017025687, ENST00000589332 | | | | |
| Genewiz | TFORF2396 | ZNF396 | NM_145756, ENST00000306346 | 2486 | 6036 | 9586 | None |
| Genewiz | TFORF2397 | ZNF397 | XM_017026042, XM_011526231, NM_001135178, | 2487 | 6037 | 9587 | None |
| | | | ENST00000330501 | | | | |
| Genewiz | TFORF2398 | ZFPM2 | NM_012082, ENST00000407775 | 2488 | 6038 | 9588 | None |
| Genewiz | TFORF2399 | ZFPM1 | NM_153813, ENST00000319555 | 2489 | 6039 | 9589 | None |
| Genewiz | TFORF2400 | REXO1 | NM_020695, ENST00000170168 | 2490 | 6040 | 9590 | None |
| Genewiz | TFORF2401 | NFE2L3 | NM_004289, ENST00000056233 | 2491 | 6041 | 9591 | None |
| Genewiz | TFORF2402 | NFE2L2 | NM_001145413, ENST00000446151 | 2492 | 6042 | 9592 | None |
| Genewiz | TFORF2403 | NFE2L2 | NM_001145412, NM_001313901, NM_001313900, | 2493 | 6043 | 9593 | None |
| | | | ENST00000397063, ENST00000464747 | | | | |
| Genewiz | TFORF2404 | NFE2L1 | XM_005257413, XM_005257412, ENST00000585291, | 2494 | 6044 | 9594 | None |
| | | | ENST00000357480 | | | | |
| Genewiz | TFORF2405 | NFE2L1 | XM_017024691, XM_005257411, ENST00000361665 | 2495 | 6045 | 9595 | None |
| Genewiz | TFORF2406 | NFE2L1 | NM_003204, XM_005257410, ENST00000362042 | 2496 | 6046 | 9596 | None |
| Genewiz | TFORF2407 | ZNF264 | NM_003417, ENST00000263095, ENST00000536056 | 2497 | 6047 | 9597 | None |
| Genewiz | TFORF2408 | FOXF1 | NM_001451, ENST00000262426 | 2498 | 6048 | 9598 | None |
| Genewiz | TFORF2409 | FOXF2 | NM_001452, ENST00000259806 | 2499 | 6049 | 9599 | None |
| Genewiz | TFORF2410 | ZNF705G | XM_017012941, NM_001164457, XM_017012942, | 2500 | 6050 | 9600 | None |
| | | | ENST00000400156 | | | | |
| Genewiz | TFORF2411 | KLF3 | NM_016531, ENST00000261438 | 2501 | 6051 | 9601 | None |
| Genewiz | TFORF2412 | ZNF705D | NM_001039615, XM_011543832, ENST00000400085, | 2502 | 6052 | 9602 | None |
| | | | ENST00000400078 | | | | |
| Genewiz | TFORF2413 | ZNF268 | NM_001165887, ENST00000592241 | 2503 | 6053 | 9603 | None |
| Genewiz | TFORF2414 | ZNF268 | NM_152943, ENST00000541009 | 2504 | 6054 | 9604 | None |
| Genewiz | TFORF2415 | ZNF268 | NM_001165884, ENST00000536899 | 2505 | 6055 | 9605 | None |
| Genewiz | TFORF2416 | ZNF268 | NM_003415, NM_001165881, ENST00000536435, | 2506 | 6056 | 9606 | None |
| | | | ENST00000228289 | | | | |
| Genewiz | TFORF2417 | ZNF268 | NM_001165885, ENST00000541211 | 2507 | 6057 | 9607 | None |
| Genewiz | TFORF2418 | ZNF268 | NM_001165883, ENST00000539248 | 2508 | 6058 | 9608 | None |
| Genewiz | TFORF2419 | ZNF268 | NM_001165886, ENST00000542711 | 2509 | 6059 | 9609 | None |
| Genewiz | TFORF2420 | ZNF705B | NM_001193630, ENST00000400120 | 2510 | 6060 | 9610 | None |
| Genewiz | TFORF2421 | RAX | NM_013435, ENST00000334889 | 2511 | 6061 | 9611 | None |
| Genewiz | TFORF2422 | RBPJL | NM_001281449, ENST00000372743 | 2512 | 6062 | 9612 | None |
| Genewiz | TFORF2423 | RBPJL | NM_001281448, ENST00000372741 | 2513 | 6063 | 9613 | None |
| Genewiz | TFORF2424 | RBPJL | NM_014276, ENST00000343694 | 2514 | 6064 | 9614 | None |
| Genewiz | TFORF2425 | ZNF646 | XM_011545990, XM_005255711, XM_005255710, | 2515 | 6065 | 9615 | None |
| | | | NM_014699, ENST00000300850 | | | | |
| Genewiz | TFORF2426 | ZNF841 | XM_017026656, XM_017026657, NM_001136499, | 2516 | 6066 | 9616 | None |
| | | | ENST00000389534, ENST00000594295 | | | | |
| Genewiz | TFORF2427 | ZNF841 | NM_001321349, ENST00000426391 | 2517 | 6067 | 9617 | None |
| Genewiz | TFORF2428 | ARID1B | XM_005267069, ENST00000636930 | 2518 | 6068 | 9618 | None |
| Genewiz | TFORF2429 | ARID1B | NM_017519, ENST00000350026 | 2519 | 6069 | 9619 | None |
| Genewiz | TFORF2430 | ARID1B | NM_020732, ENST00000346085 | 2520 | 6070 | 9620 | None |
| Genewiz | TFORF2431 | ARID1B | XM_017011109, ENST00000637904 | 2521 | 6071 | 9621 | None |
| Genewiz | TFORF2432 | ARID1A | NM_006015, ENST00000324856 | 2522 | 6072 | 9622 | None |
| Genewiz | TFORF2433 | ARID1A | NM_139135, ENST00000457599 | 2523 | 6073 | 9623 | None |
| Genewiz | TFORF2434 | ZNF280D | NM_001288589, NM_001002844, ENST00000558320 | 2524 | 6074 | 9624 | None |
| Genewiz | TFORF2435 | ZNF280D | NM_001002843, ENST00000559237 | 2525 | 6075 | 9625 | None |
| Genewiz | TFORF2436 | ZNF280D | XM_005254483, ENST00000559000 | 2526 | 6076 | 9626 | None |
| Genewiz | TFORF2437 | ZNF280D | NM_017661, NM_001288588, XM_017022344, | 2527 | 6077 | 9627 | None |
| | | | XM_017022345, XM_011521702, ENST00000267807 | | | | |
| Genewiz | TFORF2438 | ZNF280B | NM_080764, XM_011529893, XM_011529895, | 2528 | 6078 | 9628 | None |
| | | | XM_011529896, XM_011529897, ENST00000626650, | | | | |
| | | | ENST00000619852, ENST00000613655 | | | | |
| Genewiz | TFORF2439 | YEATS4 | NM_001300950, ENST00000548020 | 2529 | 6079 | 9629 | None |
| Genewiz | TFORF2440 | FUS | NM_001170634, ENST00000380244 | 2530 | 6080 | 9630 | None |
| Genewiz | TFORF2441 | FUS | NM_004960, ENST00000254108 | 2531 | 6081 | 9631 | None |
| Genewiz | TFORF2442 | ABL1 | NM_005157, ENST00000318560 | 2532 | 6082 | 9632 | None |
| Genewiz | TFORF2443 | ABL1 | NM_007313, ENST00000372348 | 2533 | 6083 | 9633 | None |
| Genewiz | TFORF2444 | SMARCE1 | NM_003079, ENST00000348513 | 2534 | 6084 | 9634 | None |
| Genewiz | TFORF2445 | ZIK1 | NM_001010879, ENST00000597850 | 2535 | 6085 | 9635 | None |
| Genewiz | TFORF2446 | ZIK1 | NM_001321146, XM_011526766, ENST00000599456 | 2536 | 6086 | 9636 | None |
| Genewiz | TFORF2447 | ZIK1 | NM_001321145, ENST00000536878 | 2537 | 6087 | 9637 | None |
| Genewiz | TFORF2448 | GBX2 | NM_001301687, ENST00000551105 | 2538 | 6088 | 9638 | None |
| Genewiz | TFORF2449 | GBX1 | NM_001098834, ENST00000297537 | 2539 | 6089 | 9639 | None |
| Genewiz | TFORF2450 | MLLT10 | NM_001324296, NM_001195628, NM_001195630, | 2540 | 6090 | 9640 | None |
| | | | ENST00000377100 | | | | |
| Genewiz | TFORF2451 | MLLT10 | NM_004641, ENST00000377072 | 2541 | 6091 | 9641 | None |
| Genewiz | TFORF2452 | MLLT10 | NM_001195626, ENST00000631589, ENST00000307729, | 2542 | 6092 | 9642 | None |
| | | | ENST00000377059 | | | | |
| Genewiz | TFORF2453 | ZNF845 | NM_138374, NM_001321523, NM_001321524, | 2543 | 6093 | 9643 | None |
| | | | NM_001321522, ENST00000458035, ENST00000595091 | | | | |
| Genewiz | TFORF2454 | IRF3 | NM_001197125, NM_001197126, ENST00000377135, | 2544 | 6094 | 9644 | None |
| | | | ENST00000593922, ENST00000599144, ENST00000598808 | | | | |
| Genewiz | TFORF2455 | IRF3 | NM_001197127, NM_001197128, ENST00000596765, | 2545 | 6095 | 9645 | None |
| | | | ENST00000600022 | | | | |
| Genewiz | TFORF2456 | IRF3 | NM_001197124, ENST00000599223 | 2546 | 6096 | 9646 | None |
| Genewiz | TFORF2457 | IRF3 | NM_001571, XM_017026767, XM_017026766, | 2547 | 6097 | 9647 | None |
| | | | ENST00000309877, ENST00000377139, ENST00000597198 | | | | |
| Genewiz | TFORF2458 | IRF3 | NM_001197122, XM_006723198, XM_006723197, | 2548 | 6098 | 9648 | None |
| | | | ENST00000601291 | | | | |
| Genewiz | TFORF2459 | IRF1 | NM_002198, ENST00000245414, ENST00000405885 | 2549 | 6099 | 9649 | None |
| Genewiz | TFORF2460 | IRF7 | NM_004029, ENST00000348655 | 2550 | 6100 | 9650 | None |
| Genewiz | TFORF2461 | IRF7 | NM_004031, XM_005252906, ENST00000397566, | 2551 | 6101 | 9651 | None |
| | | | ENST00000330243 | | | | |
| Genewiz | TFORF2462 | IRF7 | NM_001572, ENST00000397574 | 2552 | 6102 | 9652 | None |
| Genewiz | TFORF2463 | IRF7 | XM_005252909, ENST00000397570 | 2553 | 6103 | 9653 | None |
| Genewiz | TFORF2464 | IRF6 | NM_001206696, ENST00000542854 | 2554 | 6104 | 9654 | None |
| Genewiz | TFORF2465 | IRF6 | NM_006147, ENST00000367021 | 2555 | 6105 | 9655 | None |
| Genewiz | TFORF2466 | IRF5 | NM_001242452, ENST00000477535 | 2556 | 6106 | 9656 | None |
| Genewiz | TFORF2467 | IRF5 | XM_011516160, NM_001098629, XM_006715974, | 2557 | 6107 | 9657 | None |
| | | | XM_011516158, XM_011516159, XM_005250317, | | | | |
| | | | ENST00000489702, ENST00000357234 | | | | |
| Genewiz | TFORF2468 | LZTR1 | NM_006767, ENST00000215739 | 2558 | 6108 | 9658 | None |
| Genewiz | TFORF2469 | IRF8 | XM_017023199, ENST00000562492 | 2559 | 6109 | 9659 | None |
| Genewiz | TFORF2470 | PDX1 | NM_000209, ENST00000381033 | 2560 | 6110 | 9660 | None |
| Genewiz | TFORF2471 | HDAC5 | NM_005474, XM_005256906, ENST00000586802 | 2561 | 6111 | 9661 | None |
| Genewiz | TFORF2472 | HDAC5 | NM_001015053, ENST00000225983 | 2562 | 6112 | 9662 | None |
| Genewiz | TFORF2473 | HDAC4 | NM_006037, ENST00000345617 | 2563 | 6113 | 9663 | None |
| Genewiz | TFORF2474 | ONECUT3 | NM_001080488, ENST00000382349 | 2564 | 6114 | 9664 | None |
| Genewiz | TFORF2475 | ZFHX3 | NM_001164766, ENST00000397992 | 2565 | 6115 | 9665 | None |
| Genewiz | TFORF2476 | ZFHX2 | NM_033400, XM_011537247, XM_011537246, | 2566 | 6116 | 9666 | None |
| | | | XM_017021714, XM_011537245, ENST00000419474 | | | | |
| Genewiz | TFORF2477 | OXSR1 | NM_005109, ENST00000311806 | 2567 | 6117 | 9667 | None |
| Genewiz | TFORF2478 | MESP1 | NM_018670, ENST00000300057 | 2568 | 6118 | 9668 | None |
| Genewiz | TFORF2479 | MESP2 | NM_001039958, ENST00000341735 | 2569 | 6119 | 9669 | None |
| Genewiz | TFORF2480 | MXD4 | XM_017007656, ENST00000510822 | 2570 | 6120 | 9670 | None |
| Genewiz | TFORF2481 | MXD4 | NM_006454, ENST00000337190 | 2571 | 6121 | 9671 | None |
| Genewiz | TFORF2482 | MXD3 | NM_001142935, ENST00000427908 | 2572 | 6122 | 9672 | None |
| Genewiz | TFORF2483 | CBX2 | NM_005189, ENST00000310942 | 2573 | 6123 | 9673 | None |
| Genewiz | TFORF2484 | CBX2 | NM_032647, ENST00000269399 | 2574 | 6124 | 9674 | None |
| Genewiz | TFORF2485 | MXD1 | NM_001202514, ENST00000540449 | 2575 | 6125 | 9675 | None |
| Genewiz | TFORF2486 | ZBTB11 | NM_014415, ENST00000312938 | 2576 | 6126 | 9676 | None |
| Genewiz | TFORF2487 | ZBTB10 | NM_001277145, ENST00000379091 | 2577 | 6127 | 9677 | None |
| Genewiz | TFORF2488 | ZBTB10 | NM_001105539, ENST00000430430, ENST00000455036 | 2578 | 6128 | 9678 | None |
| Genewiz | TFORF2489 | ZBTB10 | NM_023929, ENST00000426744 | 2579 | 6129 | 9679 | None |
| Genewiz | TFORF2490 | ZBTB17 | NM_003443, ENST00000375743 | 2580 | 6130 | 9680 | None |
| Genewiz | TFORF2491 | ZBTB17 | NM_001242884, XM_011542088, ENST00000537142 | 2581 | 6131 | 9681 | None |
| Genewiz | TFORF2492 | ZBTB17 | NM_001287603, ENST00000375733 | 2582 | 6132 | 9682 | None |
| Genewiz | TFORF2493 | ZBTB16 | NM_006006, XM_017018258, XM_017018257, | 2583 | 6133 | 9683 | None |
| | | | NM_001018011, XM_017018259, ENST00000335953, | | | | |
| | | | ENST00000392996 | | | | |
| Genewiz | TFORF2494 | ZBTB18 | NM_001278196, XM_017000060, XM_005273006, | 2584 | 6134 | 9684 | None |
| | | | NM_006352, ENST00000622512 | | | | |
| Genewiz | TFORF2495 | ZBTB18 | NM_205768, ENST00000358704 | 2585 | 6135 | 9685 | None |
| Genewiz | TFORF2496 | ASCL3 | NM_020646, ENST00000531618 | 2586 | 6136 | 9686 | None |
| Genewiz | TFORF2497 | ASCL1 | NM_004316, ENST00000266744 | 2587 | 6137 | 9687 | None |
| Genewiz | TFORF2498 | ASCL4 | NM_203436, ENST00000342331 | 2588 | 6138 | 9688 | None |
| Genewiz | TFORF2499 | ASCL5 | NM_001270601, ENST00000458416, ENST00000449188 | 2589 | 6139 | 9689 | None |
| Genewiz | TFORF2500 | PML | NM_033249, ENST00000564428 | 2590 | 6140 | 9690 | None |
| Genewiz | TFORF2501 | PML | NM_033238, ENST00000268058 | 2591 | 6141 | 9691 | None |
| Genewiz | TFORF2502 | PML | NM_033244, ENST00000569965, ENST00000436891 | 2592 | 6142 | 9692 | None |
| Genewiz | TFORF2503 | PML | NM_033240, ENST00000435786 | 2593 | 6143 | 9693 | None |
| Genewiz | TFORF2504 | PML | NM_033250, ENST00000354026 | 2594 | 6144 | 9694 | None |
| Genewiz | TFORF2505 | PML | NM_033246, ENST00000567543, ENST00000359928 | 2595 | 6145 | 9695 | None |
| Genewiz | TFORF2506 | PML | NM_002675, ENST00000395135 | 2596 | 6146 | 9696 | None |
| Genewiz | TFORF2507 | PML | NM_033239, ENST00000268059 | 2597 | 6147 | 9697 | None |
| Genewiz | TFORF2508 | PML | NM_033247, ENST00000395132 | 2598 | 6148 | 9698 | None |
| Genewiz | TFORF2509 | EP300 | NM_001429, ENST00000263253 | 2599 | 6149 | 9699 | None |
| Genewiz | TFORF2510 | NAT10 | NM_001144030, ENST00000531159 | 2600 | 6150 | 9700 | None |
| Genewiz | TFORF2511 | PDCD2 | NM_001199461, ENST00000614056 | 2601 | 6151 | 9701 | None |
| Genewiz | TFORF2512 | PDCD2 | NM_001199463, ENST00000443345 | 2602 | 6152 | 9702 | None |
| Genewiz | TFORF2513 | PDCD2 | NM_001199464, ENST00000537445 | 2603 | 6153 | 9703 | None |
| Genewiz | TFORF2514 | PDCD2 | NM_002598, ENST00000541970 | 2604 | 6154 | 9704 | None |
| Genewiz | TFORF2515 | PDCD2 | NM_001199462, ENST00000392090 | 2605 | 6155 | 9705 | None |
| Genewiz | TFORF2516 | PDCD2 | NM_144781, ENST00000453163 | 2606 | 6156 | 9706 | None |
| Genewiz | TFORF2517 | PDCD2 | XM_017010926, ENST00000542896 | 2607 | 6157 | 9707 | None |
| Genewiz | TFORF2518 | ZFP37 | NM_003408, ENST00000374227 | 2608 | 6158 | 9708 | None |
| Genewiz | TFORF2519 | ZFP37 | NM_001282518, ENST00000555206 | 2609 | 6159 | 9709 | None |
| Genewiz | TFORF2520 | ZFP37 | NM_001282515, ENST00000553380 | 2610 | 6160 | 9710 | None |
| Genewiz | TFORF2521 | AATF | NM_012138, ENST00000619387 | 2611 | 6161 | 9711 | None |
| Genewiz | TFORF2522 | ZNF853 | NM_017560, ENST00000457543 | 2612 | 6162 | 9712 | None |
| Genewiz | TFORF2523 | NRF1 | NM_005011, NM_001040110, ENST00000393232, | 2613 | 6163 | 9713 | None |
| | | | ENST00000223190, ENST00000393230 | | | | |
| Genewiz | TFORF2524 | ERCC8 | NM_000082, ENST00000265038 | 2614 | 6164 | 9714 | None |
| Genewiz | TFORF2525 | ERCC2 | NM_001130867, ENST00000485403 | 2615 | 6165 | 9715 | None |
| Genewiz | TFORF2526 | ERCC2 | NM_000400, ENST00000391945 | 2616 | 6166 | 9716 | None |
| Genewiz | TFORF2527 | ERCC3 | NM_000122, ENST00000285398 | 2617 | 6167 | 9717 | None |
| Genewiz | TFORF2528 | ERCC6 | NM_000124, ENST00000355832 | 2618 | 6168 | 9718 | None |
| Genewiz | TFORF2529 | ERCC6 | NM_001277058, NM_001277059, ENST00000447839, | 2619 | 6169 | 9719 | None |
| | | | ENST00000515869 | | | | |
| Genewiz | TFORF2530 | SOX8 | NM_014587, ENST00000293894 | 2620 | 6170 | 9720 | None |
| Genewiz | TFORF2531 | SOX9 | NM_000346, ENST00000245479 | 2621 | 6171 | 9721 | None |
| Genewiz | TFORF2532 | SOX3 | NM_005634, ENST00000370536 | 2622 | 6172 | 9722 | None |
| Genewiz | TFORF2533 | SOX1 | NM_005986, ENST00000330949 | 2623 | 6173 | 9723 | None |
| Genewiz | TFORF2534 | SOX6 | NM_001145811, ENST00000528252 | 2624 | 6174 | 9724 | None |
| Genewiz | TFORF2535 | SOX6 | NM_017508, ENST00000527619 | 2625 | 6175 | 9725 | None |
| Genewiz | TFORF2536 | SOX6 | NM_033326, ENST00000316399, ENST00000396356 | 2626 | 6176 | 9726 | None |
| Genewiz | TFORF2537 | SOX7 | NM_031439, ENST00000304501 | 2627 | 6177 | 9727 | None |
| Genewiz | TFORF2538 | SOX4 | NM_003107, ENST00000244745 | 2628 | 6178 | 9728 | None |
| Genewiz | TFORF2539 | SOX5 | NM_178010, ENST00000396007 | 2629 | 6179 | 9729 | None |
| Genewiz | TFORF2540 | SOX5 | NM_001261415, ENST00000545921 | 2630 | 6180 | 9730 | None |
| Genewiz | TFORF2541 | SOX5 | NM_006940, ENST00000451604 | 2631 | 6181 | 9731 | None |
| Genewiz | TFORF2542 | SOX5 | XM_011520831, ENST00000537393 | 2632 | 6182 | 9732 | None |
| Genewiz | TFORF2543 | SOX5 | XM_017019896, NM_152989, ENST00000546136 | 2633 | 6183 | 9733 | None |
| Genewiz | TFORF2544 | ZNF721 | NM_133474, ENST00000511833 | 2634 | 6184 | 9734 | None |
| Genewiz | TFORF2545 | CEBPB | NM_005194, ENST00000303004 | 2635 | 6185 | 9735 | None |
| Genewiz | TFORF2546 | CEBPA | NM_004364, ENST00000498907 | 2636 | 6186 | 9736 | None |
| Genewiz | TFORF2547 | CEBPD | NM_005195, ENST00000408965 | 2637 | 6187 | 9737 | None |
| Genewiz | TFORF2548 | ZNF729 | NM_001242680, ENST00000601693 | 2638 | 6188 | 9738 | None |
| Genewiz | TFORF2549 | SKI | NM_003036, ENST00000378536 | 2639 | 6189 | 9739 | None |
| Genewiz | TFORF2550 | BID | NM_197966, ENST00000317361 | 2640 | 6190 | 9740 | None |
| Genewiz | TFORF2551 | BID | NM_001244572, NM_001244569, NM_197967, | 2641 | 6191 | 9741 | None |
| | | | NM_001244570, ENST00000615414, ENST00000399767, | | | | |
| | | | ENST00000614949, ENST00000399765, ENST00000611040 | | | | |
| Genewiz | TFORF2552 | BID | NM_001196, NM_001244567, ENST00000622694, | 2642 | 6192 | 9742 | None |
| | | | ENST00000399774, ENST00000551952 | | | | |
| Genewiz | TFORF2553 | AR | NM_001011645, ENST00000396043 | 2643 | 6193 | 9743 | None |
| Genewiz | TFORF2554 | AR | NM_000044, ENST00000374690 | 2644 | 6194 | 9744 | None |
| Genewiz | TFORF2555 | SUZ12 | NM_001321207, ENST00000580398 | 2645 | 6195 | 9745 | None |
| Genewiz | TFORF2556 | ADNP2 | NM_014913, XM_005266656, ENST00000262198 | 2646 | 6196 | 9746 | None |
| Genewiz | TFORF2557 | ZNF69 | NM_021915, ENST00000340180 | 2647 | 6197 | 9747 | None |
| Genewiz | TFORF2558 | TLX1 | NM_005521, ENST00000370196 | 2648 | 6198 | 9748 | None |
| Genewiz | TFORF2559 | TLX1 | NM_001195517, ENST00000467928 | 2649 | 6199 | 9749 | None |
| Genewiz | TFORF2560 | ZNF658 | NM_033160, NM_001317916, XM_005272515, | 2650 | 6200 | 9750 | None |
| | | | XM_017014614, XM_011545679, ENST00000621410, | | | | |
| | | | ENST00000612867 | | | | |
| Genewiz | TFORF2561 | ZNF655 | NM_001085366, NM_001009958, ENST00000357864, | 2651 | 6201 | 9751 | None |
| | | | ENST00000440391 | | | | |
| Genewiz | TFORF2562 | ZNF655 | NM_138494, XM_017012607, XM_017012606, | 2652 | 6202 | 9752 | None |
| | | | NM_001009960, ENST00000252713, ENST00000394163 | | | | |
| Genewiz | TFORF2563 | ZNF655 | XM_017012613, ENST00000626122, ENST00000454654, | 2653 | 6203 | 9753 | None |
| | | | ENST00000425063 | | | | |
| Genewiz | TFORF2564 | ZNF655 | NM_024061, NM_001085367, ENST00000320583 | 2654 | 6204 | 9754 | None |
| Genewiz | TFORF2565 | ZNF655 | XM_017012603, NM_001083956, XM_017012604, | 2655 | 6205 | 9755 | None |
| | | | NM_001085368, ENST00000493277, ENST00000424881 | | | | |
| Genewiz | TFORF2566 | ZNF654 | XM_017006790, ENST00000636215 | 2656 | 6206 | 9756 | None |
| Genewiz | TFORF2567 | ZNF654 | NM_018293, ENST00000309495 | 2657 | 6207 | 9757 | None |
| Genewiz | TFORF2568 | TGIF1 | NM_170695, ENST00000330513 | 2658 | 6208 | 9758 | None |
| Genewiz | TFORF2569 | TGIF1 | NM_174886, NM_001278686, XM_017025959, | 2659 | 6209 | 9759 | None |
| | | | NM_173209, XM_011525735, NM_173210, | | | | |
| | | | NM_173211, ENST00000401449, ENST00000548489, | | | | |
| | | | ENST00000405385, ENST00000551541, ENST00000345133, | | | | |
| | | | ENST0400167, ENST00000472042 | | | | |
| Genewiz | TFORF2570 | TGIF1 | NM_173207, ENST00000618001 | 2660 | 6210 | 9760 | None |
| Genewiz | TFORF2571 | ZNF652 | NM_001145365, NM_014897, ENST00000362063, | 2661 | 6211 | 9761 | None |
| | | | ENST00000430262 | | | | |
| Genewiz | TFORF2572 | ZNF652 | XM_005257166, ENST00000508237 | 2662 | 6212 | 9762 | None |
| Genewiz | TFORF2573 | HSF2 | NM_004506, ENST00000368455 | 2663 | 6213 | 9763 | None |
| Genewiz | TFORF2574 | HSF2 | NM_001135564, ENST00000452194 | 2664 | 6214 | 9764 | None |
| Genewiz | TFORF2575 | HSF5 | NM_001080439, ENST00000323777 | 2665 | 6215 | 9765 | None |
| Genewiz | TFORF2576 | HSF4 | NM_001040667, ENST00000521374 | 2666 | 6216 | 9766 | None |
| Genewiz | TFORF2577 | HSF4 | NM_001538, ENST00000584272 | 2667 | 6217 | 9767 | None |
| Genewiz | TFORF2578 | MEIS3 | NM_020160, ENST00000561293, ENST00000559524 | 2668 | 6218 | 9768 | None |
| Genewiz | TFORF2579 | MEIS3 | XM_017027011, ENST00000561096 | 2669 | 6219 | 9769 | None |
| Genewiz | TFORF2580 | MEIS3 | NM_001009813, ENST00000441740 | 2670 | 6220 | 9770 | None |
| Genewiz | TFORF2581 | MEIS3 | NM_001301059, ENST00000558555 | 2671 | 6221 | 9771 | None |
| Genewiz | TFORF2582 | NR1D1 | NM_021724, ENST00000246672 | 2672 | 6222 | 9772 | None |
| Genewiz | TFORF2583 | MIXL1 | NM_001282402, ENST00000542034 | 2673 | 6223 | 9773 | None |
| Genewiz | TFORF2584 | MIXL1 | NM_031944, ENST00000366810 | 2674 | 6224 | 9774 | None |
| Genewiz | TFORF2585 | CERS6 | NM_203463, ENST00000305747 | 2675 | 6225 | 9775 | None |
| Genewiz | TFORF2586 | CERS4 | XM_011528290, XM_011528293, XM_017027304, | 2676 | 6226 | 9776 | None |
| | | | XM_011528292, XM_{——}017027303, XM_011528294, | | | | |
| | | | NM_024552, XM_017027305, XM_011528295, | | | | |
| | | | XM_011528291, ENST00000251363, ENST00000559450 | | | | |
| Genewiz | TFORF2587 | CERS5 | NM_147190, ENST00000317551 | 2677 | 6227 | 9777 | None |
| Genewiz | TFORF2588 | CERS5 | NM_001281731, ENST00000422340 | 2678 | 6228 | 9778 | None |
| Genewiz | TFORF2589 | ZNF354A | NM_005649, XM_017009791, ENST00000335815 | 2679 | 6229 | 9779 | None |
| Genewiz | TFORF2590 | CERS3 | NM_001290342, NM_001290343, NM_178842, | 2680 | 6230 | 9780 | None |
| | | | XM_017022003, XM_017022004, ENST00000284382, | | | | |
| | | | ENST00000538112, ENST00000394113 | | | | |
| Genewiz | TFORF2591 | ZNF354C | NM_014594, XM_017009409, ENST00000315475 | 2681 | 6231 | 9781 | None |
| Genewiz | TFORF2592 | ZNF354B | NM_058230, ENST00000322434 | 2682 | 6232 | 9782 | None |
| Genewiz | TFORF2593 | BHLHE40 | NM_003670, ENST00000256495 | 2683 | 6233 | 9783 | None |
| Genewiz | TFORF2594 | BHLHE41 | NM_030762, ENST00000242728 | 2684 | 6234 | 9784 | None |
| Genewiz | TFORF2595 | RORC | NM_001001523, ENST00000356728 | 2685 | 6235 | 9785 | None |
| Genewiz | TFORF2596 | RORB | NM_006914, ENST00000376896 | 2686 | 6236 | 9786 | None |
| Genewiz | TFORF2597 | RORA | NM_134260, ENST00000261523 | 2687 | 6237 | 9787 | None |
| Genewiz | TFORF2598 | RORA | NM_134262, ENST00000449337 | 2688 | 6238 | 9788 | None |
| Genewiz | TFORF2599 | RORA | NM_002943, ENST00000309157 | 2689 | 6239 | 9789 | None |
| Genewiz | TFORF2600 | POU6F2 | NM_001166018, ENST00000518318 | 2690 | 6240 | 9790 | None |
| Genewiz | TFORF2601 | POU6F2 | NM_007252, ENST00000403058 | 2691 | 6241 | 9791 | None |
| Genewiz | TFORF2602 | POU6F1 | XM_017019514, XM_017019515, ENST00000333640 | 2692 | 6242 | 9792 | None |
| Genewiz | TFORF2603 | ZNF471 | NM_020813, XM_011527148, ENST00000308031 | 2693 | 6243 | 9793 | None |
| Genewiz | TFORF2604 | ZNF470 | NM_001001668, ENST00000330619, ENST00000391709 | 2694 | 6244 | 9794 | None |
| Genewiz | TFORF2605 | MYRF | NM_001127392, ENST00000278836 | 2695 | 6245 | 9795 | None |
| Genewiz | TFORF2606 | MYRF | NM_013279, ENST00000265460 | 2696 | 6246 | 9796 | None |
| Genewiz | TFORF2607 | DMTF1 | NM_001142326, ENST00000432937 | 2697 | 6247 | 9797 | None |
| Genewiz | TFORF2608 | DMTF1 | NM_001142327, XM_011516737, NM_021145, | 2698 | 6248 | 9798 | None |
| | | | XM_011516735, XM_017012865, ENST00000331242, | | | | |
| | | | ENST00000394703 | | | | |
| Genewiz | TFORF2609 | FOXA2 | NM_153675, ENST00000377115 | 2699 | 6249 | 9799 | None |
| Genewiz | TFORF2610 | FOXA2 | NM_021784, ENST00000419308 | 2700 | 6250 | 9800 | None |
| Genewiz | TFORF2611 | ZNF277 | NM_021994, ENST00000361822 | 2701 | 6251 | 9801 | None |
| Genewiz | TFORF2612 | ZNF276 | NM_001113525, ENST00000443381 | 2702 | 6252 | 9802 | None |
| Genewiz | TFORF2613 | ZNF276 | NM_152287, ENST00000289816 | 2703 | 6253 | 9803 | None |
| Genewiz | TFORF2614 | ZNF275 | NM_001080485, ENST00000370251 | 2704 | 6254 | 9804 | None |
| Genewiz | TFORF2615 | ZNF274 | NM_133502, ENST00000617501, ENST00000610905 | 2705 | 6255 | 9805 | None |
| Genewiz | TFORF2616 | ZNF274 | NM_016324, XM_017026174, XM_011526327, | 2706 | 6256 | 9806 | None |
| | | | ENST00000424679 | | | | |
| Genewiz | TFORF2617 | ZNF274 | NM_001278734, ENST00000326804 | 2707 | 6257 | 9807 | None |
| Genewiz | TFORF2618 | ZNF274 | NM_016325, ENST00000345813 | 2708 | 6258 | 9808 | None |
| Genewiz | TFORF2619 | ZXDB | NM_007157, ENST00000374888 | 2709 | 6259 | 9809 | None |
| Genewiz | TFORF2620 | CRX | NM_000554, ENST00000221996, ENST00000539067 | 2710 | 6260 | 9810 | None |
| Genewiz | TFORF2621 | ZXDA | NM_007156, ENST00000358697 | 2711 | 6261 | 9811 | None |
| Genewiz | TFORF2622 | CRTC1 | NM_015321, ENST00000321949 | 2712 | 6262 | 9812 | None |
| Genewiz | TFORF2623 | CRTC1 | NM_001098482, ENST00000338797 | 2713 | 6263 | 9813 | None |
| Genewiz | TFORF2624 | CRTC3 | NM_001042574, ENST00000420329 | 2714 | 6264 | 9814 | None |
| Genewiz | TFORF2625 | CRTC3 | NM_022769, ENST00000268184 | 2715 | 6265 | 9815 | None |
| Genewiz | TFORF2626 | MAML1 | NM_014757, ENST00000292599 | 2716 | 6266 | 9816 | None |
| Genewiz | TFORF2627 | NONO | NM_001145410, ENST00000535149 | 2717 | 6267 | 9817 | None |
| Genewiz | TFORF2628 | NONO | NM_001145409, NM_007363, NM_001145408, | 2718 | 6268 | 9818 | None |
| | | | ENST00000276079, ENST00000373856, ENST00000373841 | | | | |
| Genewiz | TFORF2629 | INSM2 | NM_032594, ENST00000307169 | 2719 | 6269 | 9819 | None |
| Genewiz | TFORF2630 | ZNF583 | NM_001159860, XM_017026350, NM_152478, | 2720 | 6270 | 9820 | None |
| | | | NM_001159861, XM_011526517, ENST00000291598, | | | | |
| | | | ENST00000333201 | | | | |
| Genewiz | TFORF2631 | INSM1 | NM_002196, ENST00000310227 | 2721 | 6271 | 9821 | None |
| Genewiz | TFORF2632 | TFDP3 | NM_016521, ENST00000310125 | 2722 | 6272 | 9822 | None |
| Genewiz | TFORF2633 | TFDP2 | NM_001178141, ENST00000495310 | 2723 | 6273 | 9823 | None |
| Genewiz | TFORF2634 | TFDP2 | NM_001178142, ENST00000477292 | 2724 | 6274 | 9824 | None |
| Genewiz | TFORF2635 | TFDP2 | XM_017007099, XM_017007097, ENST00000479040 | 2725 | 6275 | 9825 | None |
| Genewiz | TFORF2636 | TFDP2 | NM_001178139, XM_017007091, ENST00000489671 | 2726 | 6276 | 9826 | None |
| Genewiz | TFORF2637 | TFDP2 | NM_001178140, ENST00000499676 | 2727 | 6277 | 9827 | None |
| Genewiz | TFORF2638 | TFDP1 | XM_005268327, NM_007111, ENST00000375370 | 2728 | 6278 | 9828 | None |
| Genewiz | TFORF2639 | CIC | XM_005258673, ENST00000160740 | 2729 | 6279 | 9829 | None |
| Genewiz | TFORF2640 | CIC | NM_015125, ENST00000575354 | 2730 | 6280 | 9830 | None |
| Genewiz | TFORF2641 | PAX3 | NM_181459, ENST00000392069 | 2731 | 6281 | 9831 | None |
| Genewiz | TFORF2642 | PAX3 | NM_181457, ENST00000350526 | 2732 | 6282 | 9832 | None |
| Genewiz | TFORF2643 | PAX3 | NM_181461, ENST00000344493 | 2733 | 6283 | 9833 | None |
| Genewiz | TFORF2644 | PAX3 | NM_013942, ENST00000258387 | 2734 | 6284 | 9834 | None |
| Genewiz | TFORF2645 | PAX3 | NM_001127366, ENST00000409551 | 2735 | 6285 | 9835 | None |
| Genewiz | TFORF2646 | PAX3 | NM_181458, ENST00000392070 | 2736 | 6286 | 9836 | None |
| Genewiz | TFORF2647 | PAX3 | NM_181460, ENST00000336840 | 2737 | 6287 | 9837 | None |
| Genewiz | TFORF2648 | PAX3 | NM_000438, ENST00000409828 | 2738 | 6288 | 9838 | None |
| Genewiz | TFORF2649 | ZNF586 | NM_017652, ENST00000396154 | 2739 | 6289 | 9839 | None |
| Genewiz | TFORF2650 | ZNF586 | NM_001204814, ENST00000391702 | 2740 | 6290 | 9840 | None |
| Genewiz | TFORF2651 | TERB1 | XM_011523008, XM_011523005, XM_011523009, | 2741 | 6291 | 9841 | None |
| | | | XM_011523006, XM_011523007, XM_011523004, | | | | |
| | | | NM_001136505, ENST00000558713, ENST00000433154 | | | | |
| Genewiz | TFORF2652 | ARNTL2 | NM_020183, ENST00000266503 | 2742 | 6292 | 9842 | None |
| Genewiz | TFORF2653 | ARNTL2 | NM_001248002, ENST00000311001 | 2743 | 6293 | 9843 | None |
| Genewiz | TFORF2654 | ARNTL2 | NM_001248005, ENST00000546179 | 2744 | 6294 | 9844 | None |
| Genewiz | TFORF2655 | STAT6 | NM_001178080, NM_001178081, ENST00000538913, | 2745 | 6295 | 9845 | None |
| | | | ENST00000537215 | | | | |
| Genewiz | TFORF2656 | STAT3 | XM_011525146, NM_213662, XM_017024972, | 2746 | 6296 | 9846 | None |
| | | | ENST00000585517 | | | | |
| Genewiz | TFORF2657 | STAT3 | NM_003150, XM_017024975, XM_005257616, | 2747 | 6297 | 9847 | None |
| | | | ENST00000404395 | | | | |
| Genewiz | TFORF2658 | STAT2 | NM_198332, ENST00000557235 | 2748 | 6298 | 9848 | None |
| Genewiz | TFORF2659 | STAT2 | NM_005419, ENST00000314128 | 2749 | 6299 | 9849 | None |
| Genewiz | TFORF2660 | STAT1 | NM_007315, XM_006712718, ENST00000361099, | 2750 | 6300 | 9850 | None |
| | | | ENST00000409465 | | | | |
| Genewiz | TFORF2661 | STOX1 | NM_152709, NM_001130161, ENST00000298596, | 2751 | 6301 | 9851 | None |
| | | | ENST00000399169 | | | | |
| Genewiz | TFORF2662 | STOX1 | NM_001130159, ENST00000399165 | 2752 | 6302 | 9852 | None |
| Genewiz | TFORF2663 | STOX1 | NM_001130160, ENST00000399162 | 2753 | 6303 | 9853 | None |
| Genewiz | TFORF2664 | ZBED1 | NM_001171135, NM_001171136, NM_004729, | 2754 | 6304 | 9854 | None |
| | | | NM_001171135, NM_001171136, NM_004729, | | | | |
| | | | ENST00000381222, ENST00000381223, ENST00000381218, | | | | |
| | | | ENST00000381222, ENST00000381223, ENST00000381218 | | | | |
| Genewiz | TFORF2665 | ZBED2 | NM_024508, ENST00000317012 | 2755 | 6305 | 9855 | None |
| Genewiz | TFORF2666 | ZBED3 | NM_032367, ENST00000255198 | 2756 | 6306 | 9856 | None |
| Genewiz | TFORF2667 | ZBED4 | NM_014838, ENST00000216268 | 2757 | 6307 | 9857 | None |
| Genewiz | TFORF2668 | ZBED6 | NM_001174108, ENST00000550078 | 2758 | 6308 | 9858 | None |
| Genewiz | TFORF2669 | BTAF1 | NM_003972, ENST00000265990 | 2759 | 6309 | 9859 | None |
| Genewiz | TFORF2670 | NEUROD2 | NM_006160, ENST00000302584 | 2760 | 6310 | 9860 | None |
| Genewiz | TFORF2671 | NEUROD4 | NM_021191, ENST00000242994 | 2761 | 6311 | 9861 | None |
| Genewiz | TFORF2672 | CHURC1 | NM_145165, ENST00000607599 | 2762 | 6312 | 9862 | None |
| Genewiz | TFORF2673 | CHURC1 | NM_001204063, ENST00000549115 | 2763 | 6313 | 9863 | None |
| Genewiz | TFORF2674 | CHURC1 | NM_001204064, ENST00000548752 | 2764 | 6314 | 9864 | None |
| Genewiz | TFORF2675 | CCDC169- | NM_001198910, ENST00000511166 | 2765 | 6315 | 9865 | None |
| | | SOHLH2 | | | | | |
| Genewiz | TFORF2676 | ZNF705A | NM_001004328, ENST00000610508, ENST00000359286 | 2766 | 6316 | 9866 | None |
| Genewiz | TFORF2677 | GABPA | NM_001197297, NM_002040, XM_011529520, | 2767 | 6317 | 9867 | None |
| | | | XM_011529521, XM_005260938, XM_017028313, | | | | |
| | | | ENST00000354828, ENST00000400075 | | | | |
| Genewiz | TFORF2678 | PEG3 | NM_001146185, ENST00000593695 | 2768 | 6318 | 9868 | None |
| Genewiz | TFORF2679 | PEG3 | NM_001146186, NM_006210, NM_001146184, | 2769 | 6319 | 9869 | None |
| | | | ENST00000326441 | | | | |
| Genewiz | TFORF2680 | PEG3 | NM_001146187, ENST00000598410 | 2770 | 6320 | 9870 | None |
| Genewiz | TFORF2681 | ZMYND11 | NM_001202466, ENST00000309776 | 2771 | 6321 | 9871 | None |
| Genewiz | TFORF2682 | ZMYND11 | NM_001202468, ENST00000558098 | 2772 | 6322 | 9872 | None |
| Genewiz | TFORF2683 | ZMYND11 | NM_001202465, ENST00000397959, ENST00000602682 | 2773 | 6323 | 9873 | None |
| Genewiz | TFORF2684 | ZMYND11 | NM_006624, XM_005252359, XM_017015588, | 2774 | 6324 | 9874 | None |
| | | | XM_017015589, XM_017015587, XM_017015590, | | | | |
| | | | ENST00000397962, ENST00000381591 | | | | |
| Genewiz | TFORF2685 | ZMYND11 | XM_017015591, ENST00000381584, ENST00000627286 | 2775 | 6325 | 9875 | None |
| Genewiz | TFORF2686 | ZMYND11 | NM_212479, ENST00000509513 | 2776 | 6326 | 9876 | None |
| Genewiz | TFORF2687 | ZMYND11 | XM_006717376, XM_005252362, XM_017015592, | 2777 | 6327 | 9877 | None |
| | | | XM_005252361, NM_001202464, XM_017015593, | | | | |
| | | | ENST00000381607 | | | | |
| Genewiz | TFORF2688 | TEAD3 | NM_003214, ENST00000338863, ENST00000639578 | 2778 | 6328 | 9878 | None |
| Genewiz | TFORF2689 | TEAD2 | NM_001256661, NM_001256660, XM_006723424, | 2779 | 6329 | 9879 | None |
| | | | ENST00000598810, ENST00000593945 | | | | |
| Genewiz | TFORF2690 | TEAD2 | NM_001256658, NM_001256659, XM_011527403, | 2780 | 6330 | 9880 | None |
| | | | ENST00000601519, ENST00000377214 | | | | |
| Genewiz | TFORF2691 | TEAD2 | NM_001256662, ENST00000539846 | 2781 | 6331 | 9881 | None |
| Genewiz | TFORF2692 | TEAD1 | NM_021961, ENST00000527636, ENST00000638666 | 2782 | 6332 | 9882 | None |
| Genewiz | TFORF2693 | TEAD4 | NM_201443, ENST00000397122 | 2783 | 6333 | 9883 | None |
| Genewiz | TFORF2694 | ELF5 | NM_001243081, ENST00000620316 | 2784 | 6334 | 9884 | None |
| Genewiz | TFORF2695 | ELF5 | NM_001243080, ENST00000429939 | 2785 | 6335 | 9885 | None |
| Genewiz | TFORF2696 | ELF5 | NM_198381, ENST00000312319 | 2786 | 6336 | 9886 | None |
| Genewiz | TFORF2697 | ZFP42 | XM_011531607, XM_011531604, NM_001304358, | 2787 | 6337 | 9887 | None |
| | | | NM_174900, XM_011531605, XM_011531606, | | | | |
| | | | ENST00000509524, ENST00000326866, ENST00000618147 | | | | |
| Genewiz | TFORF2698 | ACTL6A | NM_177989, NM_178042, ENST00000450518, | 2788 | 6338 | 9888 | None |
| | | | ENST00000392662 | | | | |
| Genewiz | TFORF2699 | KMT2B | NM_014727, ENST00000420124 | 2789 | 6339 | 9889 | None |
| Genewiz | TFORF2700 | ESRRG | NM_001438, ENST00000408911 | 2790 | 6340 | 9890 | None |
| Genewiz | TFORF2701 | ESRRG | NM_001243518, XM_011509269, XM_011509267, | 2791 | 6341 | 9891 | None |
| | | | XM_011509268, ENST00000366937 | | | | |
| Genewiz | TFORF2702 | ESRRG | NM_001243507, ENST00000463665 | 2792 | 6342 | 9892 | None |
| Genewiz | TFORF2703 | ESRRA | NM_004451, NM_001282450, ENST00000000442, | 2793 | 6343 | 9893 | None |
| | | | ENST00000405666 | | | | |
| Genewiz | TFORF2704 | ESRRA | NM_001282451, ENST00000406310 | 2794 | 6344 | 9894 | None |
| Genewiz | TFORF2705 | ESRRB | NM_004452, XM_017021086, ENST00000380887, | 2795 | 6345 | 9895 | None |
| | | | ENST00000509242 | | | | |
| Genewiz | TFORF2706 | TFCP2L1 | NM_014553, ENST00000263707 | 2796 | 6346 | 9896 | None |
| Genewiz | TFORF2707 | ZNF718 | XM_017007980, XM_017007979, NM_001289930, | 2797 | 6347 | 9897 | None |
| | | | NM_001289931, ENST00000609714 | | | | |
| Genewiz | TFORF2708 | ARX | NM_139058, ENST00000379044 | 2798 | 6348 | 9898 | None |
| Genewiz | TFORF2709 | ZNF716 | NM_001159279, ENST00000420713 | 2799 | 6349 | 9899 | None |
| Genewiz | TFORF2710 | DMRTA1 | NM_022160, ENST00000325870 | 2800 | 6350 | 9900 | None |
| Genewiz | TFORF2711 | ZNF710 | NM_198526, ENST00000268154 | 2801 | 6351 | 9901 | None |
| Genewiz | TFORF2712 | ZNF711 | XM_005262187, XM_005262186, XM_017029804, | 2802 | 6352 | 9902 | None |
| | | | XM_011531024, XM_017029805, XM_005262188, | | | | |
| | | | ENST00000360700 | | | | |
| Genewiz | TFORF2713 | ZNF711 | XM_017029808, XM_005262189, XM_017029807, | 2803 | 6353 | 9903 | None |
| | | | XM_011531026, NM_021998, XM_017029809, | | | | |
| | | | XM_017029806, ENST00000373165, ENST00000276123 | | | | |
| Genewiz | TFORF2714 | ZNF860 | NM_001137674, XM_017006299, ENST00000360311 | 2804 | 6354 | 9904 | None |
| Genewiz | TFORF2715 | ZNF713 | NM_182633, ENST00000429591 | 2805 | 6355 | 9905 | None |
| Genewiz | TFORF2716 | SLC2A4RG | NM_020062, ENST00000266077 | 2806 | 6356 | 9906 | None |
| Genewiz | TFORF2717 | TFCP2 | NM_001173453, ENST00000548115 | 2807 | 6357 | 9907 | None |
| Genewiz | TFORF2718 | LRPPRC | NM_133259, ENST00000260665 | 2808 | 6358 | 9908 | None |
| Genewiz | TFORF2719 | ZNF79 | NM_001286697, NM_001286696, NM_001322260, | 2809 | 6359 | 9909 | None |
| | | | XM_006717279, ENST00000543471, ENST00000612342 | | | | |
| Genewiz | TFORF2720 | ZNF79 | NM_007135, ENST00000342483 | 2810 | 6360 | 9910 | None |
| Genewiz | TFORF2721 | ZNF79 | NM_001286698, ENST00000617266 | 2811 | 6361 | 9911 | None |
| Genewiz | TFORF2722 | ZNF70 | NM_021916, ENST00000341976 | 2812 | 6362 | 9912 | None |
| Genewiz | TFORF2723 | ZNF76 | XM_017011256, NM_001292032, ENST00000339411 | 2813 | 6363 | 9913 | None |
| Genewiz | TFORF2724 | ZNF74 | NM_001256524, NM_003426, ENST00000400451, | 2814 | 6364 | 9914 | None |
| | | | ENST00000611540 | | | | |
| Genewiz | TFORF2725 | ZNF74 | NM_001256523, ENST00000403682 | 2815 | 6365 | 9915 | None |
| Genewiz | TFORF2726 | ZFP1 | NM_001318476, NM_001318475, ENST00000464850, | 2816 | 6366 | 9916 | None |
| | | | ENST00000567481 | | | | |
| Genewiz | TFORF2727 | ZFP1 | NM_001318472, NM_001318471, XM_017022986, | 2817 | 6367 | 9917 | None |
| | | | ENST00000332307 | | | | |
| Genewiz | TFORF2728 | ZFP1 | NM_153688, NM_001318469, XM_017022984, | 2818 | 6368 | 9918 | None |
| | | | XM_017022985, ENST00000570010, ENST00000393430 | | | | |
| Genewiz | TFORF2729 | ZNF668 | NM_001172669, ENST00000426488, ENST00000539836 | 2819 | 6369 | 9919 | None |
| Genewiz | TFORF2730 | ZNF668 | NM_001172670, NM_024706, NM_001172668, | 2820 | 6370 | 9920 | None |
| | | | ENST00000535577, ENST00000538906, ENST00000394983, | | | | |
| | | | ENST00000300849 | | | | |
| Genewiz | TFORF2731 | ZNF669 | NM_024804, ENST00000343381 | 2821 | 6371 | 9921 | None |
| Genewiz | TFORF2732 | ZNF669 | NM_001142572, ENST00000448299 | 2822 | 6372 | 9922 | None |
| Genewiz | TFORF2733 | BDP1 | NM_018429, ENST00000358731 | 2823 | 6373 | 9923 | None |
| Genewiz | TFORF2734 | ZNF662 | NM_207404, ENST00000440367 | 2824 | 6374 | 9924 | None |
| Genewiz | TFORF2735 | ZNF662 | NM_001134656, ENST00000328199 | 2825 | 6375 | 9925 | None |
| Genewiz | TFORF2736 | PLK4 | NM_001190801, ENST00000514379 | 2826 | 6376 | 9926 | None |
| Genewiz | TFORF2737 | PLK4 | NM_014264, ENST00000270861 | 2827 | 6377 | 9927 | None |
| Genewiz | TFORF2738 | PLK4 | NM_001190799, ENST00000513090 | 2828 | 6378 | 9928 | None |
| Genewiz | TFORF2739 | ZNF665 | NM_024733, XM_005259266, ENST00000396424 | 2829 | 6379 | 9929 | None |
| Genewiz | TFORF2740 | ZNF667 | XM_011527208, XM_011527209, NM_001321356, | 2830 | 6380 | 9930 | None |
| | | | NM_022103, ENST00000504904, ENST00000292069 | | | | |
| Genewiz | TFORF2741 | ZNF484 | XM_017015181, NM_001261459, NM_001261460, | 2831 | 6381 | 9931 | None |
| | | | NM_001007101, ENST00000395506, ENST00000332591 | | | | |
| Genewiz | TFORF2742 | ZNF484 | NM_001261458, ENST00000395505 | 2832 | 6382 | 9932 | None |
| Genewiz | TFORF2743 | T | NM_001270484, ENST00000366871 | 2833 | 6383 | 9933 | None |
| Genewiz | TFORF2744 | T | NM_003181, ENST00000296946 | 2834 | 6384 | 9934 | None |
| Genewiz | TFORF2745 | HELZ2 | NM_033405, ENST00000427522 | 2835 | 6385 | 9935 | None |
| Genewiz | TFORF2746 | HELZ2 | NM_001037335, ENST00000467148 | 2836 | 6386 | 9936 | None |
| Genewiz | TFORF2747 | NKX6-2 | XM_017016789, NM_177400, ENST00000368592 | 2837 | 6387 | 9937 | None |
| Genewiz | TFORF2748 | NKX6-3 | XM_017013143, ENST00000518699 | 2838 | 6388 | 9938 | None |
| Genewiz | TFORF2749 | NKX6-3 | NM_152568, ENST00000524115 | 2839 | 6389 | 9939 | None |
| Genewiz | TFORF2750 | NKX6-1 | NM_006168, ENST00000295886 | 2840 | 6390 | 9940 | None |
| Genewiz | TFORF2751 | ZNF444 | XM_005259035, NM_018337, XM_005259034, | 2841 | 6391 | 9941 | None |
| | | | XM_005259036, XM_011527068, ENST00000337080 | | | | |
| Genewiz | TFORF2752 | ZNF444 | NM_001253792, ENST00000592949 | 2842 | 6392 | 9942 | None |
| Genewiz | TFORF2753 | ZNF445 | NM_181489, XM_011533674, XM_005265102, | 2843 | 6393 | 9943 | None |
| | | | ENST00000396077, ENST00000425708 | | | | |
| Genewiz | TFORF2754 | ZNF446 | XM_005259052, NM_017908, ENST00000594369 | 2844 | 6394 | 9944 | None |
| Genewiz | TFORF2755 | ZNF440 | NM_152357, ENST00000304060 | 2845 | 6395 | 9945 | None |
| Genewiz | TFORF2756 | BARHL2 | NM_020063, ENST00000370445 | 2846 | 6396 | 9946 | None |
| Genewiz | TFORF2757 | BARHL1 | NM_020064, ENST00000263610, ENST00000542090 | 2847 | 6397 | 9947 | None |
| Genewiz | TFORF2758 | ZNF443 | NM_005815, ENST00000301547 | 2848 | 6398 | 9948 | None |
| Genewiz | TFORF2759 | L3MBTL1 | NM_015478, ENST00000373135 | 2849 | 6399 | 9949 | None |
| Genewiz | TFORF2760 | L3MBTL1 | NM_032107, ENST00000427442, ENST00000418998 | 2850 | 6400 | 9950 | None |
| Genewiz | TFORF2761 | ZKSCAN3 | XM_006715215, NM_024493, NM_001242894, | 2851 | 6401 | 9951 | None |
| | | | ENST00000252211, ENST00000377255 | | | | |
| Genewiz | TFORF2762 | ZKSCAN3 | NM_001242895, XM_006715218, ENST00000341464 | 2852 | 6402 | 9952 | None |
| Genewiz | TFORF2763 | ZKSCAN2 | NM_001012981, ENST00000328086 | 2853 | 6403 | 9953 | None |
| Genewiz | TFORF2764 | ZKSCAN5 | XM_017011918, XM_017011919, NM_145102, | 2854 | 6404 | 9954 | None |
| | | | NM_001318082, NM_014569, ENST00000326775, | | | | |
| | | | ENST00000451158, ENST00000394170 | | | | |
| Genewiz | TFORF2765 | ZKSCAN7 | NM_001288590, NM_018651, ENST00000426540, | 2855 | 6405 | 9955 | None |
| | | | ENST00000273320 | | | | |
| Genewiz | TFORF2766 | ZKSCAN7 | NM_001288592, ENST00000447279 | 2856 | 6406 | 9956 | None |
| Genewiz | TFORF2767 | ZKSCAN7 | NM_001288591, NM_025169, ENST00000431636, | 2857 | 6407 | 9957 | None |
| | | | ENST00000341840 | | | | |
| Genewiz | TFORF2768 | KDM5D | NM_001146705, ENST00000541639 | 2858 | 6408 | 9958 | None |
| Genewiz | TFORF2769 | KDM5D | NM_001146706, ENST00000382806 | 2859 | 6409 | 9959 | None |
| Genewiz | TFORF2770 | KDM5D | NM_004653, ENST00000317961 | 2860 | 6410 | 9960 | None |
| Genewiz | TFORF2771 | KDM5A | NM_001042603, ENST00000399788 | 2861 | 6411 | 9961 | None |
| Genewiz | TFORF2772 | KDM5B | NM_001314042, ENST00000367264 | 2862 | 6412 | 9962 | None |
| Genewiz | TFORF2773 | KDM5B | NM_006618, ENST00000367265 | 2863 | 6413 | 9963 | None |
| Genewiz | TFORF2774 | KDMSC | NM_001146702, ENST00000452825 | 2864 | 6414 | 9964 | None |
| Genewiz | TFORF2775 | KDM5C | NM_004187, ENST00000375401 | 2865 | 6415 | 9965 | None |
| Genewiz | TFORF2776 | KDM5C | NM_001282622, ENST00000404049 | 2866 | 6416 | 9966 | None |
| Genewiz | TFORF2777 | KDM5C | XM_011530826, ENST00000375383 | 2867 | 6417 | 9967 | None |
| Genewiz | TFORF2778 | KDMSC | XM_005262035, ENST00000375379 | 2868 | 6418 | 9968 | None |
| Genewiz | TFORF2779 | BATE | NM_006399, ENST00000286639 | 2869 | 6419 | 9969 | None |
| Genewiz | TFORF2780 | ZNF30 | XM_017027426, NM_194325, XM_017027425, | 2870 | 6420 | 9970 | None |
| | | | ENST00000601142 | | | | |
| Genewiz | TFORF2781 | ZNF30 | XM_017027424, NM_001099437, NM_001099438, | 2871 | 6421 | 9971 | None |
| | | | XM_011527443, XM_011527444, XM_017027423, | | | | |
| | | | ENST00000303586, ENST00000439785 | | | | |
| Genewiz | TFORF2782 | GLIS2 | NM_001318918, XM_005255641, NM_032575, | 2872 | 6422 | 9972 | None |
| | | | ENST00000262366, ENST00000433375 | | | | |
| Genewiz | TFORF2783 | GLIS3 | XM_005251386, XM_017014361, XM_011517766, | 2873 | 6423 | 9973 | None |
| | | | NM_152629, ENST00000324333 | | | | |
| Genewiz | TFORF2784 | GLIS3 | XM_011517764, XM_011517763, NM_001042413, | 2874 | 6424 | 9974 | None |
| | | | ENST00000381971 | | | | |
| Genewiz | TFORF2785 | GLIS1 | NM_147193, ENST00000312233 | 2875 | 6425 | 9975 | None |
| Genewiz | TFORF2786 | GLIS1 | XM_017000410, XM_017000408, ENST00000628545 | 2876 | 6426 | 9976 | None |
| Genewiz | TFORF2787 | DCP1A | NM_001290204, ENST00000294241 | 2877 | 6427 | 9977 | None |
| Genewiz | TFORF2788 | OTX2 | NM_172337, NM_001270524, NM_001270523, | 2878 | 6428 | 9978 | None |
| | | | ENST00000408990, ENST00000555006 | | | | |
| Genewiz | TFORF2789 | ZNF287 | XM_011523968, XM_017024887, NM_020653, | 2879 | 6429 | 9979 | None |
| | | | ENST00000395824, ENST00000395825 | | | | |
| Genewiz | TFORF2790 | ZNF284 | XM_011526908, XM_011526907, NM_001037813, | 2880 | 6430 | 9980 | None |
| | | | ENST00000421176 | | | | |
| Genewiz | TFORF2791 | ZNF285 | NM_001291488, ENST00000591679 | 2881 | 6431 | 9981 | None |
| Genewiz | TFORF2792 | ZNF282 | NM_001303481, ENST00000479907 | 2882 | 6432 | 9982 | None |
| Genewiz | TFORF2793 | ZNF282 | NM_003575, ENST00000610704 | 2883 | 6433 | 9983 | None |
| Genewiz | TFORF2794 | ZNF283 | XM_017026630, XM_017026628, XM_017026629, | 2884 | 6434 | 9984 | None |
| | | | NM_181845, XM_017026631, ENST00000618787, | | | | |
| | | | ENST00000324461 | | | | |
| Genewiz | TFORF2795 | ZNF283 | NM_001297752, XM_017026638, XM_017026637, | 2885 | 6435 | 9985 | None |
| | | | XM_017026639, ENST00000588797 | | | | |
| Genewiz | TFORF2796 | ZNF281 | NM_001281294, ENST00000367352 | 2886 | 6436 | 9986 | None |
| Genewiz | TFORF2797 | TAF7 | NM_005642, ENST00000313368 | 2887 | 6437 | 9987 | None |
| Genewiz | TFORF2798 | TAF6 | NM_001190415, ENST00000437822 | 2888 | 6438 | 9988 | None |
| Genewiz | TFORF2799 | TAF6 | NM_005641, NM_139315, XM_006716100, | 2889 | 6439 | 9989 | None |
| | | | ENST00000453269, ENST0452041, ENST00000344095 | | | | |
| Genewiz | TFORF2800 | TAF5 | NM_006951, ENST00000369839 | 2890 | 6440 | 9990 | None |
| Genewiz | TFORF2801 | ETV2 | XM_005258652, ENST00000379026 | 2891 | 6441 | 9991 | None |
| Genewiz | TFORF2802 | ETV2 | NM_001304549, ENST00000379023 | 2892 | 6442 | 9992 | None |
| Genewiz | TFORF2803 | ETV2 | XM_011526624, NM_001300974, ENST00000479824 | 2893 | 6443 | 9993 | None |
| Genewiz | TFORF2804 | ETV2 | NM_014209, ENST00000402764, ENST00000403402 | 2894 | 6444 | 9994 | None |
| Genewiz | TFORF2805 | TAF2 | NM_003184, ENST00000378164 | 2895 | 6445 | 9995 | None |
| Genewiz | TFORF2806 | ETV7 | NM_001207037, ENST00000615781 | 2896 | 6446 | 9996 | None |
| Genewiz | TFORF2807 | ETV7 | NM_001207038, ENST00000373737 | 2897 | 6447 | 9997 | None |
| Genewiz | TFORF2808 | ETV7 | NM_001207041, ENST00000538992 | 2898 | 6448 | 9998 | None |
| Genewiz | TFORF2809 | ETV7 | NM_001207035, ENST00000339796 | 2899 | 6449 | 9999 | None |
| Genewiz | TFORF2810 | ETV7 | NM_001207036, ENST00000373738 | 2900 | 6450 | 10000 | None |
| Genewiz | TFORF2811 | ETV7 | NM_001207040, ENST00000620358 | 2901 | 6451 | 10001 | None |
| Genewiz | TFORF2812 | ETV7 | NM_001207039, ENST00000627426 | 2902 | 6452 | 10002 | None |
| Genewiz | TFORF2813 | FOXD4L1 | NM_012184, ENST00000306507 | 2903 | 6453 | 10003 | None |
| Genewiz | TFORF2814 | FOSB | XM_005258691, ENST00000592436 | 2904 | 6454 | 10004 | None |
| Genewiz | TFORF2815 | FOSB | NM_006732, ENST00000353609 | 2905 | 6455 | 10005 | None |
| Genewiz | TFORF2816 | FOSB | NM_001114171, ENST00000417353 | 2906 | 6456 | 10006 | None |
| Genewiz | TFORF2817 | FOXD4L3 | NM_199135, ENST00000342833 | 2907 | 6457 | 10007 | None |
| Genewiz | TFORF2818 | GON4L | NM_001282861, NM_032292, ENST00000361040 | 2908 | 6458 | 10008 | None |
| Genewiz | TFORF2819 | GON4L | NM_001282858, XM_006711393, XM_006711394, | 2909 | 6459 | 10009 | None |
| | | | ENST00000437809, ENST00000271883 | | | | |
| Genewiz | TFORF2820 | GON4L | NM_001282860, NM_001282856, ENST00000368331, | 2910 | 6460 | 10010 | None |
| | | | ENST00000615926 | | | | |
| Genewiz | TFORF2821 | IKZF5 | NM_001271840, XM_017016550, XM_006717947, | 2911 | 6461 | 10011 | None |
| | | | XM_017016551, XM_017016552, ENST00000368886, | | | | |
| | | | ENST00000617859 | | | | |
| Genewiz | TFORF2822 | IKZF4 | XM_017019809, XM_017019805, XM_017019807, | 2912 | 6462 | 10012 | None |
| | | | XM_017019806, XM_{——}017019810, XM_017019811, | | | | |
| | | | XM_017019808, NM_022465, ENST0262032, | | | | |
| | | | ENST00000431367, ENST00000547167 | | | | |
| Genewiz | TFORF2823 | IKZF1 | XM_011515068, NM_006060, XM_011515069, | 2913 | 6463 | 10013 | None |
| | | | ENST00000331340 | | | | |
| Genewiz | TFORF2824 | IKZF1 | XM_011515076, XM_017011668, XM_011515075, | 2914 | 6464 | 10014 | None |
| | | | NM_001291838, ENST00000343574, ENST00000438033 | | | | |
| Genewiz | TFORF2825 | IKZF1 | NM_001291845, ENST00000413698 | 2915 | 6465 | 10015 | None |
| Genewiz | TFORF2826 | IKZF1 | NM_001220771, ENST00000349824 | 2916 | 6466 | 10016 | None |
| Genewiz | TFORF2827 | IKZF1 | NM_001220768, ENST00000357364 | 2917 | 6467 | 10017 | None |
| Genewiz | TFORF2828 | IKZF3 | NM_001257413, ENST00000377952 | 2918 | 6468 | 10018 | None |
| Genewiz | TFORF2829 | IKZF3 | NM_183230, ENST00000350532 | 2919 | 6469 | 10019 | None |
| Genewiz | TFORF2830 | IKZF3 | NM_183231, ENST00000439016 | 2920 | 6470 | 10020 | None |
| Genewiz | TFORF2831 | IKZF3 | NM_183229, ENST00000351680 | 2921 | 6471 | 10021 | None |
| Genewiz | TFORF2832 | IKZF3 | NM_001257408, ENST00000535189 | 2922 | 6472 | 10022 | None |
| Genewiz | TFORF2833 | IKZF3 | NM_001257410, ENST00000377958 | 2923 | 6473 | 10023 | None |
| Genewiz | TFORF2834 | IKZF3 | NM_001257412, ENST00000394189 | 2924 | 6474 | 10024 | None |
| Genewiz | TFORF2835 | IKZF3 | NM_001257414, ENST00000377945 | 2925 | 6475 | 10025 | None |
| Genewiz | TFORF2836 | IKZF3 | NM_001257411, ENST00000377944 | 2926 | 6476 | 10026 | None |
| Genewiz | TFORF2837 | IKZF3 | NM_183232, ENST00000346243 | 2927 | 6477 | 10027 | None |
| Genewiz | TFORF2838 | IKZF3 | NM_001284514, NM_001284515, NM_001284516, | 2928 | 6478 | 10028 | None |
| | | | ENST00000623724, ENST00000583368 | | | | |
| Genewiz | TFORF2839 | IKZF3 | NM_183228, ENST00000467757 | 2929 | 6479 | 10029 | None |
| Genewiz | TFORF2840 | IKZF3 | NM_001257409, ENST00000439167 | 2930 | 6480 | 10030 | None |
| Genewiz | TFORF2841 | IKZF2 | NM_016260, XM_005246385, XM_005246384, | 2931 | 6481 | 10031 | None |
| | | | XM_011510814, ENST00000434687 | | | | |
| Genewiz | TFORF2842 | IKZF2 | NM_001079526, XM_017003589, XM_017003590, | 2932 | 6482 | 10032 | None |
| | | | ENST00000374319 | | | | |
| Genewiz | TFORF2843 | RHOXF2B | NM_001099685, ENST00000371402 | 2933 | 6483 | 10033 | None |
| Genewiz | TFORF2844 | HNRNPK | NM_001318188, NM_031262, XM_017014668, | 2934 | 6484 | 10034 | None |
| | | | ENST00000351839, ENST00000360384 | | | | |
| Genewiz | TFORF2845 | TCF24 | NM_001193502, XM_017012940, ENST00000563496 | 2935 | 6485 | 10035 | None |
| Genewiz | TFORF2846 | TCF20 | NM_181492, XM_011530354, ENST00000335626 | 2936 | 6486 | 10036 | None |
| Genewiz | TFORF2847 | TCF20 | NM_005650, XM_006724313, XM_005261722, | 2937 | 6487 | 10037 | None |
| | | | ENST00000359486 | | | | |
| Genewiz | TFORF2848 | TCF21 | NM_198392, NM_003206, ENST00000367882, | 2938 | 6488 | 10038 | None |
| | | | ENST00000237316 | | | | |
| Genewiz | TFORF2849 | HMGA2 | NM_003484, ENST00000354636 | 2939 | 6489 | 10039 | None |
| Genewiz | TFORF2850 | HMGA2 | NM_001300918, ENST00000393577 | 2940 | 6490 | 10040 | None |
| Genewiz | TFORF2851 | HMGA2 | NM_003483, ENST00000403681 | 2941 | 6491 | 10041 | None |
| Genewiz | TFORF2852 | HMGA2 | NM_001300919, ENST00000536545 | 2942 | 6492 | 10042 | None |
| Genewiz | TFORF2853 | HMGA2 | XM_017019989, ENST00000393578 | 2943 | 6493 | 10043 | None |
| Genewiz | TFORF2854 | FEV | NM_017521, ENST00000295727 | 2944 | 6494 | 10044 | None |
| Genewiz | TFORF2855 | MAPK8IP1 | XM_005253226, ENST00000395629 | 2945 | 6495 | 10045 | None |
| Genewiz | TFORF2856 | MAPK8IP1 | NM_005456, ENST00000241014 | 2946 | 6496 | 10046 | None |
| Genewiz | TFORF2857 | ID4 | NM_001546, ENST00000378700 | 2947 | 6497 | 10047 | None |
| Genewiz | TFORF2858 | ID3 | NM_002167, ENST00000374561 | 2948 | 6498 | 10048 | None |
| Genewiz | TFORF2859 | ID1 | NM_181353, ENST00000376105 | 2949 | 6499 | 10049 | None |
| Genewiz | TFORF2860 | ID1 | NM_002165, ENST00000376112 | 2950 | 6500 | 10050 | None |
| Genewiz | TFORF2861 | SREBF2 | NM_004599, ENST00000361204 | 2951 | 6501 | 10051 | None |
| Genewiz | TFORF2862 | SREBF1 | NM_001005291, ENST00000355815 | 2952 | 6502 | 10052 | None |
| Genewiz | TFORF2863 | SREBF1 | NM_004176, ENST00000261646 | 2953 | 6503 | 10053 | None |
| Genewiz | TFORF2864 | WIZ | NM_021241, ENST00000263381 | 2954 | 6504 | 10054 | None |
| Genewiz | TFORF2865 | WIZ | XM_005260009, XM_011528163, XM_005260010, | 2955 | 6505 | 10055 | None |
| | | | ENST00000599910 | | | | |
| Genewiz | TFORF2866 | WIZ | XM_005260012, ENST00000599686 | 2956 | 6506 | 10056 | None |
| Genewiz | TFORF2867 | TADA3 | NM_006354, NM_001278270, ENST00000301964, | 2957 | 6507 | 10057 | None |
| | | | ENST00000440161 | | | | |
| Genewiz | TFORF2868 | TADA3 | NM_133480, ENST00000343450 | 2958 | 6508 | 10058 | None |
| Genewiz | TFORF2869 | ZNF865 | NM_001195605, ENST00000568956 | 2959 | 6509 | 10059 | None |
| Genewiz | TFORF2870 | HMX1 | NM_001306142, ENST00000506970 | 2960 | 6510 | 10060 | None |
| Genewiz | TFORF2871 | HMX1 | NM_018942, ENST00000400677 | 2961 | 6511 | 10061 | None |
| Genewiz | TFORF2872 | HMX3 | NM_001105574, ENST00000357878 | 2962 | 6512 | 10062 | None |
| Genewiz | TFORF2873 | ELF1 | XM_005266277, NM_172373, XM_005266276, | 2963 | 6513 | 10063 | None |
| | | | XM_011534950, XM_017020413, XM_017020412, | | | | |
| | | | XM_017020409, XM_017020411, XM_017020410, | | | | |
| | | | ENST00000239882 | | | | |
| Genewiz | TFORF2874 | ELF1 | NM_001145353, ENST00000625359 | 2964 | 6514 | 10064 | None |
| Genewiz | TFORF2875 | ELF3 | NM_004433, NM_001114309, ENST00000359651, | 2965 | 6515 | 10065 | None |
| | | | ENST00000367284, ENST00000367283 | | | | |
| Genewiz | TFORF2876 | ELF2 | NM_006874, ENST00000358635 | 2966 | 6516 | 10066 | None |
| Genewiz | TFORF2877 | ELF2 | NM_001276458, ENST00000510408 | 2967 | 6517 | 10067 | None |
| Genewiz | TFORF2878 | ELF2 | NM_001276457, ENST00000379549 | 2968 | 6518 | 10068 | None |
| Genewiz | TFORF2879 | ELF2 | NM_201999, XM_005262804, ENST00000394235 | 2969 | 6519 | 10069 | None |
| Genewiz | TFORF2880 | ELF2 | XM_005262803, ENST00000379550 | 2970 | 6520 | 10070 | None |
| Genewiz | TFORF2881 | XBP1 | NM_005080, ENST00000216037 | 2971 | 6521 | 10071 | None |
| Genewiz | TFORF2882 | XBP1 | NM_001079539, ENST00000611155, ENST00000344347 | 2972 | 6522 | 10072 | None |
| Genewiz | TFORF2883 | BHLHA9 | NM_001164405, ENST00000391429 | 2973 | 6523 | 10073 | None |
| Genewiz | TFORF2884 | FIGLA | NM_001004311, ENST00000332372 | 2974 | 6524 | 10074 | None |
| Genewiz | TFORF2885 | GLI2 | NM_005270, ENST00000452319, ENST00000361492 | 2975 | 6525 | 10075 | None |
| Genewiz | TFORF2886 | GLI3 | NM_000168, ENST00000395925 | 2976 | 6526 | 10076 | None |
| Genewiz | TFORF2887 | BRPF1 | NM_001319050, ENST00000424362 | 2977 | 6527 | 10077 | None |
| Genewiz | TFORF2888 | BRPF1 | NM_001319049, ENST00000433861 | 2978 | 6528 | 10078 | None |
| Genewiz | TFORF2889 | BRPF1 | NM_004634, ENST00000457855 | 2979 | 6529 | 10079 | None |
| Genewiz | TFORF2890 | GLI1 | NM_005269, XM_011538189, ENST00000228682 | 2980 | 6530 | 10080 | None |
| Genewiz | TFORF2891 | GLI1 | NM_001160045, ENST00000543426 | 2981 | 6531 | 10081 | None |
| Genewiz | TFORF2892 | GLI1 | NM_001167609, ENST00000546141 | 2982 | 6532 | 10082 | None |
| Genewiz | TFORF2893 | GLI4 | NM_138465, ENST00000340042, ENST00000523522 | 2983 | 6533 | 10083 | None |
| Genewiz | TFORF2894 | MTA1 | NM_001203258, ENST00000438610 | 2984 | 6534 | 10084 | None |
| Genewiz | TFORF2895 | MTA1 | NM_004689, ENST00000331320 | 2985 | 6535 | 10085 | None |
| Genewiz | TFORF2896 | MTA2 | XM_017018561, ENST00000524902, ENST00000527204 | 2986 | 6536 | 10086 | None |
| Genewiz | TFORF2897 | MTA2 | NM_004739, ENST00000278823 | 2987 | 6537 | 10087 | None |
| Genewiz | TFORF2898 | MTA3 | NM_001282755, NM_001282756, ENST00000405592, | 2988 | 6538 | 10088 | None |
| | | | ENST00000406652 | | | | |
| Genewiz | TFORF2899 | MTA3 | NM_020744, ENST00000407270 | 2989 | 6539 | 10089 | None |
| Genewiz | TFORF2900 | MTA3 | XM_005264456, ENST00000405094 | 2990 | 6540 | 10090 | None |
| Genewiz | TFORF2901 | DACH1 | NM_080760, ENST00000611519 | 2991 | 6541 | 10091 | None |
| Genewiz | TFORF2902 | DACH1 | NM_004392, ENST00000620444 | 2992 | 6542 | 10092 | None |
| Genewiz | TFORF2903 | DACH1 | XM_011534939, ENST00000619232 | 2993 | 6543 | 10093 | None |
| Genewiz | TFORF2904 | DACH1 | NM_080759, ENST00000613252 | 2994 | 6544 | 10094 | None |
| Genewiz | TFORF2905 | DACH2 | NM_053281, ENST00000373125 | 2995 | 6545 | 10095 | None |
| Genewiz | TFORF2906 | DACH2 | NM_001139515, ENST00000508860 | 2996 | 6546 | 10096 | None |
| Genewiz | TFORF2907 | DACH2 | NM_001139514, XM_017029256, ENST00000373131 | 2997 | 6547 | 10097 | None |
| Genewiz | TFORF2908 | NFIC | NM_001245002, ENST00000443272 | 2998 | 6548 | 10098 | None |
| Genewiz | TFORF2909 | NFIC | XM_017026835, NM_001245004, ENST00000590282 | 2999 | 6549 | 10099 | None |
| Genewiz | TFORF2910 | NFIC | NM_001245005, ENST00000395111 | 3000 | 6550 | 10100 | None |
| Genewiz | TFORF2911 | NFIC | NM_005597, ENST00000341919 | 3001 | 6551 | 10101 | None |
| Genewiz | TFORF2912 | NFIC | NM_205843, ENST00000589123 | 3002 | 6552 | 10102 | None |
| Genewiz | TFORF2913 | NFIB | XM_005251467, ENST00000397581 | 3003 | 6553 | 10103 | None |
| Genewiz | TFORF2914 | NFIB | NM_001190738, ENST00000380934 | 3004 | 6554 | 10104 | None |
| Genewiz | TFORF2915 | NFIB | XM_017014742, ENST00000636735 | 3005 | 6555 | 10105 | None |
| Genewiz | TFORF2916 | NFIB | NM_001282787, ENST00000543693 | 3006 | 6556 | 10106 | None |
| Genewiz | TFORF2917 | NFIB | XM_005251470, ENST00000397579 | 3007 | 6557 | 10107 | None |
| Genewiz | TFORF2918 | NFIB | NM_001190737, ENST00000380953 | 3008 | 6558 | 10108 | None |
| Genewiz | TFORF2919 | NFIB | XM_017014740, ENST00000606230 | 3009 | 6559 | 10109 | None |
| Genewiz | TFORF2920 | NFIB | XM_005251469, ENST00000397575 | 3010 | 6560 | 10110 | None |
| Genewiz | TFORF2921 | NFIA | NM_001145512, ENST00000371189 | 3011 | 6561 | 10111 | None |
| Genewiz | TFORF2922 | NFIA | NM_001145511, ENST00000407417 | 3012 | 6562 | 10112 | None |
| Genewiz | TFORF2923 | NFIA | NM_001134673, ENST00000403491 | 3013 | 6563 | 10113 | None |
| Genewiz | TFORF2924 | NFIA | NM_005595, ENST00000371187 | 3014 | 6564 | 10114 | None |
| Genewiz | TFORF2925 | ZFP57 | NM_001109809, XM_011514570, ENST00000488757 | 3015 | 6565 | 10115 | None |
| Genewiz | TFORF2926 | BCL6B | NM_181844, ENST00000293805 | 3016 | 6566 | 10116 | None |
| Genewiz | TFORF2927 | NFIX | XM_005259918, ENST00000592199 | 3017 | 6567 | 10117 | None |
| Genewiz | TFORF2928 | NFIX | NM_002501, ENST00000397661 | 3018 | 6568 | 10118 | None |
| Genewiz | TFORF2929 | NFIX | XM_005259920, ENST00000585575 | 3019 | 6569 | 10119 | None |
| Genewiz | TFORF2930 | NFIX | NM_001271044, ENST00000587760 | 3020 | 6570 | 10120 | None |
| Broad GPP | TFORF2931 | LHX4 | NM_033343.3 | 3021 | 6571 | 10121 | V5 |
| Broad GPP | TFORF2932 | TFAP2A | NM_001032280.2 | 3022 | 6572 | 10122 | V5 |
| Broad GPP | TFORF2933 | HOXD3 | NM_006898.4 | 3023 | 6573 | 10123 | V5 |
| Broad GPP | TFORF2934 | TFEB | NM_007162.2 | 3024 | 6574 | 10124 | V5 |
| Broad GPP | TFORF2935 | MAFK | NM_002360.3 | 3025 | 6575 | 10125 | V5 |
| Broad GPP | TFORF2936 | FOS | NM_005252.3 | 3026 | 6576 | 10126 | V5 |
| Broad GPP | TFORF2937 | FOS | NM_005252.3 | 3027 | 6577 | 10127 | None |
| Broad GPP | TFORF2938 | SOX5 | NM_001261414.2 | 3028 | 6578 | 10128 | V5 |
| Broad GPP | TFORF2939 | HOXA6 | NM_024014.3 | 3029 | 6579 | 10129 | V5 |
| Broad GPP | TFORF2940 | NR4A1 | NM_002135.4 | 3030 | 6580 | 10130 | V5 |
| Broad GPP | TFORF2941 | DLX5 | NM_005221.5 | 3031 | 6581 | 10131 | V5 |
| Broad GPP | TFORF2942 | ESRRG | XM_011509277.1 | 3032 | 6582 | 10132 | V5 |
| Broad GPP | TFORF2943 | ESRRG | NM_001243509.1 | 3033 | 6583 | 10133 | None |
| Broad GPP | TFORF2944 | SATB2 | NM_001172509.1 | 3034 | 6584 | 10134 | V5 |
| Genewiz | TFORF2945 | NEUROD1 | NM_002500.4 | 3035 | 6585 | 10135 | None |
| Broad GPP | TFORF2946 | MYOD1 | NM_002478.4 | 3036 | 6586 | 10136 | V5 |
| Broad GPP | TFORF2947 | HOXC8 | NM_022658.3 | 3037 | 6587 | 10137 | V5 |
| Broad GPP | TFORF2948 | HOXB6 | NM_018952.4 | 3038 | 6588 | 10138 | V5 |
| Broad GPP | TFORF2949 | GCM2 | NM_004752.3 | 3039 | 6589 | 10139 | V5 |
| Broad GPP | TFORF2950 | MAFB | NM_005461.4 | 3040 | 6590 | 10140 | V5 |
| Broad GPP | TFORF2951 | TWIST2 | NM_057179.2 | 3041 | 6591 | 10141 | V5 |
| Broad GPP | TFORF2952 | TLE1 | NM_005077.4 | 3042 | 6592 | 10142 | V5 |
| Broad GPP | TFORF2953 | TLE1 | NM_005077.4 | 3043 | 6593 | 10143 | V5 |
| Broad GPP | TFORF2954 | HNF4G | NM_001330561.1 | 3044 | 6594 | 10144 | None |
| Broad GPP | TFORF2955 | HMG20B | NM_006339.2 | 3045 | 6595 | 10145 | V5 |
| Broad GPP | TFORF2956 | HNF4A | NM_178850.2 | 3046 | 6596 | 10146 | V5 |
| Broad GPP | TFORF2957 | HNF4A | NM_000457.4 | 3047 | 6597 | 10147 | None |
| Broad GPP | TFORF2958 | SP1 | NM_138473.2 | 3048 | 6598 | 10148 | None |
| Broad GPP | TFORF2959 | KAT2A | NM_021078.2 | 3049 | 6599 | 10149 | None |
| Broad GPP | TFORF2960 | PGR | NM_000926.4 | 3050 | 6600 | 10150 | None |
| Broad GPP | TFORF2961 | NR2C1 | NM_001032287.2 | 3051 | 6601 | 10151 | V5 |
| Broad GPP | TFORF2962 | NR2C2 | XM_011534061.2 | 3052 | 6602 | 10152 | V5 |
| Broad GPP | TFORF2963 | NR2C2 | NM_003298.4 | 3053 | 6603 | 10153 | None |
| Broad GPP | TFORF2964 | NR2C2 | XM_011534061.2 | 3054 | 6604 | 10154 | None |
| Broad GPP | TFORF2965 | NR2C2 | NM_003298.4 | 3055 | 6605 | 10155 | V5 |
| Broad GPP | TFORF2966 | NROB1 | NM_000475.4 | 3056 | 6606 | 10156 | V5 |
| Broad GPP | TFORF2967 | NROB1 | NM_000475.4 | 3057 | 6607 | 10157 | None |
| Broad GPP | TFORF2968 | NROB1 | NM_000475.4 | 3058 | 6608 | 10158 | V5 |
| Broad GPP | TFORF2969 | PAX8 | NM_003466.3 | 3059 | 6609 | 10159 | V5 |
| Broad GPP | TFORF2970 | RORC | NM_005060.3 | 3060 | 6610 | 10160 | V5 |
| Broad GPP | TFORF2971 | NR1H4 | NM_001206977.1 | 3061 | 6611 | 10161 | V5 |
| Broad GPP | TFORF2972 | NR1H4 | NM_005123.3 | 3062 | 6612 | 10162 | None |
| Broad GPP | TFORF2973 | PPARD | NM_177435.2 | 3063 | 6613 | 10163 | V5 |
| Genewiz | TFORF2974 | NR1H2 | NM_007121.5 | 3064 | 6614 | 10164 | None |
| Genewiz | TFORF2975 | NAT10 | NM_024662.2 | 3065 | 6615 | 10165 | None |
| Broad GPP | TFORF2976 | TULP2 | NM_003323.2 | 3066 | 6616 | 10166 | V5 |
| Broad GPP | TFORF2977 | ZNF225 | NM_013362.3 | 3067 | 6617 | 10167 | V5 |
| Broad GPP | TFORF2978 | NROB2 | NM_021969.2 | 3068 | 6618 | 10168 | V5 |
| Broad GPP | TFORF2979 | NROB2 | NM_021969.2 | 3069 | 6619 | 10169 | None |
| Broad GPP | TFORF2980 | FOXP3 | NM_014009.3 | 3070 | 6620 | 10170 | V5 |
| Broad GPP | TFORF2981 | ZNF71 | NM_021216.4 | 3071 | 6621 | 10171 | V5 |
| Broad GPP | TFORF2982 | ZNF420 | NM_144689.4 | 3072 | 6622 | 10172 | V5 |
| Broad GPP | TFORF2983 | SUZ12 | NM_015355.3 | 3073 | 6623 | 10173 | V5 |
| Broad GPP | TFORF2984 | MAP3K7 | NM_145333.2 | 3074 | 6624 | 10174 | None |
| Broad GPP | TFORF2985 | TEAD2 | NM_003598.1 | 3075 | 6625 | 10175 | V5 |
| Broad GPP | TFORF2986 | MECP2 | NM_004992.3 | 3076 | 6626 | 10176 | V5 |
| Broad GPP | TFORF2987 | RORA | NM_134261.2 | 3077 | 6627 | 10177 | None |
| Broad GPP | TFORF2988 | OTX2 | NM_021728.3 | 3078 | 6628 | 10178 | V5 |
| Genewiz | TFORF2989 | SLC45A2 | NM_001012509.3 | 3079 | 6629 | 10179 | None |
| Broad GPP | TFORF2990 | NFE2L1 | NM_001330262.1 | 3080 | 6630 | 10180 | V5 |
| Broad GPP | TFORF2991 | ID2 | NM_002166.4 | 3081 | 6631 | 10181 | V5 |
| Broad GPP | TFORF2992 | FOXR2 | NM_198451.3 | 3082 | 6632 | 10182 | V5 |
| Broad GPP | TFORF2993 | SKP2 | NM_032637.3 | 3083 | 6633 | 10183 | V5 |
| Broad GPP | TFORF2994 | SKP2 | NM_005983.3 | 3084 | 6634 | 10184 | None |
| Broad GPP | TFORF2995 | SKP2 | NM_032637.3 | 3085 | 6635 | 10185 | None |
| Broad GPP | TFORF2996 | TGIF1 | NM_173208.2 | 3086 | 6636 | 10186 | V5 |
| Broad GPP | TFORF2997 | GATA2 | NM_001145662.1 | 3087 | 6637 | 10187 | V5 |
| Broad GPP | TFORF2998 | GATA2 | NM_032638.4 | 3088 | 6638 | 10188 | V5 |
| Genewiz | TFORF2999 | CDK2 | NM_001798.4 | 3089 | 6639 | 10189 | None |
| Broad GPP | TFORF3000 | E2F6 | NM_198256.3 | 3090 | 6640 | 10190 | V5 |
| Broad GPP | TFORF3001 | DR1 | NM_001938.2 | 3091 | 6641 | 10191 | V5 |
| Broad GPP | TFORF3002 | NFYC | NM_014223.4 | 3092 | 6642 | 10192 | V5 |
| Broad GPP | TFORF3003 | MIER1 | NM_001146113.1 | 3093 | 6643 | 10193 | V5 |
| Broad GPP | TFORF3004 | PCGF2 | NM_007144.2 | 3094 | 6644 | 10194 | V5 |
| Broad GPP | TFORF3005 | SMAD4 | NM_005359.5 | 3095 | 6645 | 10195 | V5 |
| Broad GPP | TFORF3006 | ZBTB12 | NM_181842.2 | 3096 | 6646 | 10196 | V5 |
| Broad GPP | TFORF3007 | SMAD1 | NM_005900.2 | 3097 | 6647 | 10197 | V5 |
| Genewiz | TFORF3008 | CDX2 | NM_001265.4 | 3098 | 6648 | 10198 | None |
| Broad GPP | TFORF3009 | ZNF35 | NM_003420.3 | 3099 | 6649 | 10199 | V5 |
| Broad GPP | TFORF3010 | NR113 | NM_001077480.2 | 3100 | 6650 | 10200 | V5 |
| Broad GPP | TFORF3011 | ZNF10 | NM_015394.4 | 3101 | 6651 | 10201 | V5 |
| Broad GPP | TFORF3012 | HSF2 | NM_001243094.1 | 3102 | 6652 | 10202 | V5 |
| Broad GPP | TFORF3013 | MEF2A | NM_005587.3 | 3103 | 6653 | 10203 | V5 |
| Broad GPP | TFORF3014 | CEBPG | NM_001806.3 | 3104 | 6654 | 10204 | V5 |
| Broad GPP | TFORF3015 | PPARA | NM_001001928.2 | 3105 | 6655 | 10205 | None |
| Broad GPP | TFORF3016 | MLX | NM_198204.1 | 3106 | 6656 | 10206 | V5 |
| Broad GPP | TFORF3017 | ETV4 | NM_001261439.1 | 3107 | 6657 | 10207 | V5 |
| Broad GPP | TFORF3018 | NEUROG3 | NM_020999.3 | 3108 | 6658 | 10208 | V5 |
| Broad GPP | TFORF3019 | POU2F1 | XM_011509654.2 | 3109 | 6659 | 10209 | V5 |
| Broad GPP | TFORF3020 | PAX7 | NM_013945.2 | 3110 | 6660 | 10210 | V5 |
| Broad GPP | TFORF3021 | DLX4 | NM_138281.2 | 3111 | 6661 | 10211 | V5 |
| Broad GPP | TFORF3022 | RXRG | NM_006917.4 | 3112 | 6662 | 10212 | V5 |
| Broad GPP | TFORF3023 | NEUROD6 | NM_022728.3 | 3113 | 6663 | 10213 | None |
| Broad GPP | TFORF3024 | HEY2 | NM_012259.2 | 3114 | 6664 | 10214 | V5 |
| Broad GPP | TFORF3025 | MYF6 | NM_002469.2 | 3115 | 6665 | 10215 | V5 |
| Broad GPP | TFORF3026 | CREB1 | NM_134442.4 | 3116 | 6666 | 10216 | V5 |
| Broad GPP | TFORF3027 | SP6 | NM_199262.2 | 3117 | 6667 | 10217 | V5 |
| Broad GPP | TFORF3028 | ZNF200 | NM_003454.3 | 3118 | 6668 | 10218 | V5 |
| Broad GPP | TFORF3029 | ATOH1 | NM_005172.1 | 3119 | 6669 | 10219 | V5 |
| Broad GPP | TFORF3030 | ZNF415 | NM_001352148.1 | 3120 | 6670 | 10220 | V5 |
| Broad GPP | TFORF3031 | STRAP | NM_007178.3 | 3121 | 6671 | 10221 | V5 |
| Broad GPP | TFORF3032 | SIRT6 | NM_016539.3 | 3122 | 6672 | 10222 | V5 |
| Broad GPP | TFORF3033 | NFKBIA | NM_020529.2 | 3123 | 6673 | 10223 | V5 |
| Broad GPP | TFORF3034 | OTX1 | NM_001199770.1 | 3124 | 6674 | 10224 | V5 |
| Broad GPP | TFORF3035 | NFKBIB | NM_002503.4 | 3125 | 6675 | 10225 | V5 |
| Broad GPP | TFORF3036 | ATF4 | NM_001675.4 | 3126 | 6676 | 10226 | V5 |
| Broad GPP | TFORF3037 | IRF2 | NM_002199.3 | 3127 | 6677 | 10227 | V5 |
| Broad GPP | TFORF3038 | IRF2 | NM_002199.3 | 3128 | 6678 | 10228 | None |
| Broad GPP | TFORF3039 | NR1H3 | NM_001130102.2 | 3129 | 6679 | 10229 | V5 |
| Broad GPP | TFORF3040 | ZIM3 | NM_052882.1 | 3130 | 6680 | 10230 | V5 |
| Broad GPP | TFORF3041 | SOX15 | NM_006942.1 | 3131 | 6681 | 10231 | V5 |
| Broad GPP | TFORF3042 | TAF9 | NM_003187.4 | 3132 | 6682 | 10232 | V5 |
| Broad GPP | TFORF3043 | ZNF75D | NM_007131.4 | 3133 | 6683 | 10233 | V5 |
| Broad GPP | TFORF3044 | ZNF582 | NM_144690.2 | 3134 | 6684 | 10234 | V5 |
| Broad GPP | TFORF3045 | SNW1 | NM_012245.2 | 3135 | 6685 | 10235 | V5 |
| Broad GPP | TFORF3046 | ZNF418 | NM_133460.2 | 3136 | 6686 | 10236 | V5 |
| Broad GPP | TFORF3047 | ZNF266 | NM_006631.3 | 3137 | 6687 | 10237 | V5 |
| Broad GPP | TFORF3048 | ATMIN | NM_001300728.1 | 3138 | 6688 | 10238 | V5 |
| Broad GPP | TFORF3049 | CDK1 | NM_001786.4 | 3139 | 6689 | 10239 | V5 |
| Broad GPP | TFORF3050 | CDK1 | NM_001786.4 | 3140 | 6690 | 10240 | None |
| Broad GPP | TFORF3051 | CDK1 | NM_001786.4 | 3141 | 6691 | 10241 | None |
| Broad GPP | TFORF3052 | NCOA3 | NM_006534.3 | 3142 | 6692 | 10242 | V5 |
| Broad GPP | TFORF3053 | ZBTB44 | NM_014155.4 | 3143 | 6693 | 10243 | V5 |
| Broad GPP | TFORF3054 | SALL4 | NM_020436.4 | 3144 | 6694 | 10244 | V5 |
| Broad GPP | TFORF3055 | THRB | NM_001128177.1 | 3145 | 6695 | 10245 | V5 |
| Broad GPP | TFORF3056 | THRB | NM_001128177.1 | 3146 | 6696 | 10246 | None |
| Broad GPP | TFORF3057 | YAF2 | NM_001190979.2 | 3147 | 6697 | 10247 | V5 |
| Genewiz | TFORF3058 | EBF1 | NM_024007.4 | 3148 | 6698 | 10248 | None |
| Broad GPP | TFORF3059 | FOSL1 | NM_005438.4 | 3149 | 6699 | 10249 | V5 |
| Broad GPP | TFORF3060 | BACH1 | NM_206866.2 | 3150 | 6700 | 10250 | V5 |
| Broad GPP | TFORF3061 | SNAPC3 | NM_001039697.1 | 3151 | 6701 | 10251 | V5 |
| Genewiz | TFORF3062 | ZNF549 | NM_001199295.1 | 3152 | 6702 | 10252 | None |
| Broad GPP | TFORF3063 | FOXP1 | NM_001012505.1 | 3153 | 6703 | 10253 | V5 |
| Broad GPP | TFORF3064 | TERF1 | NM_003218.3 | 3154 | 6704 | 10254 | V5 |
| Broad GPP | TFORF3065 | ZBTB1 | NM_001123329.1 | 3155 | 6705 | 10255 | V5 |
| Broad GPP | TFORF3066 | CXXC1 | NM_001101654.1 | 3156 | 6706 | 10256 | V5 |
| Broad GPP | TFORF3067 | ZNF8 | NM_021089.2 | 3157 | 6707 | 10257 | V5 |
| Broad GPP | TFORF3068 | FOXJ2 | NM_018416.2 | 3158 | 6708 | 10258 | V5 |
| Broad GPP | TFORF3069 | DPF2 | NM_006268.4 | 3159 | 6709 | 10259 | V5 |
| Broad GPP | TFORF3070 | ZNF322 | NM_024639.4 | 3160 | 6710 | 10260 | V5 |
| Broad GPP | TFORF3071 | PRDM5 | NM_001300823.1 | 3161 | 6711 | 10261 | V5 |
| Broad GPP | TFORF3072 | NELFE | NM_002904.5 | 3162 | 6712 | 10262 | V5 |
| Broad GPP | TFORF3073 | LMO2 | NM_001142315.1 | 3163 | 6713 | 10263 | V5 |
| Broad GPP | TFORF3074 | LMO2 | NM_001142315.1 | 3164 | 6714 | 10264 | V5 |
| Broad GPP | TFORF3075 | ETS2 | NM_005239.5 | 3165 | 6715 | 10265 | V5 |
| Broad GPP | TFORF3076 | GTF2A2 | NM_004492.2 | 3166 | 6716 | 10266 | V5 |
| Broad GPP | TFORF3077 | AP2B1 | NM_001030006.1 | 3167 | 6717 | 10267 | V5 |
| Broad GPP | TFORF3078 | XRCC4 | NM_001318012.1 | 3168 | 6718 | 10268 | V5 |
| Broad GPP | TFORF3079 | ZNF846 | XM_017026405.1 | 3169 | 6719 | 10269 | V5 |
| Broad GPP | TFORF3080 | ZNF296 | NM_145288.2 | 3170 | 6720 | 10270 | V5 |
| Broad GPP | TFORF3081 | ELK3 | NM_005230.3 | 3171 | 6721 | 10271 | V5 |
| Broad GPP | TFORF3082 | GBX2 | NM_001485.3 | 3172 | 6722 | 10272 | V5 |
| Broad GPP | TFORF3083 | FOSL2 | NM_005253.3 | 3173 | 6723 | 10273 | V5 |
| Broad GPP | TFORF3084 | ZFP36L1 | NM_001244698.1 | 3174 | 6724 | 10274 | V5 |
| Broad GPP | TFORF3085 | GABPB1 | NM_005254.5 | 3175 | 6725 | 10275 | V5 |
| Broad GPP | TFORF3086 | STAT1 | NM_139266.2 | 3176 | 6726 | 10276 | V5 |
| Broad GPP | TFORF3087 | MAFF | NM_012323.3 | 3177 | 6727 | 10277 | V5 |
| Genewiz | TFORF3088 | E4F1 | NM_001288776.1 | 3178 | 6728 | 10278 | None |
| Broad GPP | TFORF3089 | ZSCAN9 | NM_006299.4 | 3179 | 6729 | 10279 | V5 |
| Broad GPP | TFORF3090 | ZNF260 | NM_001012756.2 | 3180 | 6730 | 10280 | V5 |
| Broad GPP | TFORF3091 | ZNF260 | NM_001012756.2 | 3181 | 6731 | 10281 | V5 |
| Broad GPP | TFORF3092 | NPAS1 | NM_002517.3 | 3182 | 6732 | 10282 | V5 |
| Broad GPP | TFORF3093 | ZNF574 | NM_022752.5 | 3183 | 6733 | 10283 | V5 |
| Broad GPP | TFORF3094 | ZIM2 | NM_015363.4 | 3184 | 6734 | 10284 | V5 |
| Broad GPP | TFORF3095 | LING | NM_173083.3 | 3185 | 6735 | 10285 | V5 |
| Broad GPP | TFORF3096 | ZNF837 | NM_138466.1 | 3186 | 6736 | 10286 | V5 |
| Broad GPP | TFORF3097 | ZNF76 | NM_003427.4 | 3187 | 6737 | 10287 | V5 |
| Broad GPP | TFORF3098 | ZNF467 | NM_207336.2 | 3188 | 6738 | 10288 | V5 |
| Broad GPP | TFORF3099 | KAT7 | NM_007067.4 | 3189 | 6739 | 10289 | V5 |
| Broad GPP | TFORF3100 | ZNF212 | NM_012256.3 | 3190 | 6740 | 10290 | V5 |
| Broad GPP | TFORF3101 | PES1 | NM_014303.3 | 3191 | 6741 | 10291 | V5 |
| Broad GPP | TFORF3102 | ZNF689 | NM_138447.2 | 3192 | 6742 | 10292 | V5 |
| Genewiz | TFORF3103 | HOXA1 | NM_005522.4 | 3193 | 6743 | 10293 | None |
| Broad GPP | TFORF3104 | NKX2-5 | NM_004387.3 | 3194 | 6744 | 10294 | V5 |
| Broad GPP | TFORF3105 | CCNH | NM_001239.3 | 3195 | 6745 | 10295 | V5 |
| Broad GPP | TFORF3106 | CCNH | NM_001239.3 | 3196 | 6746 | 10296 | V5 |
| Broad GPP | TFORF3107 | RARA | NM_001145301.2 | 3197 | 6747 | 10297 | None |
| Broad GPP | TFORF3108 | ASCL2 | NM_005170.2 | 3198 | 6748 | 10298 | V5 |
| Broad GPP | TFORF3109 | ELF5 | NM_001422.3 | 3199 | 6749 | 10299 | V5 |
| Broad GPP | TFORF3110 | TGIF2LY | NM_139214.2 | 3200 | 6750 | 10300 | V5 |
| Broad GPP | TFORF3111 | ZNF416 | NM_017879.1 | 3201 | 6751 | 10301 | V5 |
| Broad GPP | TFORF3112 | RFXANK | NM_003721.3 | 3202 | 6752 | 10302 | V5 |
| Broad GPP | TFORF3113 | RFXANK | NM_001278727.1 | 3203 | 6753 | 10303 | V5 |
| Broad GPP | TFORF3114 | BHLHA15 | NM_177455.3 | 3204 | 6754 | 10304 | V5 |
| Broad GPP | TFORF3115 | GSC | NM_173849.2 | 3205 | 6755 | 10305 | V5 |
| Genewiz | TFORF3116 | HEYL | NM_014571.3 | 3206 | 6756 | 10306 | None |
| Broad GPP | TFORF3117 | MZF1 | NM_003422.2 | 3207 | 6757 | 10307 | V5 |
| Broad GPP | TFORF3118 | ZNF581 | NM_016535.3 | 3208 | 6758 | 10308 | V5 |
| Broad GPP | TFORF3119 | DDIT3 | NM_004083.5 | 3209 | 6759 | 10309 | V5 |
| Broad GPP | TFORF3120 | ZNF341 | NM_001282933.1 | 3210 | 6760 | 10310 | V5 |
| Genewiz | TFORF3121 | ZNF341 | NM_032819.4 | 3211 | 6761 | 10311 | None |
| Broad GPP | TFORF3122 | SATB1 | NM_001322874.1 | 3212 | 6762 | 10312 | V5 |
| Broad GPP | TFORF3123 | STAT4 | NM_001243835.1 | 3213 | 6763 | 10313 | V5 |
| Broad GPP | TFORF3124 | SMAD3 | NM_005902.3 | 3214 | 6764 | 10314 | V5 |
| Broad GPP | TFORF3125 | ZNF300 | NM_052860.2 | 3215 | 6765 | 10315 | V5 |
| Broad GPP | TFORF3126 | IKZF3 | NM_012481.4 | 3216 | 6766 | 10316 | V5 |
| Broad GPP | TFORF3127 | NFIL3 | NM_005384.2 | 3217 | 6767 | 10317 | V5 |
| Broad GPP | TFORF3128 | IRF5 | NM_032643.4 | 3218 | 6768 | 10318 | V5 |
| Broad GPP | TFORF3129 | SMAD7 | NM_005904.3 | 3219 | 6769 | 10319 | V5 |
| Broad GPP | TFORF3130 | IRF8 | NM_002163.2 | 3220 | 6770 | 10320 | V5 |
| Broad GPP | TFORF3131 | NR5A2 | NM_003822.4 | 3221 | 6771 | 10321 | V5 |
| Broad GPP | TFORF3132 | ESR2 | NM_001437.2 | 3222 | 6772 | 10322 | None |
| Broad GPP | TFORF3133 | TCF7 | NM_003202.4 | 3223 | 6773 | 10323 | None |
| Broad GPP | TFORF3134 | TFE3 | NM_006521.5 | 3224 | 6774 | 10324 | None |
| Broad GPP | TFORF3135 | NOTCH2 | NM_024408.3 | 3225 | 6775 | 10325 | None |
| Broad GPP | TFORF3136 | HEY1 | NM_012258.3 | 3226 | 6776 | 10326 | V5 |
| Broad GPP | TFORF3137 | HEY1 | NM_001040708.1 | 3227 | 6777 | 10327 | None |
| Broad GPP | TFORF3138 | PPARG | NM_138712.3 | 3228 | 6778 | 10328 | V5 |
| Broad GPP | TFORF3139 | PPARG | NM_015869.4 | 3229 | 6779 | 10329 | None |
| Broad GPP | TFORF3140 | ZNF718 | NM_001039127.5 | 3230 | 6780 | 10330 | V5 |
| Broad GPP | TFORF3141 | ALX3 | NM_006492.2 | 3231 | 6781 | 10331 | V5 |
| Broad GPP | TFORF3142 | CDX4 | NM_005193.1 | 3232 | 6782 | 10332 | V5 |
| Broad GPP | TFORF3143 | CTBP1 | NM_001012614.1 | 3233 | 6783 | 10333 | V5 |
| Broad GPP | TFORF3144 | MIER2 | NM_001346105.1 | 3234 | 6784 | 10334 | V5 |
| Broad GPP | TFORF3145 | ZNF660 | NM_173658.3 | 3235 | 6785 | 10335 | V5 |
| Broad GPP | TFORF3146 | HSF1 | NM_005526.3 | 3236 | 6786 | 10336 | V5 |
| Broad GPP | TFORF3147 | ZBTB43 | NM_014007.3 | 3237 | 6787 | 10337 | V5 |
| Broad GPP | TFORF3148 | NFE2 | NM_006163.2 | 3238 | 6788 | 10338 | V5 |
| Broad GPP | TFORF3149 | ZNF254 | NM_001278665.1 | 3239 | 6789 | 10339 | V5 |
| Broad GPP | TFORF3150 | ZNF254 | NM_203282.3 | 3240 | 6790 | 10340 | V5 |
| Broad GPP | TFORF3151 | ZNF230 | NM_006300.3 | 3241 | 6791 | 10341 | V5 |
| Broad GPP | TFORF3152 | ZFP3 | NM_153018.2 | 3242 | 6792 | 10342 | V5 |
| Broad GPP | TFORF3153 | ZFP2 | NM_030613.3 | 3243 | 6793 | 10343 | V5 |
| Broad GPP | TFORF3154 | ZFP2 | NM_030613.3 | 3244 | 6794 | 10344 | V5 |
| Broad GPP | TFORF3155 | HLX | NM_021958.3 | 3245 | 6795 | 10345 | V5 |
| Broad GPP | TFORF3156 | ETV5 | NM_004454.2 | 3246 | 6796 | 10346 | V5 |
| Broad GPP | TFORF3157 | SMARCD1 | NM_003076.4 | 3247 | 6797 | 10347 | V5 |
| Broad GPP | TFORF3158 | SMARCB1 | NM_001007468.2 | 3248 | 6798 | 10348 | V5 |
| Broad GPP | TFORF3159 | SMAD2 | NM_005901.5 | 3249 | 6799 | 10349 | V5 |
| Broad GPP | TFORF3160 | SNAI3 | NM_178310.3 | 3250 | 6800 | 10350 | V5 |
| Broad GPP | TFORF3161 | ZNF433 | NM_001308355.1 | 3251 | 6801 | 10351 | V5 |
| Broad GPP | TFORF3162 | ZNF253 | NM_001331134.1 | 3252 | 6802 | 10352 | V5 |
| Broad GPP | TFORF3163 | PPP1R13B | NM_015316.2 | 3253 | 6803 | 10353 | V5 |
| Broad GPP | TFORF3164 | RUVBL1 | NM_003707.2 | 3254 | 6804 | 10354 | V5 |
| Broad GPP | TFORF3165 | TRIM28 | NM_005762.2 | 3255 | 6805 | 10355 | V5 |
| Broad GPP | TFORF3166 | ZNF512B | NM_020713.2 | 3256 | 6806 | 10356 | V5 |
| Broad GPP | TFORF3167 | ZNF512B | NM_020713.2 | 3257 | 6807 | 10357 | V5 |
| Broad GPP | TFORF3168 | FOXM1 | NM_021953.3 | 3258 | 6808 | 10358 | V5 |
| Broad GPP | TFORF3169 | GTF21 | NM_001280800.1 | 3259 | 6809 | 10359 | V5 |
| Broad GPP | TFORF3170 | CNOT3 | NM_014516.3 | 3260 | 6810 | 10360 | V5 |
| Genewiz | TFORF3171 | PSMB4 | NM_002796.2 | 3261 | 6811 | 10361 | None |
| Broad GPP | TFORF3172 | STAT6 | NM_003153.4 | 3262 | 6812 | 10362 | V5 |
| Broad GPP | TFORF3173 | STAT6 | NM_003153.4 | 3263 | 6813 | 10363 | None |
| Broad GPP | TFORF3174 | ARIDSA | NM_001319094.1 | 3264 | 6814 | 10364 | V5 |
| Broad GPP | TFORF3175 | ILF3 | NM_001137673.1 | 3265 | 6815 | 10365 | V5 |
| Broad GPP | TFORF3176 | ZNF544 | NM_014480.3 | 3266 | 6816 | 10366 | V5 |
| Broad GPP | TFORF3177 | NR1D2 | NM_005126.4 | 3267 | 6817 | 10367 | None |
| Broad GPP | TFORF3178 | TFDP2 | NM_001178138.1 | 3268 | 6818 | 10368 | V5 |
| Broad GPP | TFORF3179 | LHX9 | NM_020204.2 | 3269 | 6819 | 10369 | V5 |
| Genewiz | TFORF3180 | RARG | NM_000966.5 | 3270 | 6820 | 10370 | None |
| Broad GPP | TFORF3181 | PATZ1 | NM_032051.1 | 3271 | 6821 | 10371 | V5 |
| Broad GPP | TFORF3182 | ZNF324B | NM_207395.2 | 3272 | 6822 | 10372 | V5 |
| Broad GPP | TFORF3183 | ZNF692 | NM_017865.3 | 3273 | 6823 | 10373 | V5 |
| Broad GPP | TFORF3184 | HSBP1 | NM_001537.3 | 3274 | 6824 | 10374 | V5 |
| Broad GPP | TFORF3185 | TOX2 | NM_032883.2 | 3275 | 6825 | 10375 | V5 |
| Broad GPP | TFORF3186 | GTF2H3 | NM_001516.4 | 3276 | 6826 | 10376 | V5 |
| Broad GPP | TFORF3187 | RAD21 | NM_006265.2 | 3277 | 6827 | 10377 | V5 |
| Broad GPP | TFORF3188 | ZNF394 | NM_032164.3 | 3278 | 6828 | 10378 | V5 |
| Broad GPP | TFORF3189 | ZNF558 | NM_144693.2 | 3279 | 6829 | 10379 | V5 |
| Broad GPP | TFORF3190 | ZNF554 | NM_001102651.1 | 3280 | 6830 | 10380 | V5 |
| Broad GPP | TFORF3191 | ZNF436 | NM_030634.2 | 3281 | 6831 | 10381 | V5 |
| Broad GPP | TFORF3192 | ERG | NM_182918.3 | 3282 | 6832 | 10382 | V5 |
| Broad GPP | TFORF3193 | DND1 | NM_194249.2 | 3283 | 6833 | 10383 | V5 |
| Broad GPP | TFORF3194 | TLX3 | NM_021025.3 | 3284 | 6834 | 10384 | V5 |
| Broad GPP | TFORF3195 | ONECUT1 | NM_004498.2 | 3285 | 6835 | 10385 | V5 |
| Broad GPP | TFORF3196 | ZIC1 | NM_003412.3 | 3286 | 6836 | 10386 | V5 |
| Broad GPP | TFORF3197 | STAT5A | NM_003152.3 | 3287 | 6837 | 10387 | V5 |
| Broad GPP | TFORF3198 | OVOL2 | NM_021220.3 | 3288 | 6838 | 10388 | V5 |
| Broad GPP | TFORF3199 | NFATC1 | NM_172390.2 | 3289 | 6839 | 10389 | V5 |
| Broad GPP | TFORF3200 | RUNX3 | NM_001031680.2 | 3290 | 6840 | 10390 | V5 |
| Broad GPP | TFORF3201 | ZNF829 | NM_001037232.3 | 3291 | 6841 | 10391 | V5 |
| Broad GPP | TFORF3202 | ZNF816 | NM_001202456.1 | 3292 | 6842 | 10392 | V5 |
| Broad GPP | TFORF3203 | ZNF526 | NM_133444.2 | 3293 | 6843 | 10393 | V5 |
| Broad GPP | TFORF3204 | LITAR | NM_004862.3 | 3294 | 6844 | 10394 | V5 |
| Broad GPP | TFORF3205 | FOXO3 | NM_201559.2 | 3295 | 6845 | 10395 | V5 |
| Broad GPP | TFORF3206 | TBR1 | NM_006593.3 | 3296 | 6846 | 10396 | V5 |
| Broad GPP | TFORF3207 | HMGN2 | NM_005517.3 | 3297 | 6847 | 10397 | V5 |
| Broad GPP | TFORF3208 | ZNF317 | NM_020933.4 | 3298 | 6848 | 10398 | V5 |
| Broad GPP | TFORF3209 | ZBTB9 | NM_152735.3 | 3299 | 6849 | 10399 | V5 |
| Broad GPP | TFORF3210 | VSX2 | NM_182894.2 | 3300 | 6850 | 10400 | V5 |
| Broad GPP | TFORF3211 | TADA2B | XM_011513595.1 | 3301 | 6851 | 10401 | V5 |
| Broad GPP | TFORF3212 | ZKSCAN1 | NM_001346581.1 | 3302 | 6852 | 10402 | V5 |
| Broad GPP | TFORF3213 | ZNF572 | NM_152412.2 | 3303 | 6853 | 10403 | V5 |
| Broad GPP | TFORF3214 | ZNF484 | NM_031486.2 | 3304 | 6854 | 10404 | V5 |
| Broad GPP | TFORF3215 | ZNF248 | NM_021045.2 | 3305 | 6855 | 10405 | V5 |
| Broad GPP | TFORF3216 | ATF2 | NM_001256094.1 | 3306 | 6856 | 10406 | V5 |
| Broad GPP | TFORF3217 | ZNF227 | NM_182490.2 | 3307 | 6857 | 10407 | V5 |
| Broad GPP | TFORF3218 | FOXN3 | NM_005197.3 | 3308 | 6858 | 10408 | V5 |
| Broad GPP | TFORF3219 | ZNF677 | NM_001317998.1 | 3309 | 6859 | 10409 | V5 |
| Broad GPP | TFORF3220 | ZNF449 | NM_152695.5 | 3310 | 6860 | 10410 | V5 |
| Broad GPP | TFORF3221 | ZNF770 | NM_014106.3 | 3311 | 6861 | 10411 | V5 |
| Broad GPP | TFORF3222 | FOXS1 | NM_004118.3 | 3312 | 6862 | 10412 | V5 |
| Broad GPP | TFORF3223 | ZMIZ2 | NM_001300959.1 | 3313 | 6863 | 10413 | V5 |
| Genewiz | TFORF3224 | HMGB1 | NM_002128.5 | 3314 | 6864 | 10414 | None |
| Broad GPP | TFORF3225 | ZNF285 | NM_152354.5 | 3315 | 6865 | 10415 | V5 |
| Broad GPP | TFORF3226 | FGF3 | NM_005247.2 | 3316 | 6866 | 10416 | V5 |
| Broad GPP | TFORF3227 | RPA2 | NM_002946.4 | 3317 | 6867 | 10417 | V5 |
| Broad GPP | TFORF3228 | MAX | NM_002382.4 | 3318 | 6868 | 10418 | V5 |
| Broad GPP | TFORF3229 | MAX | NM_145114.2 | 3319 | 6869 | 10419 | V5 |
| Broad GPP | TFORF3230 | FOXJ1 | NM_001454.3 | 3320 | 6870 | 10420 | V5 |
| Broad GPP | TFORF3231 | ZNF423 | NM_015069.4 | 3321 | 6871 | 10421 | V5 |
| Broad GPP | TFORF3232 | JUNB | NM_002229.2 | 3322 | 6872 | 10422 | V5 |
| Broad GPP | TFORF3233 | JUNB | NM_002229.2 | 3323 | 6873 | 10423 | V5 |
| Broad GPP | TFORF3234 | VSX1 | NM_014588.5 | 3324 | 6874 | 10424 | V5 |
| Broad GPP | TFORF3235 | ZNF320 | NM_001351776.1 | 3325 | 6875 | 10425 | V5 |
| Broad GPP | TFORF3236 | E2F8 | NM_024680.3 | 3326 | 6876 | 10426 | V5 |
| Broad GPP | TFORF3237 | SOX10 | NM_006941.3 | 3327 | 6877 | 10427 | V5 |
| Broad GPP | TFORF3238 | GTF2A1 | NM_015859.3 | 3328 | 6878 | 10428 | V5 |
| Broad GPP | TFORF3239 | HOXB5 | NM_002147.3 | 3329 | 6879 | 10429 | V5 |
| Broad GPP | TFORF3240 | POU2AF1 | NM_006235.2 | 3330 | 6880 | 10430 | V5 |
| Broad GPP | TFORF3241 | ZNF490 | NM_020714.2 | 3331 | 6881 | 10431 | V5 |
| Broad GPP | TFORF3242 | ZNF136 | NM_003437.4 | 3332 | 6882 | 10432 | V5 |
| Genewiz | TFORF3243 | ZNF267 | NM_003414.5 | 3333 | 6883 | 10433 | None |
| Broad GPP | TFORF3244 | ZNF483 | XM_017014339.1 | 3334 | 6884 | 10434 | V5 |
| Broad GPP | TFORF3245 | MAFG | NM_002359.3 | 3335 | 6885 | 10435 | V5 |
| Broad GPP | TFORF3246 | HOXC9 | NM_006897.2 | 3336 | 6886 | 10436 | V5 |
| Broad GPP | TFORF3247 | LEF1 | NM_016269.4 | 3337 | 6887 | 10437 | V5 |
| Broad GPP | TFORF3248 | ZNF311 | NM_001010877.3 | 3338 | 6888 | 10438 | V5 |
| Broad GPP | TFORF3249 | ZNF181 | NM_001029997.3 | 3339 | 6889 | 10439 | V5 |
| Broad GPP | TFORF3250 | ZKSCAN8 | NM_006298.3 | 3340 | 6890 | 10440 | V5 |
| Broad GPP | TFORF3251 | PFDN5 | NM_002624.3 | 3341 | 6891 | 10441 | V5 |
| Broad GPP | TFORF3252 | ZNF77 | NM_021217.2 | 3342 | 6892 | 10442 | V5 |
| Broad GPP | TFORF3253 | RBPJ | NM_203283.2 | 3343 | 6893 | 10443 | V5 |
| Genewiz | TFORF3254 | ETV6 | NM_001987.4 | 3344 | 6894 | 10444 | None |
| Broad GPP | TFORF3255 | ZNF175 | NM_007147.3 | 3345 | 6895 | 10445 | V5 |
| Broad GPP | TFORF3256 | ZNF189 | NM_001278231.1 | 3346 | 6896 | 10446 | V5 |
| Broad GPP | TFORF3257 | ZNF800 | NM_176814.4 | 3347 | 6897 | 10447 | V5 |
| Broad GPP | TFORF3258 | TAF12 | NM_005644.3 | 3348 | 6898 | 10448 | V5 |
| Genewiz | TFORF3259 | MEF2D | NM_005920.3 | 3349 | 6899 | 10449 | None |
| Broad GPP | TFORF3260 | ZNF524 | NM_153219.3 | 3350 | 6900 | 10450 | V5 |
| Broad GPP | TFORF3261 | OVOL1 | NM_004561.3 | 3351 | 6901 | 10451 | V5 |
| Broad GPP | TFORF3262 | CEBPE | NM_001805.3 | 3352 | 6902 | 10452 | V5 |
| Broad GPP | TFORF3263 | ZNF26 | NM_019591.3 | 3353 | 6903 | 10453 | V5 |
| Broad GPP | TFORF3264 | ARNTL2 | NM_001248003.1 | 3354 | 6904 | 10454 | V5 |
| Broad GPP | TFORF3265 | ARNTL2 | NM_001248004.1 | 3355 | 6905 | 10455 | V5 |
| Broad GPP | TFORF3266 | ZNF213 | NM_004220.2 | 3356 | 6906 | 10456 | V5 |
| Broad GPP | TFORF3267 | SNAPC2 | NM_003083.3 | 3357 | 6907 | 10457 | V5 |
| Broad GPP | TFORF3268 | ZNF34 | NM_001286769.1 | 3358 | 6908 | 10458 | V5 |
| Broad GPP | TFORF3269 | EZH1 | NM_001991.4 | 3359 | 6909 | 10459 | V5 |
| Broad GPP | TFORF3270 | ZNF138 | NM_001271649.1 | 3360 | 6910 | 10460 | V5 |
| Broad GPP | TFORF3271 | EBF3 | NM_001005463.2 | 3361 | 6911 | 10461 | V5 |
| Broad GPP | TFORF3272 | PRDM4 | NM_012406.3 | 3362 | 6912 | 10462 | V5 |
| Broad GPP | TFORF3273 | BBX | NM_001276286.1 | 3363 | 6913 | 10463 | V5 |
| Broad GPP | TFORF3274 | HMGA1 | NM_145899.2 | 3364 | 6914 | 10464 | V5 |
| Broad GPP | TFORF3275 | HMGA1 | NM_145905.2 | 3365 | 6915 | 10465 | V5 |
| Broad GPP | TFORF3276 | ZBTB14 | NM_001243702.1 | 3366 | 6916 | 10466 | V5 |
| Broad GPP | TFORF3277 | ZNF518A | NM_001278526.1 | 3367 | 6917 | 10467 | V5 |
| Broad GPP | TFORF3278 | MEOX1 | NM_004527.3 | 3368 | 6918 | 10468 | V5 |
| Broad GPP | TFORF3279 | LM01 | NM_002315.2 | 3369 | 6919 | 10469 | V5 |
| Broad GPP | TFORF3280 | DDB2 | NM_000107.2 | 3370 | 6920 | 10470 | V5 |
| Broad GPP | TFORF3281 | ZNF133 | NM_001352456.1 | 3371 | 6921 | 10471 | V5 |
| Broad GPP | TFORF3282 | BRCA1 | NM_007299.3 | 3372 | 6922 | 10472 | V5 |
| Broad GPP | TFORF3283 | HOXA5 | NM_019102.3 | 3373 | 6923 | 10473 | V5 |
| Broad GPP | TFORF3284 | PBX3 | XM_006717133.1 | 3374 | 6924 | 10474 | V5 |
| Broad GPP | TFORF3285 | FEZF1 | NM_001024613.3 | 3375 | 6925 | 10475 | V5 |
| Broad GPP | TFORF3286 | NR2F6 | NM_005234.3 | 3376 | 6926 | 10476 | V5 |
| Broad GPP | TFORF3287 | ZNF114 | NM_001331097.1 | 3377 | 6927 | 10477 | V5 |
| Broad GPP | TFORF3288 | HOXA9 | NM_152739.3 | 3378 | 6928 | 10478 | V5 |
| Genewiz | TFORF3289 | ZFY | NM_001145275.1 | 3379 | 6929 | 10479 | None |
| Broad GPP | TFORF3290 | CTCF | NM_006565.3 | 3380 | 6930 | 10480 | V5 |
| Broad GPP | TFORF3291 | CDK9 | NM_001261.3 | 3381 | 6931 | 10481 | V5 |
| Broad GPP | TFORF3292 | MXD3 | NM_031300.3 | 3382 | 6932 | 10482 | V5 |
| Broad GPP | TFORF3293 | ZNF781 | NM_152605.3 | 3383 | 6933 | 10483 | V5 |
| Broad GPP | TFORF3294 | ZNF784 | NM_203374.1 | 3384 | 6934 | 10484 | V5 |
| Broad GPP | TFORF3295 | SPDEF | NM_012391.2 | 3385 | 6935 | 10485 | V5 |
| Broad GPP | TFORF3296 | HIF1A | NM_001530.3 | 3386 | 6936 | 10486 | None |
| Broad GPP | TFORF3297 | HIF1A | NM_001530.3 | 3387 | 6937 | 10487 | None |
| Broad GPP | TFORF3298 | EZH2 | NM_004456.4 | 3388 | 6938 | 10488 | V5 |
| Broad GPP | TFORF3299 | MEIS2 | NM_001220482.1 | 3389 | 6939 | 10489 | V5 |
| Broad GPP | TFORF3300 | MEIS2 | NM_002399.3 | 3390 | 6940 | 10490 | V5 |
| Broad GPP | TFORF3301 | OLIG3 | NM_175747.2 | 3391 | 6941 | 10491 | V5 |
| Broad GPP | TFORF3302 | SPIC | NM_152323.2 | 3392 | 6942 | 10492 | V5 |
| Broad GPP | TFORF3303 | MITF | NM_198158.2 | 3393 | 6943 | 10493 | V5 |
| Broad GPP | TFORF3304 | MITF | NM_001184968.1 | 3394 | 6944 | 10494 | V5 |
| Broad GPP | TFORF3305 | ESR1 | NM_001122742.1 | 3395 | 6945 | 10495 | V5 |
| Broad GPP | TFORF3306 | THAP1 | NM_018105.2 | 3396 | 6946 | 10496 | V5 |
| Broad GPP | TFORF3307 | ZNF563 | NM_145276.2 | 3397 | 6947 | 10497 | V5 |
| Broad GPP | TFORF3308 | GTF2A1L | NM_006872.4 | 3398 | 6948 | 10498 | V5 |
| Broad GPP | TFORF3309 | DCP1A | NM_018403.6 | 3399 | 6949 | 10499 | V5 |
| Broad GPP | TFORF3310 | ZNF561 | NM_001330365.1 | 3400 | 6950 | 10500 | V5 |
| Broad GPP | TFORF3311 | CREB3 | NM_006368.4 | 3401 | 6951 | 10501 | V5 |
| Broad GPP | TFORF3312 | ELK4 | NM_021795.2 | 3402 | 6952 | 10502 | V5 |
| Broad GPP | TFORF3313 | ZBTB25 | NM_001304507.1 | 3403 | 6953 | 10503 | V5 |
| Broad GPP | TFORF3314 | SMAD9 | NM_005905.5 | 3404 | 6954 | 10504 | V5 |
| Broad GPP | TFORF3315 | ELF4 | NM_001127197.1 | 3405 | 6955 | 10505 | V5 |
| Broad GPP | TFORF3316 | MED21 | NM_004264.4 | 3406 | 6956 | 10506 | V5 |
| Broad GPP | TFORF3317 | ZNF75A | NM_153028.3 | 3407 | 6957 | 10507 | V5 |
| Broad GPP | TFORF3318 | TFCP2 | NM_005653.4 | 3408 | 6958 | 10508 | V5 |
| Broad GPP | TFORF3319 | ZSCAN5A | NM_001322070.1 | 3409 | 6959 | 10509 | V5 |
| Genewiz | TFORF3320 | HDX | NM_001177479.1 | 3410 | 6960 | 10510 | None |
| Broad GPP | TFORF3321 | PAZG4 | NM_006191.2 | 3411 | 6961 | 10511 | V5 |
| Broad GPP | TFORF3322 | ZBTB26 | NM_001304364.1 | 3412 | 6962 | 10512 | V5 |
| Broad GPP | TFORF3323 | ZNF626 | NM_145297.3 | 3413 | 6963 | 10513 | V5 |
| Broad GPP | TFORF3324 | XRCC6 | NM_001288976.1 | 3414 | 6964 | 10514 | V5 |
| Broad GPP | TFORF3325 | DLX3 | NM_005220.2 | 3415 | 6965 | 10515 | V5 |
| Broad GPP | TFORF3326 | ZNF512 | NM_001271287.1 | 3416 | 6966 | 10516 | V5 |
| Broad GPP | TFORF3327 | LHX6 | NM_001242334.1 | 3417 | 6967 | 10517 | V5 |
| Broad GPP | TFORF3328 | ZSCAN16 | NM_001320555.1 | 3418 | 6968 | 10518 | V5 |
| Broad GPP | TFORF3329 | TFAP4 | NM_003223.2 | 3419 | 6969 | 10519 | V5 |
| Broad GPP | TFORF3330 | TBX20 | NM_001166220.1 | 3420 | 6970 | 10520 | V5 |
| Broad GPP | TFORF3331 | PUF60 | NM_014281.4 | 3421 | 6971 | 10521 | V5 |
| Broad GPP | TFORF3332 | PUF60 | NM_001136033.2 | 3422 | 6972 | 10522 | V5 |
| Broad GPP | TFORF3333 | PUF60 | NM_001271100.1 | 3423 | 6973 | 10523 | V5 |
| Broad GPP | TFORF3334 | SP100 | NM_001206702.1 | 3424 | 6974 | 10524 | V5 |
| Broad GPP | TFORF3335 | ZBTB6 | NM_006626.5 | 3425 | 6975 | 10525 | V5 |
| Broad GPP | TFORF3336 | ZBTB37 | NM_032522.4 | 3426 | 6976 | 10526 | V5 |
| Broad GPP | TFORF3337 | HDAC1 | NM_004964.2 | 3427 | 6977 | 10527 | V5 |
| Broad GPP | TFORF3338 | HDAC1 | NM_004964.2 | 3428 | 6978 | 10528 | None |
| Broad GPP | TFORF3339 | HDAC3 | NM_003883.3 | 3429 | 6979 | 10529 | V5 |
| Broad GPP | TFORF3340 | HDAC3 | NM_003883.3 | 3430 | 6980 | 10530 | None |
| Broad GPP | TFORF3341 | HMX2 | NM_005519.1 | 3431 | 6981 | 10531 | V5 |
| Broad GPP | TFORF3342 | TP53BP2 | NM_005426.2 | 3432 | 6982 | 10532 | None |
| Genewiz | TFORF3343 | RARB | NM_000965.4 | 3433 | 6983 | 10533 | None |
| Broad GPP | TFORF3344 | ZNF280A | NM_080740.4 | 3434 | 6984 | 10534 | V5 |
| Broad GPP | TFORF3345 | LMO3 | NM_018640.4 | 3435 | 6985 | 10535 | V5 |
| Broad GPP | TFORF3346 | NHP2 | NM_017838.3 | 3436 | 6986 | 10536 | V5 |
| Broad GPP | TFORF3347 | PITX1 | NM_002653.4 | 3437 | 6987 | 10537 | V5 |
| Broad GPP | TFORF3348 | PITX2 | NM_000325.5 | 3438 | 6988 | 10538 | V5 |
| Broad GPP | TFORF3349 | ERCC8 | NM_001007234.2 | 3439 | 6989 | 10539 | V5 |
| Broad GPP | TFORF3350 | TBX15 | NM_152380.2 | 3440 | 6990 | 10540 | V5 |
| Broad GPP | TFORF3351 | ARNTL | NM_001178.5 | 3441 | 6991 | 10541 | V5 |
| Broad GPP | TFORF3352 | HESX1 | NM_003865.2 | 3442 | 6992 | 10542 | V5 |
| Broad GPP | TFORF3353 | ZNF32 | NM_006973.2 | 3443 | 6993 | 10543 | V5 |
| Broad GPP | TFORF3354 | MXD1 | NM_002357.3 | 3444 | 6994 | 10544 | V5 |
| Broad GPP | TFORF3355 | FOXN2 | NM_002158.3 | 3445 | 6995 | 10545 | V5 |
| Genewiz | TFORF3356 | NRF1 | NM_001293163.1 | 3446 | 6996 | 10546 | None |
| Broad GPP | TFORF3357 | ZNF131 | NM_001330717.1 | 3447 | 6997 | 10547 | V5 |
| Broad GPP | TFORF3358 | STAT3 | NM_139276.2 | 3448 | 6998 | 10548 | V5 |
| Broad GPP | TFORF3359 | ZNF263 | NM_005741.4 | 3449 | 6999 | 10549 | V5 |
| Broad GPP | TFORF3360 | HOXB13 | NM_006361.5 | 3450 | 7000 | 10550 | V5 |
| Genewiz | TFORF3361 | MSC | NM_005098.3 | 3451 | 7001 | 10551 | None |
| Broad GPP | TFORF3362 | MYOG | NM_002479.5 | 3452 | 7002 | 10552 | V5 |
| Broad GPP | TFORF3363 | NR5A1 | NM_004959.4 | 3453 | 7003 | 10553 | V5 |
| Broad GPP | TFORF3364 | ZNF232 | NM_001320954.1 | 3454 | 7004 | 10554 | V5 |
| Broad GPP | TFORF3365 | FOXA1 | NM_004496.3 | 3455 | 7005 | 10555 | V5 |
| Broad GPP | TFORF3366 | FOXA3 | NM_004497.2 | 3456 | 7006 | 10556 | V5 |
| Broad GPP | TFORF3367 | ZNF281 | NM_012482.4 | 3457 | 7007 | 10557 | V5 |
| Broad GPP | TFORF3368 | FOXR1 | NM_181721.2 | 3458 | 7008 | 10558 | V5 |
| Broad GPP | TFORF3369 | BLZF1 | NM_001320973.1 | 3459 | 7009 | 10559 | V5 |
| Broad GPP | TFORF3370 | MYBL1 | NM_001144755.2 | 3460 | 7010 | 10560 | V5 |
| Broad GPP | TFORF3371 | MYBL1 | NM_001294282.1 | 3461 | 7011 | 10561 | V5 |
| Broad GPP | TFORF3372 | DAXX | NM_001141969.1 | 3462 | 7012 | 10562 | V5 |
| Broad GPP | TFORF3373 | ZNF101 | NM_001300949.1 | 3463 | 7013 | 10563 | V5 |
| Broad GPP | TFORF3374 | VAX2 | NM_012476.2 | 3464 | 7014 | 10564 | V5 |
| Broad GPP | TFORF3375 | TGIF2 | NM_021809.6 | 3465 | 7015 | 10565 | V5 |
| Broad GPP | TFORF3376 | TOX | NM_014729.2 | 3466 | 7016 | 10566 | V5 |
| Broad GPP | TFORF3377 | ZBTB39 | NM_014830.2 | 3467 | 7017 | 10567 | V5 |
| Broad GPP | TFORF3378 | ZSCAN21 | NM_145914.2 | 3468 | 7018 | 10568 | V5 |
| Broad GPP | TFORF3379 | ACTL6A | NM_004301.4 | 3469 | 7019 | 10569 | V5 |
| Broad GPP | TFORF3380 | ZNF3 | NM_001278291.1 | 3470 | 7020 | 10570 | V5 |
| Broad GPP | TFORF3381 | HNRNPK | NM_002140.4 | 3471 | 7021 | 10571 | V5 |
| Broad GPP | TFORF3382 | ZNF140 | NM_003440.3 | 3472 | 7022 | 10572 | V5 |
| Broad GPP | TFORF3383 | NFKBID | NM_139239.2 | 3473 | 7023 | 10573 | V5 |
| Broad GPP | TFORF3384 | HOXC10 | NM_017409.3 | 3474 | 7024 | 10574 | V5 |
| Broad GPP | TFORF3385 | ZIC3 | NM_003413.3 | 3475 | 7025 | 10575 | V5 |
| Broad GPP | TFORF3386 | IRF4 | NM_002460.3 | 3476 | 7026 | 10576 | V5 |
| Broad GPP | TFORF3387 | ZNF586 | NM_001077426.2 | 3477 | 7027 | 10577 | V5 |
| Broad GPP | TFORF3388 | YEATS4 | NM_006530.3 | 3478 | 7028 | 10578 | V5 |
| Broad GPP | TFORF3389 | ZNF580 | NM_207115.1 | 3479 | 7029 | 10579 | V5 |
| Broad GPP | TFORF3390 | SMAD5 | NM_005903.6 | 3480 | 7030 | 10580 | V5 |
| Broad GPP | TFORF3391 | CNBP | NM_001127196.1 | 3481 | 7031 | 10581 | V5 |
| Broad GPP | TFORF3392 | CNBP | NM_001127196.1 | 3482 | 7032 | 10582 | V5 |
| Broad GPP | TFORF3393 | ZBTB24 | NM_001164313.1 | 3483 | 7033 | 10583 | V5 |
| Broad GPP | TFORF3394 | ZBTB24 | NM_014797.2 | 3484 | 7034 | 10584 | V5 |
| Broad GPP | TFORF3395 | TBX22 | NM_016954.2 | 3485 | 7035 | 10585 | V5 |
| Genewiz | TFORF3396 | TARBP2 | NM_134323.1 | 3486 | 7036 | 10586 | None |
| Broad GPP | TFORF3397 | ZIK1 | NM_001321147.1 | 3487 | 7037 | 10587 | V5 |
| Broad GPP | TFORF3398 | HLF | NM_002126.4 | 3488 | 7038 | 10588 | V5 |
| Broad GPP | TFORF3399 | POU2F2 | NM_001247994.1 | 3489 | 7039 | 10589 | V5 |
| Broad GPP | TFORF3400 | GMEB1 | NM_024482.2 | 3490 | 7040 | 10590 | V5 |
| Broad GPP | TFORF3401 | GTF2B | NM_001514.5 | 3491 | 7041 | 10591 | V5 |
| Broad GPP | TFORF3402 | HSFY2 | XM_017030031.1 | 3492 | 7042 | 10592 | V5 |
| Broad GPP | TFORF3403 | ZNF488 | NM_001346933.1 | 3493 | 7043 | 10593 | V5 |
| Broad GPP | TFORF3404 | ZNF511 | NM_145806.3 | 3494 | 7044 | 10594 | V5 |
| Broad GPP | TFORF3405 | KCNIP4 | NM_025221.5 | 3495 | 7045 | 10595 | V5 |
| Broad GPP | TFORF3406 | ELOF1 | NM_032377.3 | 3496 | 7046 | 10596 | V5 |
| Broad GPP | TFORF3407 | ZNF397 | NM_032347.2 | 3497 | 7047 | 10597 | V5 |
| Broad GPP | TFORF3408 | ZNF286A | NM_001288648.1 | 3498 | 7048 | 10598 | V5 |
| Broad GPP | TFORF3409 | ZNF621 | NM_001098414.2 | 3499 | 7049 | 10599 | V5 |
| Broad GPP | TFORF3410 | ZKSCAN4 | NM_019110.4 | 3500 | 7050 | 10600 | V5 |
| Broad GPP | TFORF3411 | CRTC2 | NM_181715.2 | 3501 | 7051 | 10601 | V5 |
| Broad GPP | TFORF3412 | EGR1 | NM_001964.2 | 3502 | 7052 | 10602 | V5 |
| Broad GPP | TFORF3413 | ZFP82 | NM_133466.3 | 3503 | 7053 | 10603 | V5 |
| Broad GPP | TFORF3414 | NEUROG1 | NM_006161.2 | 3504 | 7054 | 10604 | V5 |
| Broad GPP | TFORF3415 | NKRF | NM_001173488.1 | 3505 | 7055 | 10605 | V5 |
| Broad GPP | TFORF3416 | ZNF410 | NM_001242926.1 | 3506 | 7056 | 10606 | V5 |
| Broad GPP | TFORF3417 | TCF7L2 | NM_001146284.1 | 3507 | 7057 | 10607 | V5 |
| Broad GPP | TFORF3418 | NFE2L2 | NM_006164.4 | 3508 | 7058 | 10608 | V5 |
| Broad GPP | TFORF3419 | ZNF562 | NM_001130031.1 | 3509 | 7059 | 10609 | V5 |
| Broad GPP | TFORF3420 | SNAPC1 | NM_003082.3 | 3510 | 7060 | 10610 | V5 |
| Broad GPP | TFORF3421 | YBX2 | NM_015982.3 | 3511 | 7061 | 10611 | V5 |
| Broad GPP | TFORF3422 | HES6 | NM_018645.5 | 3512 | 7062 | 10612 | V5 |
| Broad GPP | TFORF3423 | ZNF345 | NM_003419.4 | 3513 | 7063 | 10613 | V5 |
| Broad GPP | TFORF3424 | ZNF57 | NM_173480.2 | 3514 | 7064 | 10614 | V5 |
| Broad GPP | TFORF3425 | ZNF559 | NM_032497.2 | 3515 | 7065 | 10615 | V5 |
| Broad GPP | TFORF3426 | ZNF350 | NM_021632.3 | 3516 | 7066 | 10616 | V5 |
| Broad GPP | TFORF3427 | NFIB | NM_005596.3 | 3517 | 7067 | 10617 | V5 |
| Broad GPP | TFORF3428 | TRIM27 | NM_006510.4 | 3518 | 7068 | 10618 | V5 |
| Broad GPP | TFORF3429 | ZNF302 | NM_001289186.1 | 3519 | 7069 | 10619 | V5 |
| Broad GPP | TFORF3430 | FXN | NM_000144.4 | 3520 | 7070 | 10620 | V5 |
| Broad GPP | TFORF3431 | NR3C2 | NM_000901.4 | 3521 | 7071 | 10621 | V5 |
| Broad GPP | TFORF3432 | NR3C1 | NM_000176.2 | 3522 | 7072 | 10622 | V5 |
| Broad GPP | TFORF3433 | DEK | NM_003472.3 | 3523 | 7073 | 10623 | V5 |
| Broad GPP | TFORF3434 | ZNF37A | NM_001178101.1 | 3524 | 7074 | 10624 | V5 |
| Broad GPP | TFORF3435 | SUPT5H | NM_003169.3 | 3525 | 7075 | 10625 | V5 |
| Broad GPP | TFORF3436 | TOX4 | NM_014828.3 | 3526 | 7076 | 10626 | V5 |
| Broad GPP | TFORF3437 | RBAK | NM_021163.3 | 3527 | 7077 | 10627 | V5 |
| Broad GPP | TFORF3438 | GCM1 | NM_003643.3 | 3528 | 7078 | 10628 | V5 |
| Broad GPP | TFORF3439 | FOXI1 | NM_144769.2 | 3529 | 7079 | 10629 | V5 |
| Broad GPP | TFORF3440 | ING1 | NM_198219.2 | 3530 | 7080 | 10630 | V5 |
| Broad GPP | TFORF3441 | MNAT1 | NM_002431.3 | 3531 | 7081 | 10631 | V5 |
| Broad GPP | TFORF3442 | ZNF177 | NM_003451.2 | 3532 | 7082 | 10632 | V5 |
| Broad GPP | TFORF3443 | SP4 | NM_003112.4 | 3533 | 7083 | 10633 | V5 |
| Broad GPP | TFORF3444 | KCNIP2 | NM_173192.2 | 3534 | 7084 | 10634 | V5 |
| Broad GPP | TFORF3445 | PTTG1 | NM_004219.3 | 3535 | 7085 | 10635 | V5 |
| Broad GPP | TFORF3446 | ZNF786 | NM_152411.3 | 3536 | 7086 | 10636 | V5 |
| Broad GPP | TFORF3447 | MYCBP | NM_012333.4 | 3537 | 7087 | 10637 | V5 |
| Broad GPP | TFORF3448 | TP63 | NM_003722.4 | 3538 | 7088 | 10638 | V5 |
| Broad GPP | TFORF3449 | DMRT1 | NM_021951.2 | 3539 | 7089 | 10639 | V5 |
| Broad GPP | TFORF3450 | ELK1 | NM_001114123.2 | 3540 | 7090 | 10640 | V5 |
| Broad GPP | TFORF3451 | ZNF366 | NM_152625.2 | 3541 | 7091 | 10641 | V5 |
| Broad GPP | TFORF3452 | ZNF460 | NM_006635.3 | 3542 | 7092 | 10642 | V5 |
| Broad GPP | TFORF3453 | PREB | NM_013388.5 | 3543 | 7093 | 10643 | V5 |
| Broad GPP | TFORF3454 | ZNF653 | NM_138783.3 | 3544 | 7094 | 10644 | V5 |
| Broad GPP | TFORF3455 | ZNF513 | NM_144631.5 | 3545 | 7095 | 10645 | V5 |
| Broad GPP | TFORF3456 | ZNF426 | NM_024106.2 | 3546 | 7096 | 10646 | V5 |
| Broad GPP | TFORF3457 | IRF9 | NM_006084.4 | 3547 | 7097 | 10647 | V5 |
| Broad GPP | TFORF3458 | ZNF556 | NM_001300843.1 | 3548 | 7098 | 10648 | V5 |
| Broad GPP | TFORF3459 | HMGB2 | NM_002129.3 | 3549 | 7099 | 10649 | V5 |
| Broad GPP | TFORF3460 | PSMB1 | NM_002793.3 | 3550 | 7100 | 10650 | V5 |
| Broad GPP | TFORF3461 | ETV1 | NM_004956.4 | 3551 | 7101 | 10651 | V5 |
| Broad GPP | TFORF3462 | BRPF1 | NM_001003694.1 | 3552 | 7102 | 10652 | V5 |
| Broad GPP | TFORF3463 | ETV7 | NM_016135.3 | 3553 | 7103 | 10653 | V5 |
| Broad GPP | TFORF3464 | KLF7 | NM_001270942.1 | 3554 | 7104 | 10654 | V5 |
| Broad GPP | TFORF3465 | ZBTB48 | NM_001278647.1 | 3555 | 7105 | 10655 | V5 |
| Broad GPP | TFORF3466 | SIM2 | NM_009586.4 | 3556 | 7106 | 10656 | V5 |
| Broad GPP | TFORF3467 | SUPT4H1 | NM_003168.2 | 3557 | 7107 | 10657 | V5 |
| Broad GPP | TFORF3468 | PKNOX1 | NM_004571.4 | 3558 | 7108 | 10658 | V5 |
| Broad GPP | TFORF3469 | ZNF438 | NM_182755.2 | 3559 | 7109 | 10659 | V5 |
| Broad GPP | TFORF3470 | ZNF726 | NM_001348689.1 | 3560 | 7110 | 10660 | V5 |
| Broad GPP | TFORF3471 | ZNF670 | NM_033213.4 | 3561 | 7111 | 10661 | V5 |
| Broad GPP | TFORF3472 | NFATC3 | NM_173165.2 | 3562 | 7112 | 10662 | V5 |
| Broad GPP | TFORF3473 | RUNX1 | NM_001754.4 | 3563 | 7113 | 10663 | V5 |
| Broad GPP | TFORF3474 | ZNF41 | NM_001324150.1 | 3564 | 7114 | 10664 | V5 |
| Broad GPP | TFORF3475 | IL18 | NM_001562.3 | 3565 | 7115 | 10665 | V5 |
| Broad GPP | TFORF3476 | SNAI1 | NM_005985.3 | 3566 | 7116 | 10666 | V5 |
| Broad GPP | TFORF3477 | POU5F1 | NM_002701.5 | 3567 | 7117 | 10667 | V5 |
| Broad GPP | TFORF3478 | FOXD4 | NM_207305.4 | 3568 | 7118 | 10668 | V5 |
| Broad GPP | TFORF3479 | ZNF132 | NM_003433.3 | 3569 | 7119 | 10669 | V5 |
| Broad GPP | TFORF3480 | ZNF785 | NM_152458.6 | 3570 | 7120 | 10670 | V5 |
| Broad GPP | TFORF3481 | ZNF597 | NM_152457.2 | 3571 | 7121 | 10671 | V5 |
| Broad GPP | TFORF3482 | SOX2 | NM_003106.3 | 3572 | 7122 | 10672 | V5 |
| Genewiz | TFORF3483 | PBX4 | NM_025245.2 | 3573 | 7123 | 10673 | None |
| Broad GPP | TFORF3484 | ZNF398 | NM_170686.2 | 3574 | 7124 | 10674 | V5 |
| Broad GPP | TFORF3485 | ATF2 | NM_001880.3 | 3575 | 7125 | 10675 | V5 |
| Broad GPP | TFORF3486 | PRDM1 | NM_182907.2 | 3576 | 7126 | 10676 | V5 |
| Broad GPP | TFORF3487 | NFATC1 | NM_172390.2 | 3577 | 7127 | 10677 | V5 |
| Broad GPP | TFORF3488 | ZNF169 | XM_017014364.1 | 3578 | 7128 | 10678 | V5 |
| Broad GPP | TFORF3489 | IKZF1 | NM_001291837.1 | 3579 | 7129 | 10679 | V5 |
| Broad GPP | TFORF3490 | TCF23 | NM_175769.2 | 3580 | 7130 | 10680 | V5 |
| Broad GPP | TFORF3491 | NR113 | NM_001077480.2 | 3581 | 7131 | 10681 | None |
| Broad GPP | TFORF3492 | RELB | NM_006509.3 | 3582 | 7132 | 10682 | V5 |
| Broad GPP | TFORF3493 | ZNF791 | NM_153358.2 | 3583 | 7133 | 10683 | V5 |
| Broad GPP | TFORF3494 | OSR2 | NM_053001.3 | 3584 | 7134 | 10684 | V5 |
| Broad GPP | TFORF3495 | CLOCK | NM_001267843.1 | 3585 | 7135 | 10685 | V5 |
| Broad GPP | TFORF3496 | REL | NM_001291746.1 | 3586 | 7136 | 10686 | V5 |
| Broad GPP | TFORF3497 | ZNF280C | NM_017666.4 | 3587 | 7137 | 10687 | V5 |
| Broad GPP | TFORF3498 | APEX1 | NM_001641.3 | 3588 | 7138 | 10688 | V5 |
| Broad GPP | TFORF3499 | RARA | NM_001145301.2 | 3589 | 7139 | 10689 | V5 |
| Broad GPP | TFORF3500 | BATF3 | NM_018664.2 | 3590 | 7140 | 10690 | V5 |
| Broad GPP | TFORF3501 | CERS6 | NM_001256126.1 | 3591 | 7141 | 10691 | V5 |
| Broad GPP | TFORF3502 | VENTX | NM_014468.3 | 3592 | 7142 | 10692 | V5 |
| Broad GPP | TFORF3503 | CDK7 | NM_001799.3 | 3593 | 7143 | 10693 | V5 |
| Broad GPP | TFORF3504 | ZNF543 | NM_213598.3 | 3594 | 7144 | 10694 | V5 |
| Broad GPP | TFORF3505 | KLF12 | NM_007249.4 | 3595 | 7145 | 10695 | V5 |
| Broad GPP | TFORF3506 | LCOR | NM_001170766.1 | 3596 | 7146 | 10696 | V5 |
| Broad GPP | TFORF3507 | NOCT | NM_012118.3 | 3597 | 7147 | 10697 | V5 |
| Broad GPP | TFORF3508 | ZNF134 | NM_003435.4 | 3598 | 7148 | 10698 | V5 |
| Broad GPP | TFORF3509 | GATAD2B | NM_020699.3 | 3599 | 7149 | 10699 | V5 |
| Broad GPP | TFORF3510 | TCF25 | NM_014972.2 | 3600 | 7150 | 10700 | V5 |
| Broad GPP | TFORF3511 | SOX14 | NM_004189.3 | 3601 | 7151 | 10701 | V5 |
| Broad GPP | TFORF3512 | SOX14 | NM_004189.3 | 3602 | 7152 | 10702 | V5 |
| Broad GPP | TFORF3513 | GLMP | NM_144580.2 | 3603 | 7153 | 10703 | V5 |
| Broad GPP | TFORF3514 | PURB | NM_033224.4 | 3604 | 7154 | 10704 | V5 |
| Broad GPP | TFORF3515 | HDGF | NM_004494.2 | 3605 | 7155 | 10705 | V5 |
| Broad GPP | TFORF3516 | RNF138 | NM_016271.4 | 3606 | 7156 | 10706 | V5 |
| Broad GPP | TFORF3517 | SOX12 | NM_006943.3 | 3607 | 7157 | 10707 | V5 |
| Broad GPP | TFORF3518 | NHLH2 | NM_001111061.1 | 3608 | 7158 | 10708 | V5 |
| Broad GPP | TFORF3519 | TCF4 | NM_003199.2 | 3609 | 7159 | 10709 | None |
| Broad GPP | TFORF3520 | TCF4 | NM_001083962.1 | 3610 | 7160 | 10710 | V5 |
| Broad GPP | TFORF3521 | THAP8 | NM_152658.2 | 3611 | 7161 | 10711 | V5 |
| Broad GPP | TFORF3522 | POU6F1 | XM_017019524.1 | 3612 | 7162 | 10712 | V5 |
| Broad GPP | TFORF3523 | ZNF473 | NM_015428.3 | 3613 | 7163 | 10713 | V5 |
| Broad GPP | TFORF3524 | MAEL | NM_032858.2 | 3614 | 7164 | 10714 | V5 |
| Broad GPP | TFORF3525 | THAP2 | NM_031435.3 | 3615 | 7165 | 10715 | V5 |
| Broad GPP | TFORF3526 | THAP12 | NM_004705.3 | 3616 | 7166 | 10716 | V5 |
| Broad GPP | TFORF3527 | ERF | NM_006494.3 | 3617 | 7167 | 10717 | V5 |
| Broad GPP | TFORF3528 | NME2 | NM_001018138.1 | 3618 | 7168 | 10718 | V5 |
| Broad GPP | TFORF3529 | VDR | NM_000376.2 | 3619 | 7169 | 10719 | V5 |
| Broad GPP | TFORF3530 | SSRP1 | NM_003146.2 | 3620 | 7170 | 10720 | V5 |
| Broad GPP | TFORF3531 | HMGN3 | NM_138730.2 | 3621 | 7171 | 10721 | V5 |
| Broad GPP | TFORF3532 | LIN28B | NM_001004317.3 | 3622 | 7172 | 10722 | V5 |
| Broad GPP | TFORF3533 | CDIP1 | NM_013399.2 | 3623 | 7173 | 10723 | None |
| Broad GPP | TFORF3534 | BORCS8- | NM_005919.3 | 3624 | 7174 | 10724 | V5 |
| | | MEF2B | | | | | |
| Broad GPP | TFORF3535 | MLLT10 | NM_001195627.1 | 3625 | 7175 | 10725 | V5 |
| Broad GPP | TFORF3536 | HOXD4 | NM_014621.2 | 3626 | 7176 | 10726 | V5 |
| Broad GPP | TFORF3537 | TSC22D4 | NM_001303043.1 | 3627 | 7177 | 10727 | V5 |
| Broad GPP | TFORF3538 | HOXD10 | NM_002148.3 | 3628 | 7178 | 10728 | V5 |
| Broad GPP | TFORF3539 | ZNF747 | NM_023931.3 | 3629 | 7179 | 10729 | V5 |
| Broad GPP | TFORF3540 | TAL2 | NM_005421.2 | 3630 | 7180 | 10730 | V5 |
| Broad GPP | TFORF3541 | THAP6 | NM_144721.5 | 3631 | 7181 | 10731 | V5 |
| Broad GPP | TFORF3542 | ZNF720 | NM_001130913.1 | 3632 | 7182 | 10732 | V5 |
| Broad GPP | TFORF3543 | CSDC2 | NM_014460.3 | 3633 | 7183 | 10733 | V5 |
| Broad GPP | TFORF3544 | NR2E1 | NM_003269.4 | 3634 | 7184 | 10734 | V5 |
| Broad GPP | TFORF3545 | PIAS1 | NM_016166.2 | 3635 | 7185 | 10735 | V5 |
| Broad GPP | TFORF3546 | TSC22D3 | NM_001015881.1 | 3636 | 7186 | 10736 | V5 |
| Broad GPP | TFORF3547 | CBFB | NM_001755.2 | 3637 | 7187 | 10737 | V5 |
| Broad GPP | TFORF3548 | THAP10 | NM_020147.3 | 3638 | 7188 | 10738 | V5 |
| Neither | TFORF3549 | GFP | — | 3639 | 7189 | 10739 | None |
| Neither | TFORF3550 | mCherry | — | 3640 | 7190 | 10740 | None |

TABLE 4
Transcription Factor Enrichment in Radial Glia by Flow-FISH

| | | | Fold |
|---|---|---|---|
| Gene | Refseq ID | ORF ID | enrichment |
| RFX4 | NM_001206691 | pORF0063 | 4.592962779 |
| NFIC | NM_005597 | pORF0048 | 4.456389351 |
| OTX1 | NM_014562 | pORF0051 | 4.101884122 |
| NOTCH2 | NM_024408 | pORF0088 | 3.943317106 |
| NFIC | NM_001245004 | pORF0049 | 3.902336252 |
| LHX2 | NM_004789 | pORF0037 | 3.184572774 |
| NFIB | NM_001190737 | pORF0047 | 2.992118862 |
| FOS | NM_005252 | pORF0021 | 2.819461324 |
| EOMES | NM_005442 | pORF0018 | 2.493885045 |
| NFIB | NM_005596 | pORF0046 | 2.118506211 |
| HES1 | NM_005524 | pORF0029 | 2.062443348 |
| SOX9 | NM_000346 | pORF0070 | 2.037365883 |
| BRIP1 | NM_032043 | pORF0083 | 1.983878329 |
| ZFP36L1 | NM_001244701 | pORF0082 | 1.732874565 |
| PAX6 | NM_001310159 | pORF0052 | 1.729014559 |
| SOX2 | NM_003106 | pORF0068 | 1.703600734 |
| MEIS1 | NM_002398 | pORF0040 | 1.63016496 |
| PAX6 | NM_000280 | pORF0053 | 1.621301866 |
| E2F7 | NM_203394 | pORF0011 | 1.445290255 |
| SOX1 | NM_005986 | pORF0066 | 1.414928718 |
| BCL11A | NM_022893 | pORF0004 | 1.366033006 |
| TCF12 | NM_207037 | pORF0075 | 1.338644735 |
| HELLS | NM_001289068 | pORF0027 | 1.314452769 |
| NOTCH1 | NM_017617 | pORF0087 | 1.282543236 |
| ASCL1 | NM_004316 | pORF0002 | 1.257269521 |
| ID4 | NM_001546 | pORF0034 | 1.242259505 |
| RFX2 | NM_000635 | pORF0062 | 1.156789924 |
| ID3 | NM_002167 | pORF0033 | 1.13013705 |
| FOXN4 | NM_213596 | pORF0025 | 1.118252693 |
| FANCD2 | NM_001018115 | pORF0085 | 1.105106279 |
| CXXC1 | NM_014593 | pORF0008 | 1.10158182 |
| RAD54L | NM_001142548 | pORF0059 | 1.100049356 |
| PLK4 | NM_001190801 | pORF0056 | 1.087864401 |
| MXD3 | NM_031300 | pORF0041 | 1.046651367 |
| SMARCC1 | NM_003074 | pORF0093 | 1.013071774 |
| CHAF1A | NM_005483 | pORF0084 | 0.987758678 |
| STAT3 | NM_213662 | pORF0073 | 0.982494628 |
| EMX2 | NM_004098 | pORF0015 | 0.980888997 |
| RFX4 | NM_032491 | pORF0064 | 0.97115811 |
| STAT3 | NM_003150 | pORF0072 | 0.940727106 |
| TEAD2 | NM_003598 | pORF0077 | 0.93305152 |
| RCOR2 | NM_173587 | pORF0060 | 0.92635635 |
| MYBL2 | NM_001278610 | pORF0043 | 0.921257809 |
| SSRP1 | NM_003146 | pORF0071 | 0.888548451 |
| TCF12 | NM_207038 | pORF0074 | 0.887183472 |
| HELLS | NM_001289073 | pORF0028 | 0.848309668 |
| CDK1 | NM_001786 | pORF0005 | 0.84539673 |
| HMGB1 | NM_002128 | pORF0030 | 0.82087272 |
| ENO1 | NM_001428 | pORF0017 | 0.810855094 |
| CENPA | NM_001042426 | pORF0007 | 0.800609156 |
| TRIM28 | NM_005762 | pORF0079 | 0.795174082 |
| H2AFX | NM_002105 | pORF0026 | 0.779428312 |
| EOMES | NM_001278183 | pORF0019 | 0.775123473 |
| ENO1 | NM_001201483 | pORF0016 | 0.752089926 |
| PLK4 | NM_001190799 | pORF0055 | 0.747675661 |
| TCF7L2 | NM_001146286 | pORF0076 | 0.7461346 |
| MXD3 | NM_001142935 | pORF0042 | 0.742008629 |
| YAP1 | NM_001195045 | pORF0081 | 0.733973908 |
| KLF15 | NM_014079 | pORF0036 | 0.724234171 |
| HMGB2 | NM_002129 | pORF0031 | 0.715645669 |
| MAZ | NM_001276275 | pORF0039 | 0.712224529 |
| SMAD1 | NM_001003688 | pORF0065 | 0.691823503 |
| PRMT7 | NM_001184824 | pORF0058 | 0.685275524 |
| E2F2 | NM_004091 | pORF0010 | 0.68015417 |
| GLI3 | NM_000168 | pORF0086 | 0.676437305 |
| PAX6 | NM_001310160 | pORF0054 | 0.670896717 |
| RFX2 | NM_134433 | pORF0061 | 0.662831174 |
| BCL11A | NM_138559 | pORF0003 | 0.653637098 |
| SOX11 | NM_003108 | pORF0067 | 0.648216511 |
| FOXG1 | NM_005249 | pORF0022 | 0.643117047 |
| POU3F2 | NM_005604 | pORF0057 | 0.638941761 |
| HOPX | NM_139212 | pORF0032 | 0.63780869 |
| UHRF1 | NM_001290052 | pORF0080 | 0.634190647 |
| TEAD2 | NM_001256662 | pORF0078 | 0.622268143 |
| CDK1 | NM_001170407 | pORF0006 | 0.618841246 |
| MAZ | NM_001276276 | pORF0038 | 0.601623712 |
| ARX | NM_139058 | pORF0001 | 0.599805685 |
| HES5 | NM_001010926 | pORF0094 | 0.599030362 |
| FOXM1 | NM_202003 | pORF0024 | 0.592181164 |
| EGR1 | NM_001964 | pORF0013 | 0.587722694 |
| E2F1 | NM_005225 | pORF0009 | 0.554009014 |
| EMX2 | NM_001165924 | pORF0014 | 0.54756126 |
| E2F8 | NM_001256372 | pORF0012 | 0.531116602 |
| NFATC4 | NM_001288802 | pORF0044 | 0.529705034 |
| NR1D1 | NM_021724 | pORF0050 | 0.518527509 |
| FOXM1 | NM_001243089 | pORF0023 | 0.50781922 |
| FEZF2 | NM_018008 | pORF0020 | 0.427110797 |
| NFATC4 | NM_001198966 | pORF0045 | 0.420447714 |
| INSM1 | NM_002196 | pORF0035 | 0.41826746 |
| SOX4 | NM_003107 | pORF0069 | 0.376315081 |

TABLE 5
Number of cells analyzed using single-cell RNA-seq in each
biorep of spontaneously differentiated cells. Number of
cells used in the analyses after filtering using Seurat.

| Condition | Number of cells |
|---|---|
| RFX4 S1 | 6,120 |
| RFX4 S2 | 7,109 |
| NFIB S1 | 6,343 |
| NFIB S2 | 7,935 |
| PAX6 S1 | 7,557 |
| PAX6 S1 | 6,417 |
| ASCL1 S1 | 6,652 |
| ASCL1 S2 | 4,231 |

TABLE 6
Cluster marker genes for each scRNA-seq dataset. (A) scRNA-seq data from 53,113 cells that have been
spontaneously differentiated from iNPs for 8 weeks. iNPs were derived using RFX4, NFIB, ASCL1, or PAX6
with n = biological replicates per TF. (B) UMAP clustering of scRNA-seq data from 42,780 iNPs derived
using three iNP differentiation methods. iNP differentiation methods included RFX4 overexpression with
dual SMAD inhibition (15,211 cells), embryoid body formation (11,148 cells), and dual SMAD inhibition
(16,421 cells). Data represents n = batch replicates per method. (C) UMAP clustering of scRNA-seq data from
26,111 cells that have been spontaneously differentiated from iNPs. iNPs were produced by combining RFX4
overexpression with dual SMAD inhibition and spontaneously differentiated for 4 or 8 weeks. Data represents
n = biological replicates per timepoint. For each dataset, the top 30 marker genes and associated p-values
for each cluster were identified using the scanpy.tl.rank_gene_groups function.
Table 6A

| Cluster 0 | Cluster 0 | Cluster 1 | Cluster 1 | Cluster 2 | Cluster 2 | Cluster 3 | Cluster 3 |
|---|---|---|---|---|---|---|---|
| Gene | P-value | Gene | P-value | Gene | P-value | Gene | P-value |
| DAPL1 | 0 | RPLP0 | 0 | SFRP2 | 0 | COL1A1 | 0 |
| SFRP2 | 0 | RPS3A | 0 | ARL4A | 0 | COL1A2 | 0 |
| PTH2 | 0 | EEF1A1 | 0 | PCDH9 | 0 | LGALS1 | 0 |
| CYP1B1 | 0 | RPL34 | 3.04E−302 | NR2F1 | 0 | COL3A1 | 0 |
| RAX | 0 | RPL26 | 2.91E−298 | RPL5 | 0 | MMP2 | 0 |
| HMX1 | 0 | RPL7 | 4.38E−269 | HSD17B2 | 0 | COL6A2 | 0 |
| CRABP1 | 0 | RPL35A | 4.26E−255 | DAPL1 | 0 | LUM | 0 |
| RPS7 | 0 | RPL21 | 3.17E−228 | RPS3A | 0 | FBLN1 | 0 |
| RPL7 | 0 | RPL31 | 6.96E−225 | CPE | 0 | COL9A3 | 0 |
| SPP1 | 0 | RPS17 | 3.04E−210 | PAX6 | 0 | RPL10 | 0 |
| SIX6 | 0 | RPS15A | 1.89E−203 | FLRT3 | 0 | SERPINH1 | 0 |
| NUDT4 | 0 | RPS6 | 1.50E−197 | HMX1 | 0 | TGFBI | 0 |
| DKK3 | 0 | RPS12 | 5.31E−191 | MAB21L1 | 0 | DCN | 0 |
| COL2A1 | 0 | RPL9 | 5.37E−189 | RPL35A | 0 | IGF2 | 0 |
| NAP1L1 | 0 | RPL6 | 1.37E−184 | ZFP36L2 | 0 | SPARC | 0 |
| MIAT | 0 | RPL5 | 2.29E−184 | EFNA5 | 0 | IGFBP4 | 0 |
| TRH | 0 | RPS24 | 1.12E−178 | RPS7 | 0 | COL5A2 | 0 |
| ZFP36L2 | 0 | RPL11 | 1.10E−172 | MT-ND2 | 0 | RPL28 | 0 |
| LMAN1 | 0 | RPL12 | 7.56E−153 | SIX6 | 0 | TPT1 | 0 |
| RAB31 | 0 | RPS13 | 4.55E−150 | TKT | 0 | MGP | 0 |
| RPS3A | 0 | RPL24 | 9.20E−149 | COL9A1 | 0 | IL11RA | 0 |
| TPPP3 | 0 | RPS8 | 8.46E−147 | RP4- | 0 | COL5A1 | 0 |
| | | | | 665J23.1 | | | |
| SOX2 | 0 | RPL32 | 5.53E−146 | RPL7 | 0 | TWIST1 | 0 |
| MAB21L1 | 0 | RPL30 | 6.38E−144 | RPL30 | 0 | IFITM3 | 0 |
| RPL30 | 0 | RPS25 | 5.76E−143 | RPL39 | 0 | CEBPD | 0 |
| MSI2 | 0 | RPL39 | 6.53E−139 | RPL9 | 0 | FTL | 0 |
| ALDH1A1 | 0 | RPS7 | 9.28E−139 | RPL34 | 0 | MFAP2 | 0 |
| LHX2 | 0 | RPLP1 | 1.98E−137 | QPRT | 0 | PCOLCE | 0 |
| PAX6 | 0 | RPS4X | 1.50E−136 | HSP90AB1 | 0 | COL6A1 | 0 |
| TTYH1 | 0 | RPL41 | 1.95E−135 | EIF3E | 0 | SELM | 0 |

| Cluster 4 | Cluster 4 | Cluster 5 | Cluster 5 | Cluster 6 | Cluster 6 | Cluster 7 | Cluster 7 |
|---|---|---|---|---|---|---|---|
| Gene | P-value | Gene | P-value | Gene | P-value | Gene | P-value |
| PMEL | 0 | LUM | 0 | TUBB2B | 0 | LGALS1 | 0 |
| GJA1 | 0 | MGP | 0 | TUBA1A | 0 | BGN | 0 |
| APOE | 0 | DCN | 0 | BASP1 | 0 | SPARC | 0 |
| SLC2A1 | 0 | COL1A1 | 0 | STMN2 | 0 | COL1A1 | 0 |
| ARL4A | 0 | COL1A2 | 0 | MLLT11 | 0 | TAGLN | 0 |
| HSD17B2 | 0 | COL3A1 | 0 | HN1 | 0 | COL1A2 | 0 |
| NKAIN4 | 0 | BGN | 0 | SOX4 | 0 | SERPINH1 | 0 |
| PAX6 | 0 | FBLN1 | 0 | DCX | 0 | COL3A1 | 0 |
| TRPM3 | 0 | PCOLCE | 0 | MAP1B | 0 | POSTN | 0 |
| ALDH1A1 | 0 | MMP2 | 0 | TUBB2A | 0 | TGFBI | 0 |
| TSC22D1 | 0 | EGFL6 | 0 | CRMP1 | 0 | RPL28 | 0 |
| TMEFF2 | 0 | LGALS1 | 0 | RAB3A | 0 | MGP | 0 |
| NPC2 | 0 | SPARC | 0 | STMN4 | 0 | CCDC80 | 0 |
| PTGDS | 0 | MFAP4 | 0 | BEX1 | 0 | NUPR1 | 0 |
| SDCBP | 0 | IGFBP4 | 0 | MARCKSL1 | 0 | IGFBP7 | 0 |
| MT-CYB | 0 | COL6A2 | 0 | MALAT1 | 0 | FHL2 | 0 |
| APLP2 | 0 | DKK2 | 0 | GAP43 | 0 | LUM | 0 |
| DCT | 0 | CRABP2 | 0 | TAGLN3 | 0 | MMP2 | 0 |
| LINC01474 | 0 | COL5A2 | 0 | GNG3 | 0 | RPL12 | 0 |
| SERPINF1 | 0 | SERPINH1 | 0 | TUBB | 0 | S100A11 | 0 |
| DCBLD2 | 0 | TPT1 | 0 | NSG1 | 0 | TPM1 | 0 |
| ELP4 | 0 | TCF4 | 0 | ELAVL3 | 0 | TPT1 | 0 |
| MT-CO3 | 0 | TGFBI | 0 | CD24 | 0 | DCN | 0 |
| MITF | 0 | CDC42EP5 | 0 | PCSK1N | 0 | ANXA2 | 0 |
| SNCA | 0 | ITM2C | 0 | STMN1 | 0 | PTRF | 0 |
| PCDH9 | 0 | FCGRT | 0 | APLP1 | 0 | SFRP4 | 0 |
| LMO4 | 0 | MFAP2 | 0 | TTC3 | 0 | NNMT | 0 |
| GAS1 | 0 | GLT8D2 | 0 | NREP | 0 | TPM2 | 0 |
| MT-CO2 | 0 | RPL10 | 0 | MIAT | 0 | PPIB | 0 |
| SPOCK1 | 0 | MXRA8 | 0 | VAMP2 | 0 | FN1 | 0 |

| Cluster 8 | Cluster 8 | Cluster 9 | Cluster 9 | Cluster 10 | Cluster 10 | Cluster 11 | Cluster 11 |
|---|---|---|---|---|---|---|---|
| Gene | P-value | Gene | P-value | Gene | P-value | Gene | P-value |
| HMGB2 | 0 | ARL4A | 0 | PTN | 0 | GPM6B | 0 |
| UBE2C | 0 | HSD17B2 | 0 | GPM6B | 0 | TTYH1 | 0 |
| TUBA1B | 0 | GJA1 | 0 | VIM | 0 | SOX2 | 0 |
| SMC4 | 0 | TSC22D1 | 0 | TUBA1A | 0 | CKB | 0 |
| BIRC5 | 0 | PAX6 | 0 | C1orf61 | 0 | TUBA1A | 0 |
| CKS1B | 0 | EFNA5 | 0 | CRYAB | 0 | ID4 | 0 |
| TOP2A | 0 | TRPM3 | 0 | B2M | 0 | VIM | 0 |
| NUSAP1 | 0 | NR2F1 | 0 | C1QL1 | 0 | FGFBP3 | 0 |
| PTTG1 | 0 | CFI | 0 | CD99 | 0 | PTN | 0 |
| H2AFZ | 0 | PCDH9 | 0 | CLU | 0 | TUBB2B | 0 |
| CENPF | 0 | PMEL | 0 | FEZ1 | 0 | C1orf61 | 0.00E+00 |
| AURKB | 0 | NKAIN4 | 0 | GFAP | 0 | PDLIM3 | 1.57E−305 |
| CKS2 | 0 | SFRP1 | 6.33E−305 | CNN3 | 7.08E−308 | NES | 2.54E−299 |
| UBE2T | 0 | CPE | 9.20E−296 | TUBB2B | 6.03E−306 | HES5 | 4.39E−290 |
| MAD2L1 | 0 | SNCA | 6.73E−290 | NGFRAP1 | 1.47E−301 | NTRK2 | 2.83E−261 |
| MKI67 | 0 | ZIC1 | 1.86E−289 | PCSK1N | 6.61E−299 | CD99 | 6.71E−260 |
| FAM64A | 0 | MAL | 4.13E−273 | S100B | 1.49E−280 | CXCR4 | 2.49E−257 |
| UBE2S | 0 | TKT | 1.68E−270 | PEA15 | 5.42E−277 | METRN | 1.70E−250 |
| CDK1 | 0 | SLC2A1 | 1.50E−264 | LYPD1 | 3.27E−271 | FEZ1 | 1.13E−243 |
| TUBB4B | 0 | COL9A1 | 6.97E−256 | ID3 | 1.38E−266 | MAP1B | 1.15E−240 |
| CCNA2 | 0 | MAB21L1 | 1.10E−249 | CFL1 | 2.09E−256 | CDKN1A | 1.70E−237 |
| PBK | 0 | ALDH1A1 | 1.64E−249 | LAPTM4B | 1.88E−254 | RPS27L | 1.99E−237 |
| NUCKS1 | 0 | APOE | 5.27E−245 | ID4 | 6.64E−253 | FDFT1 | 6.39E−232 |
| CDKN3 | 0 | NPC2 | 1.13E−240 | ACTB | 7.32E−253 | TUBB2A | 6.18E−223 |
| TPX2 | 0 | COL9A2 | 2.25E−234 | METRN | 9.33E−247 | EDNRB | 8.89E−219 |
| CCNB2 | 0 | ITM2B | 9.82E−216 | FHL1 | 4.13E−235 | LINC00461 | 5.05E−211 |
| PRC1 | 0 | RPL5 | 3.01E−214 | MYL6 | 2.88E−229 | ID3 | 1.58E−204 |
| GTSE1 | 0 | TMSB4X | 2.04E−207 | IFI6 | 8.71E−223 | DOK5 | 5.02E−203 |
| KPNA2 | 0 | ACTG1 | 4.12E−207 | FXYD6 | 4.07E−222 | PON2 | 1.44E−200 |
| TYMS | 0 | FAM84A | 2.93E−206 | TTYH1 | 3.24E−221 | NLRP1 | 2.01E−197 |

| Cluster 12 | Cluster 12 | Cluster 13 | Cluster 13 | Cluster 14 | Cluster 14 | Cluster 15 | Cluster 15 |
|---|---|---|---|---|---|---|---|
| Gene | P-value | Gene | P-value | Gene | P-value | Gene | P-value |
| OSR2 | 0 | TUBA1B | 0 | MIAT | 0 | S100A11 | 0 |
| FBLN1 | 0 | UBE2C | 0 | RBP1 | 0 | KRT19 | 0 |
| COL3A1 | 0 | HMGB2 | 0 | MAP1B | 0 | KRT17 | 0 |
| TGFBI | 0 | PTTG1 | 0 | STMN2 | 0 | S100A10 | 0 |
| COL1A1 | 0 | HMGB1 | 0 | PCBP4 | 0 | HSPB1 | 0 |
| ALX1 | 0 | H2AFZ | 0 | MLLT11 | 0 | S100A14 | 0 |
| ITM2A | 0 | CKS1B | 0 | TUBA1A | 0 | KRT8 | 4.83E−282 |
| NBL1 | 0 | BIRC5 | 0 | TAGLN3 | 0 | PERP | 5.42E−246 |
| RPL15 | 0 | TUBB | 0 | SH3BGRL3 | 0 | KRT18 | 7.28E−245 |
| COL1A2 | 0 | STMN1 | 1.08E−267 | FAM57B | 0 | PDLIM1 | 5.00E−239 |
| LGALS1 | 0 | HMGN2 | 6.15E−265 | CRABP1 | 0 | FTH1 | 1.49E−204 |
| POSTN | 0 | TOP2A | 1.88E−264 | DCX | 0 | IGFBP6 | 8.69E−185 |
| IGFBP6 | 0 | KIAA0101 | 9.88E−260 | BASP1 | 0 | ANXA1 | 2.78E−163 |
| RPLP1 | 0 | CKS2 | 1.00E−259 | TUBB2B | 0 | ANXA2 | 1.13E−160 |
| IGFBP5 | 0 | NUSAP1 | 3.17E−248 | TRH | 0 | RPS18 | 2.19E−150 |
| RPL10 | 0 | AURKB | 2.42E−242 | CRMP1 | 0 | CXCL14 | 1.01E−147 |
| IGF2 | 0 | SMC4 | 7.31E−242 | PPP1R1A | 0 | RPS6 | 2.20E−143 |
| MFAP4 | 0 | CDK1 | 4.67E−241 | STMN1 | 0 | RPL12 | 3.64E−138 |
| DCN | 0 | CDKN3 | 2.62E−226 | ETFB | 0 | S100A16 | 3.63E−132 |
| MMP2 | 0 | TYMS | 2.22E−223 | MALAT1 | 0 | FXYD3 | 6.65E−132 |
| FOXL2 | 0 | UBE2S | 4.95E−223 | CKB | 0 | RAB25 | 1.32E−121 |
| RPL13A | 0 | MAD2L1 | 3.78E−215 | RAB3A | 0 | SAT1 | 7.84E−115 |
| TCF4 | 0 | UBE2T | 8.57E−211 | SNCG | 0 | RPL27A | 3.72E−114 |
| KCNQ1OT1 | 0 | KPNA2 | 1.90E−205 | SCG3 | 0 | RPL35 | 1.58E−111 |
| RPL27A | 0 | CCNA2 | 6.60E−203 | HN1 | 0 | ARPC2 | 8.16E−110 |
| CRABP2 | 0 | CENPF | 3.39E−194 | ELAVL3 | 0 | RPL41 | 2.02E−109 |
| TWIST1 | 0 | CCNB1 | 5.36E−193 | ENO2 | 0 | RPL29 | 2.25E−105 |
| MFAP2 | 0 | CCNB2 | 1.58E−188 | CD24 | 0 | RPLP1 | 1.43E−98 |
| PLAC9 | 0 | CENPW | 4.72E−184 | SOX11 | 0 | RPL34 | 7.41E−97 |
| NFIB | 0 | TUBB4B | 1.54E−183 | RORB | 0 | GAPDH | 2.69E−96 |

| Cluster 16 | Cluster 16 | Cluster 17 | Cluster 17 | Cluster 18 | Cluster 18 | Cluster 19 | Cluster 19 |
|---|---|---|---|---|---|---|---|
| Gene | P-value | Gene | P-value | Gene | P-value | Gene | P-value |
| TUBA1A | 0 | SFRP2 | 0 | PMEL | 0 | ERICH5 | 0 |
| STMN2 | 0 | GINS2 | 1.88E−281 | DCT | 0 | ALDH1A1 | 0 |
| TUBB2B | 0 | PCNA | 2.81E−270 | SERPINF1 | 0 | DCBLD2 | 0 |
| TUBB | 5.11E−157 | DAPL1 | 1.20E−264 | APOE | 0 | NKAIN4 | 2.01E−295 |
| MLLT11 | 3.56E−149 | DEK | 4.50E−250 | TMEM98 | 0 | FLRT3 | 1.41E−289 |
| TMSB10 | 6.07E−136 | PTH2 | 2.33E−223 | IGFBP7 | 0 | TKT | 3.99E−282 |
| STMN4 | 1.89E−135 | CYP1B1 | 6.89E−217 | ELN | 0 | APLP2 | 7.30E−279 |
| RTN1 | 1.03E−124 | CRABP1 | 1.24E−216 | TRPM3 | 0 | PAX6 | 3.06E−276 |
| TUBB2A | 4.22E−118 | NASP | 5.96E−213 | TYRP1 | 0 | PTGDS | 9.54E−275 |
| STMN1 | 1.17E−114 | MCM7 | 2.47E−210 | SLC2A1 | 0 | PSAT1 | 1.52E−271 |
| HN1 | 1.19E−105 | CDT1 | 1.73E−203 | MITF | 0 | PCDH9 | 1.19E−269 |
| GAP43 | 3.26E−99 | TYMS | 1.26E−201 | TRPM1 | 0 | SLC2A1 | 5.34E−269 |
| BASP1 | 4.27E−90 | RAX | 8.66E−198 | ATP1B1 | 0 | RPS4X | 1.91E−234 |
| CALM2 | 1.77E−82 | SIX6 | 2.28E−196 | NPC2 | 0 | MAB21L1 | 2.55E−220 |
| MARCKSL1 | 3.50E−78 | MCM3 | 7.50E−195 | GJA1 | 0 | LINC01474 | 4.28E−219 |
| MAP1B | 6.17E−66 | H2AFZ | 3.33E−194 | IGFBP5 | 0 | CP | 9.14E−215 |
| SOX4 | 9.60E−66 | COL2A1 | 1.32E−192 | ATP6V1C2 | 0 | RELN | 5.49E−192 |
| BEX1 | 2.27E−60 | DUT | 1.41E−192 | VIM | 0 | TXNIP | 4.58E−180 |
| UCHL1 | 3.60E−58 | HMX1 | 1.25E−186 | HSD17B2 | 9.42E−305 | RPL7 | 1.08E−179 |
| NSG1 | 9.24E−55 | HMGB2 | 1.29E−185 | TSPAN10 | 3.98E−297 | SPOCK1 | 3.98E−177 |
| CRMP1 | 3.10E−53 | KIAA0101 | 6.96E−184 | GSTP1 | 4.24E−287 | SFRP2 | 6.87E−177 |
| RAB3A | 1.80E−52 | NAP1L1 | 5.36E−178 | PTGDS | 7.15E−281 | ARL4A | 1.46E−173 |
| GNG3 | 3.20E−49 | DKK3 | 7.08E−173 | TYR | 7.95E−280 | DAPL1 | 3.42E−169 |
| CCNI | 1.73E−47 | E2F1 | 2.40E−172 | CSTB | 2.14E−259 | RPS12 | 3.43E−169 |
| CD24 | 2.33E−47 | CCND1 | 6.56E−170 | OTX2 | 3.19E−259 | SIX3 | 2.58E−165 |
| DCX | 4.05E−44 | PSIP1 | 1.89E−164 | CTSH | 1.62E−255 | PCP4 | 2.85E−165 |
| PCSK1N | 3.30E−40 | HELLS | 2.46E−161 | ITM2C | 1.93E−246 | RPL5 | 1.11E−162 |
| HMP19 | 5.27E−38 | CENPH | 4.52E−161 | TMEM176A | 4.19E−238 | HSD17B2 | 6.04E−162 |
| CFL1 | 1.10E−37 | TUBA1B | 3.30E−159 | MT-ND4 | 4.77E−236 | PDGFRA | 1.76E−159 |
| H3F3B | 1.74E−34 | FEN1 | 4.13E−154 | TIMP3 | 1.72E−228 | TSC22D1 | 3.55E−154 |

| Cluster 20 | Cluster 20 | Cluster 21 | Cluster 21 | Cluster 22 | Cluster 22 | Cluster 23 | Cluster 23 |
|---|---|---|---|---|---|---|---|
| Gene | P-value | Gene | P-value | Gene | P-value | Gene | P-value |
| DDIT3 | 3.21E−254 | TPPP3 | 0 | S100A14 | 0 | MT1X | 0 |
| TCEA1 | 2.19E−231 | SFRP2 | 1.33E−202 | KRT17 | 0 | MT2A | 0 |
| HMGA1 | 6.97E−231 | HMX1 | 3.81E−190 | KRT19 | 0 | MT1E | 8.96E−263 |
| HSPA9 | 3.79E−211 | UBB | 5.80E−183 | PERP | 0 | MT1F | 2.65E−239 |
| GDF15 | 1.08E−188 | H3F3A | 4.09E−177 | IGFBP6 | 0 | MT1G | 6.85E−114 |
| SLC3A2 | 3.26E−182 | DAPL1 | 1.77E−172 | S100A11 | 0 | ENO1 | 1.68E−52 |
| BBC3 | 7.93E−179 | DYNLL1 | 8.09E−170 | HSPB1 | 0 | RPL39 | 1.15E−47 |
| DDIT4 | 1.02E−165 | TMSB15A | 6.10E−165 | PDLIM1 | 0 | RPL37A | 4.51E−46 |
| APOE | 6.32E−158 | MEST | 8.43E−163 | WNT6 | 0 | RPS29 | 1.23E−44 |
| POU5F1 | 9.46E−157 | CKB | 1.82E−161 | AQP3 | 0 | RPS27 | 2.86E−41 |
| PMAIP1 | 2.08E−153 | HNRNPA1 | 3.72E−158 | S100A10 | 0 | RPL36 | 8.97E−41 |
| SQSTM1 | 3.72E−150 | PTH2 | 8.61E−153 | KRT8 | 0 | PTH2 | 1.29E−38 |
| UPP1 | 4.18E−149 | CRABP1 | 1.79E−151 | FXYD3 | 0 | DAPL1 | 1.66E−37 |
| MTHFD2 | 2.12E−141 | HNRNPA2B1 | 7.40E−151 | CLDN6 | 0 | RPL38 | 6.70E−36 |
| PLA2G16 | 4.68E−135 | SIX6 | 2.56E−147 | S100A16 | 0 | RPS21 | 3.96E−35 |
| EPCAM | 1.43E−133 | CCNA1 | 1.12E−142 | ARPC2 | 0 | BNIP3 | 6.25E−30 |
| EIF2S2 | 1.60E−112 | CYP1B1 | 2.69E−138 | KRT15 | 0 | RPL34 | 8.16E−30 |
| HSPD1 | 4.42E−111 | TECR | 7.71E−137 | ANXA1 | 0 | RPS15 | 3.60E−28 |
| FTL | 2.11E−110 | PTMS | 1.55E−136 | CLDN4 | 0 | PGK1 | 6.95E−28 |
| AARS | 1.90E−106 | RAX | 9.68E−136 | RAB25 | 0 | NR2F1 | 7.50E−26 |
| HSPA5 | 1.37E−105 | HMGN3 | 2.73E−135 | BCAM | 0 | MIF | 8.53E−26 |
| SARS | 1.98E−103 | ALDH1A1 | 6.79E−134 | HOTAIRM1 | 0 | ALDOA | 2.36E−25 |
| ATF4 | 4.89E−100 | TEKT2 | 4.76E−125 | SFN | 0 | SOX2 | 5.35E−25 |
| PRDX1 | 3.32E−99 | METRN | 9.18E−124 | SPINT1 | 0 | NUDT4 | 2.46E−24 |
| BBS9 | 2.81E−95 | WDR54 | 8.42E−121 | KRT18 | 0.00E+00 | CKB | 4.55E−23 |
| HSP90AA1 | 3.90E−95 | RBMX | 8.38E−118 | SVIL | 6.56E−303 | RPS7 | 4.57E−22 |
| MID1IP1 | 3.26E−93 | CCDC34 | 4.09E−115 | SNCG | 9.02E−292 | RPS15A | 1.53E−21 |
| ATF3 | 2.17E−90 | PTMA | 5.28E−115 | SPINT2 | 1.36E−291 | RPL35A | 3.86E−20 |
| GARS | 1.34E−86 | PTTG1 | 1.85E−114 | TMEM40 | 2.06E−291 | COL2A1 | 4.68E−20 |
| YARS | 4.07E−86 | PEBP1 | 1.51E−112 | EPCAM | 5.76E−285 | RPL7 | 6.30E−20 |

| Cluster 24 | Cluster 24 | Cluster 25 | Cluster 25 | Cluster 26 | Cluster 26 |
|---|---|---|---|---|---|
| Gene | P-value | Gene | P-value | Gene | P-value |
| KRT18 | 0 | PCBP4 | 0 | TTR | 1.87E−199 |
| CLDN4 | 0 | FAM57B | 0 | WLS | 2.66E−158 |
| KRT8 | 0 | NEUROD1 | 0 | CDO1 | 1.23E−148 |
| GABRP | 0 | PDC | 0 | RSPO2 | 1.04E−145 |
| ANXA1 | 0 | 4-Sep | 0 | TPBG | 1.30E−136 |
| KRT19 | 0 | C8orf46 | 0 | CNTNAP2 | 1.92E−135 |
| CLDN7 | 0 | ENO2 | 7.66E−305 | PCP4 | 2.04E−130 |
| S100A11 | 0 | GADD45G | 5.51E−303 | MEST | 3.07E−117 |
| RAB25 | 0 | GNB3 | 1.85E−297 | LYPD1 | 5.34E−106 |
| GPRC5A | 0 | OTX2 | 1.41E−294 | CA2 | 3.57E−105 |
| SPINT1 | 0 | MIR7-3HG | 3.42E−274 | CXCL14 | 5.28E−102 |
| RHOV | 0 | TUBB4B | 6.87E−274 | CYSTM1 | 1.80E−93 |
| S100A10 | 0 | STMN2 | 4.08E−268 | BNIP3 | 1.10E−89 |
| VAMP8 | 0 | SSTR2 | 7.86E−248 | OTX2 | 3.17E−82 |
| ARHGAP29 | 0 | MAP1B | 1.11E−244 | GPC3 | 6.17E−82 |
| CD9 | 0 | THRB | 4.88E−243 | MPC1 | 1.39E−81 |
| ANXA2 | 0 | HES6 | 3.69E−240 | IGFBP2 | 1.04E−80 |
| PERP | 0 | RCVRN | 7.44E−234 | SDC2 | 9.37E−79 |
| CD24 | 0 | GUK1 | 1.28E−233 | RHBDD2 | 6.28E−72 |
| MAL2 | 0 | TPI1 | 6.14E−229 | EMC2 | 5.45E−71 |
| EPCAM | 0 | C11orf96 | 1.14E−226 | SOX2 | 5.90E−71 |
| ATF3 | 0 | H3F3B | 1.18E−226 | MLF1 | 6.49E−70 |
| ELF3 | 0 | DLL3 | 1.18E−225 | PIFO | 2.09E−69 |
| SAT1 | 0 | NEUROD4 | 3.44E−224 | IFI27L1 | 5.87E−69 |
| KLF6 | 0 | CKB | 7.38E−210 | ALDOA | 1.57E−66 |
| ETHE1 | 0 | SCG3 | 7.91E−209 | HSBP1 | 6.25E−66 |
| HSPB1 | 0 | DCT | 1.03E−204 | SEPW1 | 7.56E−66 |
| LGALS3 | 0 | SPCS1 | 5.49E−204 | NRN1 | 2.75E−65 |
| TNFRSF12A | 0 | BSG | 1.03E−203 | LHFP | 6.11E−64 |
| LSR | 0 | NRN1 | 2.62E−202 | GGH | 1.23E−62 |

| Cluster 27 | Cluster 27 | Cluster 28 | Cluster 28 | Cluster 29 | Cluster 29 |
|---|---|---|---|---|---|
| Gene | P-value | Gene | P-value | Gene | P-value |
| IGF2 | 1.70E−235 | FABP7 | 2.38E−258 | MAP1B | 1.11E−243 |
| SPARC | 1.79E−224 | C1orf61 | 2.40E−256 | MLLT11 | 1.39E−241 |
| DLK1 | 1.71E−223 | LINC01551 | 3.00E−225 | TUBA1A | 1.86E−240 |
| COL3A1 | 8.74E−212 | SOX2 | 4.25E−173 | TUBB2B | 7.99E−237 |
| IGFBP3 | 1.09E−211 | CKB | 7.91E−172 | BASP1 | 6.75E−235 |
| DCN | 2.08E−199 | TTYH1 | 1.83E−170 | STMN2 | 3.81E−227 |
| IFITM3 | 1.77E−196 | ID4 | 6.45E−166 | HN1 | 9.57E−227 |
| COL1A1 | 3.72E−192 | VIM | 2.87E−143 | DCX | 2.03E−220 |
| COL6A2 | 3.87E−183 | GPM6B | 3.86E−120 | RTN1 | 1.17E−219 |
| LUM | 3.72E−172 | HES5 | 7.14E−117 | RAB3A | 6.71E−215 |
| FMOD | 5.93E−157 | METRN | 2.28E−116 | CRMP1 | 5.04E−213 |
| FN1 | 5.44E−152 | HOPX | 6.09E−110 | TUBB2A | 1.59E−211 |
| TIMP1 | 7.14E−152 | PTN | 6.77E−105 | STMN4 | 8.64E−201 |
| TGFBI | 3.49E−144 | YBX1 | 3.17E−103 | GAP43 | 4.17E−196 |
| COL5A1 | 1.49E−143 | DOK5 | 2.77E−101 | CNTNAP2 | 3.28E−187 |
| COL1A2 | 1.18E−141 | IGFBP2 | 1.18E−98 | TUBB | 8.48E−184 |
| COL6A1 | 5.44E−138 | TUBB2B | 4.53E−98 | OLFM1 | 1.86E−176 |
| KDELR2 | 7.74E−137 | TMEM161B- | 7.28E−96 | BEX1 | 2.70E−173 |
| | | AS1 | | | |
| PITX1 | 6.70E−135 | GPC3 | 1.69E−88 | MARCKSL1 | 2.96E−172 |
| SERPINH1 | 3.58E−134 | MAP1B | 4.39E−77 | STMN1 | 2.29E−169 |
| BST2 | 2.61E−121 | FZD3 | 4.10E−75 | SOX4 | 1.14E−162 |
| MFAP4 | 1.16E−120 | SYNE2 | 2.40E−73 | KIF5C | 9.67E−161 |
| LMCD1 | 1.55E−119 | TUBA1A | 4.94E−73 | ELAVL4 | 9.70E−161 |
| COL6A3 | 5.79E−119 | SOX3 | 5.39E−66 | HMP19 | 1.42E−155 |
| FTL | 2.79E−113 | SMS | 1.77E−65 | UCHL1 | 1.56E−155 |
| S100A10 | 2.74E−112 | FABP5 | 6.06E−65 | NSG1 | 3.74E−154 |
| COL15A1 | 1.30E−111 | SRI | 2.99E−63 | TERF2IP | 4.55E−152 |
| FXYD5 | 3.36E−110 | PTPRZ1 | 3.52E−62 | CAMK2N1 | 8.96E−152 |
| FKBP10 | 1.24E−108 | FXYD6 | 1.91E−61 | TAGLN3 | 9.34E−149 |
| LGALS1 | 8.71E−103 | FOXG1 | 9.53E−61 | ENO2 | 2.82E−148 |

| Cluster 30 | Cluster 30 | Cluster 31 | Cluster 31 | Cluster 32 | Cluster 32 |
|---|---|---|---|---|---|
| Gene | P-value | Gene | P-value | Gene | P-value |
| HMX1 | 1.16E−97 | CRYAB | 1.96E−110 | PTPRS | 1.50E−13 |
| PTH2 | 1.94E−90 | CRYBB3 | 3.61E−101 | RPL7 | 6.55E−12 |
| RAX | 4.60E−85 | LIM2 | 6.45E−97 | RPL21 | 8.75E−10 |
| COL2A1 | 1.06E−83 | CRYBB2 | 7.37E−91 | RPS15 | 2.20E−09 |
| RPS7 | 1.23E−78 | S100A4 | 1.44E−62 | RPS2 | 3.76E−09 |
| DAPL1 | 1.43E−76 | TRPM3 | 2.08E−60 | SOX11 | 4.70E−09 |
| TRH | 7.55E−76 | CRYBB1 | 2.31E−59 | RPL11 | 5.77E−09 |
| CYP1B1 | 9.96E−74 | CRYBA1 | 4.41E−59 | CTNNB1 | 7.17E−09 |
| MSI2 | 1.17E−73 | PROX1 | 2.32E−54 | RPS3A | 7.78E−09 |
| NUDT4 | 4.49E−71 | TP53I3 | 3.31E−52 | RPS15A | 8.21E−09 |
| RPL7 | 1.96E−67 | PITX3 | 4.02E−48 | LRRC75A | 1.20E−08 |
| MIAT | 4.35E−66 | FABP5 | 2.11E−47 | RPL34 | 1.62E−08 |
| RPL39 | 4.82E−66 | SERPINB6 | 1.49E−46 | RPS19 | 2.60E−08 |
| SFRP2 | 2.94E−65 | CRYBA4 | 1.04E−44 | RPL35A | 5.60E−08 |
| RPL30 | 4.11E−64 | CRYGS | 3.18E−43 | RPS7 | 6.28E−08 |
| LHX2 | 4.19E−63 | CRYGC | 2.66E−42 | SET | 2.85E−07 |
| RPS17 | 9.06E−63 | CP | 1.09E−41 | CYP1B1 | 4.27E−07 |
| SIX6 | 1.63E−62 | IGFBP7 | 2.01E−41 | RPS3 | 4.94E−07 |
| RPS24 | 2.42E−60 | P3H2 | 7.27E−41 | NAP1L1 | 1.09E−06 |
| RAB31 | 8.85E−59 | ALDH1A1 | 1.16E−39 | RPLP0 | 2.09E−06 |
| RPS3 | 4.28E−58 | FOXE3 | 1.30E−38 | RPL39 | 3.80E−06 |
| RDH10 | 6.13E−58 | GJA3 | 3.54E−37 | RPS8 | 7.96E−06 |
| NAP1L1 | 1.52E−56 | SSX2IP | 1.13E−36 | C1orf56 | 8.80E−06 |
| NR2F1 | 8.34E−56 | MAF | 8.46E−35 | RPS13 | 1.10E−05 |
| RPL18 | 4.80E−54 | BHMT | 1.31E−34 | PHKG1 | 1.41E−05 |
| FGF19 | 1.12E−53 | LYPD6B | 7.84E−33 | RPS27 | 1.51E−05 |
| RPLP2 | 7.74E−53 | GJA8 | 3.65E−32 | RPL13 | 1.83E−05 |
| ZFP36L2 | 1.05E−52 | MRPS6 | 7.26E−32 | RPS24 | 2.21E−05 |
| SPP1 | 1.21E−52 | SUCO | 2.77E−31 | RPL31 | 3.34E−05 |
| RPL9 | 3.29E−52 | RP11- | 1.45E−30 | RPS14 | 3.50E−05 |
| | | 490M8.1 | | | |

Table 6B

| Cluster 0 | Cluster 0 | Cluster 1 | Cluster 1 | Cluster 2 | Cluster 2 | Cluster 3 | Cluster 3 |
|---|---|---|---|---|---|---|---|
| Gene | P-value | Gene | P-value | Gene | P-value | Gene | P-value |
| PTMA | 0 | TPM2 | 0 | WLS | 0 | ANKRD1 | 0 |
| RPS2 | 0 | MYL6 | 0 | CRABP1 | 0 | TPM1 | 0 |
| TMSB15A | 0 | TMSB4X | 0 | COL3A1 | 0 | GSTP1 | 8.28E−290 |
| RPL41 | 0 | FTL | 0 | CDH6 | 0 | TMSB4X | 1.34E−287 |
| RPLP0 | 0 | TAGLN | 0 | PRSS23 | 0 | RPL37A | 6.94E−259 |
| YBX1 | 0 | CRABP1 | 0 | SEMA3A | 0 | RPLP2 | 4.65E−253 |
| RPS19 | 0 | MYL9 | 0 | AKAP12 | 0 | RPLP1 | 9.12E−229 |
| HMGN2 | 0 | S100A10 | 0 | SPARC | 0 | RPS20 | 1.70E−225 |
| GAPDH | 0 | TMSB10 | 0 | IGFBP2 | 0 | TAGLN | 1.05E−219 |
| RPL23A | 0 | VIM | 0 | GPM6B | 0 | RPS19 | 2.07E−212 |
| H3F3A | 0 | ANXA1 | 0 | COL1A2 | 0 | RPS10 | 2.97E−208 |
| RPSA | 0 | ANXA2 | 1.11E−288 | MT-ND3 | 0 | RPL27A | 9.98E−203 |
| RPS24 | 0 | CALD1 | 2.92E−288 | MT-CO1 | 0 | RPL23 | 4.39E−186 |
| RPS27L | 0 | S100A11 | 1.55E−243 | PTX3 | 0 | NPPB | 1.87E−185 |
| RPLP1 | 0 | ACTB | 1.74E−226 | DST | 0 | RPL35 | 4.91E−170 |
| LINC01551 | 0 | RPS18 | 1.17E−209 | ITGB1 | 0 | RPS26 | 1.01E−160 |
| RPS25 | 0 | RPL35 | 1.45E−207 | MT-CYB | 0 | RPL23A | 3.50E−134 |
| RANBP1 | 0 | GNG11 | 3.43E−200 | HSPA5 | 0 | TMSB10 | 5.63E−133 |
| HES5 | 0 | RPS12 | 8.27E−199 | PCDH9 | 0 | RPL36A | 2.02E−132 |
| RPL18A | 0 | PFN1 | 1.21E−182 | SPOCK1 | 0 | RPS18 | 2.25E−132 |
| RPL35 | 0 | CFL1 | 5.55E−171 | NES | 0 | RPS2 | 1.35E−129 |
| HMGA1 | 0 | GNG5 | 1.76E−156 | SDC2 | 0 | ACTG1 | 2.84E−127 |
| RPS15 | 0 | RPL10 | 1.22E−151 | VIM | 0 | RPLP0 | 2.77E−125 |
| RPS13 | 0 | EIF1 | 4.41E−147 | PEG10 | 0 | RPS27A | 1.72E−119 |
| RPL21 | 1.42E−307 | RPS26 | 2.71E−135 | HSP90B1 | 0 | RPS12 | 6.50E−119 |
| RPS10 | 6.27E−302 | RPL32 | 8.19E−134 | MT-CO2 | 0 | RPL41 | 2.59E−113 |
| RPS8 | 1.68E−297 | RPL7 | 1.01E−130 | MT-CO3 | 0 | RPL26 | 3.35E−110 |
| HNRNPA1 | 5.54E−294 | PRDX6 | 1.39E−129 | PLD3 | 0 | UBA52 | 6.45E−109 |
| MARCKSL1 | 9.23E−291 | SPATS2L | 4.41E−122 | MAP2 | 0 | RPL21 | 9.69E−108 |
| RPLP2 | 2.26E−278 | DSTN | 2.18E−121 | CCND2 | 0 | ANXA1 | 1.06E−106 |

| Cluster 4 | Cluster 4 | Cluster 5 | Cluster 5 | Cluster 6 | Cluster 6 |
|---|---|---|---|---|---|
| Gene | P-value | Gene | P-value | Gene | P-value |
| RPL41 | 0 | NAV1 | 0 | CENPF | 0 |
| GSTP1 | 0 | SFRP2 | 0 | CCNB1 | 0 |
| RPL13A | 0 | EMX2 | 0 | UBE2S | 0 |
| RPS2 | 2.42E−300 | GJA1 | 0 | TPX2 | 0 |
| RPS20 | 7.92E−298 | TPBG | 0 | ARL6IP1 | 0 |
| RPL21 | 6.43E−279 | CDH2 | 0 | CENPE | 0 |
| CNTNAP2 | 4.57E−272 | ARL4C | 0 | TUBB4B | 0 |
| TMSB15A | 5.30E−269 | GPC3 | 0 | CDC20 | 0 |
| RPLP0 | 1.45E−247 | PAX6 | 0 | DLGAP5 | 0 |
| RPL27A | 4.33E−239 | MT-ND2 | 0 | CRABP1 | 0 |
| RPLP2 | 4.29E−226 | MT-ND1 | 0 | CCNB2 | 0 |
| RPLP1 | 3.94E−207 | SYNE2 | 0 | TOP2A | 0 |
| RPS8 | 5.72E−204 | GLI3 | 0 | ASPM | 0 |
| RPS27 | 1.31E−200 | CLU | 0 | UBE2C | 0 |
| RPL12 | 2.05E−195 | ATP2B1 | 0 | PTTG1 | 0 |
| RPL31 | 1.40E−193 | TRIM24 | 0 | CKAP2 | 0 |
| RPS15 | 1.21E−169 | ZIC1 | 0 | HMMR | 0 |
| RPL37A | 1.46E−168 | CNTNAP2 | 0 | SGO2 | 0 |
| RPL35 | 1.94E−152 | FZD3 | 0 | KPNA2 | 0 |
| SNRPD2 | 2.22E−146 | AKAP9 | 0 | AURKA | 0 |
| YBX1 | 6.81E−145 | GABPB1- | 0 | GNG11 | 0 |
| | | AS1 | | | |
| RPL34 | 1.45E−143 | MT-ND6 | 0 | PRSS23 | 0 |
| RPS19 | 5.29E−140 | MYO10 | 0 | NR2F2 | 0 |
| TMA7 | 8.83E−140 | TLE4 | 0 | PLK1 | 0 |
| RPS11 | 1.78E−135 | CENPF | 0 | CALM2 | 0 |
| RPS14 | 6.24E−132 | MFAP2 | 0 | CDH6 | 0 |
| RPS28 | 1.06E−126 | TPR | 0 | MKI67 | 0 |
| RPL9 | 1.82E−126 | KCNQ1OT1 | 0 | PTX3 | 0 |
| RPL7 | 3.14E−126 | CCND1 | 0 | LYPD1 | 0 |
| HES4 | 1.50E−122 | FADS1 | 0 | HSP90B1 | 0 |

| Cluster 7 | Cluster 7 | Cluster 8 | Cluster 8 | Cluster 9 | Cluster 9 |
|---|---|---|---|---|---|
| Gene | P-value | Gene | P-value | Gene | P-value |
| DLK1 | 0 | CRABP1 | 0 | EEF1A1 | 0 |
| MT-CO3 | 0 | WLS | 0 | HNRNPA1 | 0 |
| FOXG1 | 0 | HIST1H4C | 0 | RPS10 | 8.73E−246 |
| SYNE2 | 0 | PTN | 0 | RPL36A | 9.40E−180 |
| LINC01551 | 0 | COL3A1 | 0 | TMSB15A | 1.99E−158 |
| SFRP1 | 0 | MT-ND3 | 0 | DLK1 | 1.84E−156 |
| LHX2 | 0 | PTX3 | 0 | LINC01551 | 4.55E−141 |
| MT-CO2 | 0 | ALKAL2 | 0 | RPS24 | 1.21E−106 |
| GLI3 | 0 | HIST1H1E | 0 | RPS3 | 5.20E−102 |
| IGDCC3 | 0 | PRSS23 | 0 | RPS3A | 6.44E−96 |
| TRIM24 | 0 | CDH6 | 0 | GAPDH | 8.74E−94 |
| HES5 | 0 | SEMA3A | 0 | RPL6 | 5.92E−92 |
| ID4 | 0 | MT-CO1 | 0 | PTMS | 2.21E−82 |
| MEIS2 | 0 | AKAP12 | 0 | RPL13A | 7.53E−81 |
| PTPRZ1 | 0 | PEG10 | 0 | MARCKSL1 | 9.66E−75 |
| VCAN | 0 | SPOCK1 | 0 | RPL3 | 2.23E−72 |
| MT-ND1 | 0 | HIST1H1C | 0 | RPL26 | 7.38E−72 |
| MT-ND4 | 0 | GPM6B | 0 | RPL37A | 5.73E−69 |
| LIX1 | 0 | SPARC | 0 | SRP14 | 1.92E−67 |
| MYCN | 0 | MT-CYB | 0 | RPS11 | 4.38E−66 |
| EMX2 | 0 | HIST1H1B | 0 | RPL23A | 6.79E−66 |
| MT-CYB | 0 | MT-ND4 | 0 | RPL7A | 1.25E−65 |
| PRKDC | 0 | CALU | 0 | TUBA1A | 2.95E−60 |
| PTBP2 | 0 | ITGB1 | 0 | RPL41 | 4.81E−59 |
| SIX3 | 0 | DST | 0 | TPT1 | 1.06E−57 |
| CHD7 | 0 | HIST1H1D | 0 | RPS4X | 1.23E−57 |
| EPB41 | 0 | COL1A2 | 0 | NNAT | 1.48E−55 |
| MT-ND3 | 0 | RHOB | 0 | STMN1 | 4.14E−54 |
| PTMA | 0 | GNG11 | 0 | PRDX2 | 7.57E−53 |
| SOX3 | 0 | CDK1 | 0 | RPS27 | 1.26E−52 |

| Cluster 10 | Cluster 10 | Cluster 11 | Cluster 11 | Cluster 12 | Cluster 12 |
|---|---|---|---|---|---|
| Gene | P-value | Gene | P-value | Gene | P-value |
| S100A11 | 0 | NNAT | 0 | PLCG2 | 1.34E−43 |
| MYL12A | 0 | CDKN1C | 0 | TLE4 | 1.72E−27 |
| TAGLN | 0 | SOX4 | 0 | MALAT1 | 1.72E−26 |
| CTGF | 0 | TUBA1A | 0 | RPS15 | 5.35E−24 |
| TPM1 | 0 | TAGLN3 | 0 | HES1 | 7.46E−24 |
| CALD1 | 0 | STMN1 | 0 | RPL36 | 6.96E−21 |
| TMSB10 | 0 | MLLT11 | 0 | RPS19 | 3.57E−20 |
| FN1 | 0 | STMN2 | 0 | RPS27 | 4.83E−19 |
| COL8A1 | 0 | HES6 | 0 | CDKN1C | 2.24E−18 |
| TPM4 | 0 | CKB | 0.00E+00 | SOX4 | 2.89E−18 |
| ACTG2 | 0 | TUBB2B | 6.71E−297 | RPL28 | 4.70E−13 |
| COL4A1 | 0 | H3F3A | 8.43E−297 | PIK3R3 | 6.10E−13 |
| KRT18 | 0 | MAP1B | 3.48E−273 | RPL13 | 8.48E−13 |
| COL1A2 | 0 | SOX11 | 1.26E−269 | BTG1 | 2.24E−12 |
| ITGA1 | 0 | MAP6 | 2.58E−247 | RPL35 | 4.81E−12 |
| DSTN | 0 | BASP1 | 4.65E−232 | MTRNR2L12 | 2.33E−10 |
| COL1A1 | 0 | DCX | 2.55E−230 | RPL37A | 2.64E−10 |
| PHLDA2 | 0 | PCBP4 | 7.01E−227 | DLK1 | 4.21E−10 |
| FSTL1 | 0 | ELAVL4 | 1.39E−220 | IER5 | 1.43E−09 |
| BGN | 0 | ELAVL2 | 4.10E−201 | RPL13A | 1.70E−09 |
| SEPT11 | 0 | ELAVL3 | 1.38E−198 | AC025164.1 | 1.74E−09 |
| TPM2 | 0 | RBP1 | 3.78E−197 | AL021453.1 | 1.03E−08 |
| ITGB1 | 0 | CD24 | 4.44E−183 | RPS27L | 1.09E−08 |
| COL5A2 | 0 | MIAT | 7.13E−178 | HEXIM1 | 1.78E−08 |
| IGFBP5 | 0 | INSM1 | 9.74E−178 | HIST1H2AG | 2.87E−08 |
| COL4A2 | 0 | NREP | 4.62E−177 | RPL38 | 2.94E−08 |
| IGFBP7 | 0 | ATP6V1G1 | 1.34E−166 | RPL37 | 3.52E−08 |
| TGFB2 | 0 | DLL3 | 2.87E−164 | AMD1 | 8.52E−08 |
| ACTN1 | 0 | DPYSL3 | 3.35E−158 | MAFB | 1.94E−07 |
| RHOBTB3 | 0 | KIF5C | 1.73E−146 | RPS21 | 2.21E−07 |

Table 6C

| Cluster 0 | Cluster 0 | Cluster 1 | Cluster 1 | Cluster 2 | Cluster 2 | Cluster 3 | Cluster 3 |
|---|---|---|---|---|---|---|---|
| Gene | P-value | Gene | P-value | Gene | P-value | Gene | P-value |
| STMN2 | 0 | TUBA1A | 2.01E−251 | FGFBP3 | 0 | TSPAN13 | 0 |
| NNAT | 0 | TUBB | 1.64E−244 | VIM | 0 | MDH1 | 0 |
| GPM6A | 0 | STMN2 | 1.25E−240 | NTRK2 | 0 | ARF4 | 0 |
| STMN1 | 0 | SOX4 | 5.77E−235 | HES1 | 0 | ATP6V0B | 0 |
| CELF4 | 0 | MLLT11 | 8.39E−234 | TTYH1 | 0 | RABAC1 | 0 |
| TUBB2B | 0 | STMN1 | 1.42E−220 | SCD | 0 | CUTA | 0 |
| TUBB | 0 | STMN4 | 2.68E−217 | ZFP36L1 | 0 | COPE | 0 |
| BASP1 | 0 | MALAT1 | 3.02E−212 | SOX2 | 0 | COX8A | 0 |
| H3F3B | 0 | TUBB2B | 3.73E−209 | SPARC | 0 | SERF2 | 0 |
| TUBB2A | 0 | GPM6A | 3.40E−150 | CD99 | 0 | ATP5F1B | 0 |
| TUBA1A | 0 | PTMS | 1.05E−137 | NPC2 | 0 | VAMP2 | 0 |
| STMN4 | 0 | CCNI | 2.01E−133 | CDKN1A | 0 | PTPRN | 0 |
| RTN1 | 0 | GAP43 | 2.57E−133 | RCN1 | 0 | MAGEH1 | 0 |
| NOVA1 | 0 | TMSB15A | 2.40E−130 | TMBIM6 | 0 | ARPC3 | 0 |
| MARCKSL1 | 0 | PEG10 | 1.38E−121 | GPM6B | 0 | ATP5MC1 | 0 |
| SOX4 | 0.00E+00 | H3F3B | 2.24E−110 | PSAP | 0 | VGF | 0 |
| SEZ6L2 | 1.87E−301 | TUBB2A | 4.88E−97 | HSPA5 | 0 | NDUFAF3 | 0 |
| H3F3A | 6.07E−294 | MARCKSL1 | 6.13E−95 | HES4 | 0 | SLC22A17 | 0 |
| MAPT | 1.06E−290 | YWHAH | 1.19E−92 | ID4 | 0 | MT-ND1 | 0 |
| MALAT1 | 2.71E−284 | NNAT | 1.17E−91 | EDNRB | 0 | KDELR2 | 0 |
| TMSB15A | 9.97E−275 | FXYD6 | 2.05E−76 | CALU | 0 | BEX1 | 0 |
| CCNI | 4.03E−268 | NREP | 7.48E−71 | CLU | 0 | APBB3 | 0 |
| YWHAH | 1.63E−266 | ZFAS1 | 4.25E−69 | ID3 | 0 | CPE | 0 |
| TSHZ2 | 3.61E−263 | H3F3A | 3.92E−64 | MSMO1 | 0 | SEC61G | 0 |
| POU2F2 | 1.36E−256 | UCHL1 | 3.94E−64 | CXCR4 | 0 | SCG2 | 0 |
| NSG2 | 5.10E−256 | TMSB10 | 2.57E−62 | MGST1 | 0 | MORF4L2 | 0 |
| GAP43 | 5.45E−252 | RTN1 | 3.60E−59 | NEAT1 | 0 | OCIAD1 | 0 |
| NREP | 3.27E−246 | PTH2 | 9.51E−59 | SAT1 | 0 | PRDX5 | 0 |
| FXYD6 | 6.33E−241 | BASP1 | 1.01E−56 | PDLIM3 | 0 | SELENOM | 0 |
| MLLT11 | 1.46E−240 | RPL34 | 2.65E−56 | RHOC | 0 | ATP6V1G2 | 0 |

| Cluster 4 | Cluster 4 | Cluster 5 | Cluster 5 | Cluster 6 | Cluster 6 | Cluster 7 | Cluster 7 |
|---|---|---|---|---|---|---|---|
| Gene | P-value | Gene | P-value | Gene | P-value | Gene | P-value |
| DLX2 | 0 | EIF1 | 2.28E−190 | SOX4 | 6.41E−134 | RPS19 | 0 |
| DLX6-AS1 | 0 | KRT10 | 4.51E−181 | GPM6A | 1.21E−133 | ID1 | 1.33E−297 |
| DLX5 | 0 | VAMP2 | 1.64E−176 | MARCKSL1 | 5.03E−122 | RPS7 | 9.58E−267 |
| ACTG1 | 0 | ARF1 | 9.63E−139 | MLLT11 | 1.38E−112 | RPL39 | 1.22E−265 |
| RPL34 | 2.45E−301 | ARF4 | 2.64E−134 | NRN1 | 1.98E−112 | RPL13 | 3.94E−259 |
| TUBB | 2.93E−292 | P4HB | 2.88E−132 | STMN2 | 1.19E−103 | CKB | 4.32E−258 |
| SOX4 | 2.43E−283 | GOLGA2 | 1.83E−127 | BASP1 | 1.36E−103 | RPS27L | 1.28E−249 |
| TUBA1A | 1.27E−271 | SEC61G | 4.84E−125 | CD24 | 2.11E−100 | RPLP1 | 2.43E−245 |
| DLX1 | 5.87E−258 | KDELR2 | 5.10E−125 | H3F3A | 9.70E−92 | RPS15A | 2.89E−244 |
| TUBB2B | 4.24E−228 | MVD | 9.68E−122 | TUBA1A | 1.64E−86 | ASCL1 | 1.48E−222 |
| HNRNPA1 | 4.77E−215 | TMED3 | 5.20E−118 | BTG1 | 2.35E−84 | SOX2 | 3.38E−220 |
| RPL39 | 1.67E−205 | CYCS | 1.87E−111 | TUBB2B | 5.43E−76 | HES1 | 9.72E−219 |
| MLLT11 | 4.66E−201 | TRMT112 | 5.65E−111 | MAP1B | 6.07E−72 | RPL7 | 2.58E−217 |
| RPS4X | 3.05E−194 | HERPUD1 | 3.58E−108 | JPT1 | 2.14E−70 | HES6 | 2.06E−216 |
| NNAT | 1.21E−181 | MED10 | 1.42E−104 | CRABP1 | 1.48E−65 | RPS27 | 1.60E−215 |
| PTMS | 2.14E−181 | MORF4L2 | 2.18E−96 | TUBB | 2.31E−64 | RPS12 | 7.83E−213 |
| H3F3A | 1.63E−177 | FDPS | 8.49E−95 | ELAVL4 | 3.04E−64 | RPS15 | 1.35E−209 |
| RPL11 | 2.10E−173 | ATP5ME | 8.92E−94 | LHX5-AS1 | 4.76E−62 | RPS23 | 1.45E−209 |
| RPL7 | 1.77E−163 | SRP54 | 2.19E−92 | PTMA | 1.01E−60 | RPL37 | 2.79E−209 |
| RPL35A | 2.30E−150 | RPL18 | 3.90E−90 | MIAT | 2.67E−59 | RPS6 | 3.15E−205 |
| TMSB10 | 1.61E−148 | NPRL2 | 1.52E−88 | NSG1 | 7.52E−58 | RPL18A | 1.21E−199 |
| MARCKSL1 | 5.88E−146 | MAP1LC3B | 2.05E−87 | STMN1 | 6.87E−52 | CDKN1A | 2.88E−193 |
| RPL6 | 1.55E−140 | LSM3 | 2.31E−83 | CITED2 | 3.86E−51 | RPS9 | 5.23E−189 |
| ZFAS1 | 1.51E−138 | SELENOS | 9.34E−81 | CRNDE | 2.03E−48 | RPS3A | 3.07E−186 |
| RPL24 | 5.99E−137 | UBC | 1.67E−78 | SEZ6L2 | 7.92E−46 | RPL6 | 1.14E−184 |
| GAD2 | 3.26E−135 | MRPL55 | 6.60E−78 | NOVA1 | 1.54E−45 | RPL12 | 5.47E−183 |
| JPT1 | 1.22E−123 | ARPC3 | 6.79E−77 | LHX1 | 2.16E−44 | RPS20 | 6.89E−182 |
| RPL9 | 2.77E−122 | RPS16 | 7.55E−76 | RTN4 | 2.27E−44 | RPS3 | 8.76E−181 |
| COX7C | 6.70E−122 | HMGB2 | 9.53E−75 | ACTG1 | 2.89E−43 | RPS2 | 3.16E−172 |
| TMSB15A | 1.82E−120 | SELENOK | 3.25E−73 | NEFL | 3.62E−43 | RPL36 | 1.97E−170 |

| Cluster 8 | Cluster 8 | Cluster 9 | Cluster 9 | Cluster 10 | Cluster 10 |
|---|---|---|---|---|---|
| Gene | P-value | Gene | P-value | Gene | P-value |
| RPL41 | 0 | COL1A1 | 0 | GATA3 | 4.35E−149 |
| FTL | 0 | COL3A1 | 0 | HOXB5 | 3.05E−135 |
| FTH1 | 0 | COL1A2 | 0 | RBP1 | 1.16E−89 |
| RPS6 | 0 | NUPR1 | 0 | CRABP1 | 3.80E−80 |
| VIM | 0 | PTN | 0 | GATA3-AS1 | 2.69E−69 |
| RPS20 | 0 | IFITM3 | 0 | BTG1 | 2.74E−39 |
| RPLP1 | 8.59E−298 | MGP | 0 | HOXB2 | 1.36E−35 |
| TMSB4X | 1.19E−289 | FN1 | 0 | CD24 | 3.83E−34 |
| RPL36 | 5.98E−287 | RBP1 | 0 | JPT1 | 1.28E−33 |
| RPL12 | 5.47E−286 | S100A11 | 0 | STMN2 | 1.59E−33 |
| RPL35 | 7.09E−281 | RPLP1 | 0 | SOX4 | 1.03E−31 |
| RPL26 | 2.50E−275 | RPS2 | 0 | MARCKSL1 | 6.33E−29 |
| RPS18 | 2.14E−260 | RPS18 | 0 | TUBA1A | 2.28E−28 |
| RPS24 | 2.33E−257 | SLC25A6 | 0 | NR2F1 | 4.38E−28 |
| SERF2 | 1.86E−255 | LGALS1 | 0 | H3F3A | 8.49E−28 |
| RPL27 | 5.35E−255 | SPARC | 0 | HOXB8 | 1.04E−25 |
| RPL31 | 1.28E−254 | IFITM2 | 0 | TERF2IP | 9.63E−25 |
| RPS12 | 7.07E−247 | RPL28 | 0 | MIAT | 9.96E−25 |
| RPS3A | 9.68E−240 | RPS12 | 0 | PAFAH1B3 | 2.65E−24 |
| GSTP1 | 2.90E−236 | RPL23A | 0 | CRNDE | 7.63E−24 |
| NPC2 | 1.98E−229 | RPL13 | 0 | MLLT11 | 1.32E−23 |
| RPS15 | 9.72E−223 | BGN | 0 | NSG1 | 9.49E−23 |
| EEF1A1 | 2.32E−221 | RPS6 | 0 | GATA2 | 3.45E−22 |
| RPS25 | 1.02E−220 | RPL12 | 0 | DDX5 | 2.14E−21 |
| RPL27A | 7.55E−220 | MFAP4 | 0 | NR2F2 | 5.77E−21 |
| RPS10 | 6.57E−219 | SAT1 | 0 | CITED2 | 1.03E−19 |
| RPS15A | 4.07E−217 | ISLR | 0 | TAGLN2 | 1.48E−19 |
| RPS19 | 1.15E−210 | IGFBP5 | 0 | EIF4A2 | 1.80E−19 |
| RPL28 | 2.20E−209 | MDK | 0 | NDUFA4 | 2.57E−19 |
| RPL21 | 1.06E−202 | RPL41 | 0 | GPM6A | 2.69E−19 |

| Cluster 11 | Cluster 11 | Cluster 12 | Cluster 12 | Cluster 13 | Cluster 13 |
|---|---|---|---|---|---|
| Gene | P-value | Gene | P-value | Gene | P-value |
| MT-ND1 | 2.19E−265 | NTRK2 | 6.35E−277 | GNG5 | 6.94E−172 |
| VGF | 1.47E−243 | CLU | 1.32E−271 | VIM | 6.49E−170 |
| COX8A | 5.90E−235 | VIM | 1.90E−267 | CKS1B | 6.04E−150 |
| CUTA | 1.04E−233 | GPM6B | 1.19E−261 | HES1 | 1.12E−147 |
| MT-CYB | 4.68E−233 | EDNRB | 1.16E−232 | ID3 | 2.58E−142 |
| SERF2 | 2.16E−230 | CD99 | 4.87E−221 | RPLP1 | 2.52E−129 |
| TSPAN13 | 6.18E−228 | ACTB | 3.78E−215 | CD99 | 4.85E−125 |
| RABAC1 | 9.05E−225 | ID3 | 4.84E−212 | RPS6 | 2.18E−124 |
| FAIM2 | 4.40E−224 | PDLIM3 | 5.39E−205 | B2M | 4.08E−118 |
| PTPRN | 1.65E−222 | TTYH1 | 4.79E−204 | TUBA1B | 6.01E−113 |
| SNCB | 9.79E−213 | DKK3 | 7.58E−196 | RHOC | 7.39E−112 |
| MT-ND2 | 1.43E−212 | RTN4 | 4.14E−194 | TOP2A | 1.36E−110 |
| PHLDA2 | 1.08E−211 | HSPA8 | 1.12E−191 | PTTG1 | 4.29E−110 |
| ATP6V0B | 2.59E−210 | SERPINE2 | 3.37E−190 | UBE2C | 7.11E−110 |
| MT-ND4 | 3.92E−205 | MGST1 | 3.71E−189 | BIRC5 | 2.12E−109 |
| MDH1 | 1.90E−199 | ID2 | 3.64E−187 | EMP3 | 2.94E−108 |
| ATP5MC1 | 4.45E−194 | UBL3 | 7.47E−187 | NME4 | 4.55E−108 |
| COPE | 6.21E−194 | S100B | 2.15E−186 | GSTP1 | 1.75E−107 |
| SELENOM | 1.32E−190 | CKB | 4.72E−186 | PCLAF | 1.22E−103 |
| LIN7B | 3.69E−190 | NPC2 | 7.99E−185 | CLIC1 | 2.55E−102 |
| EBNA1BP2 | 1.02E−189 | CNN3 | 1.48E−184 | NUSAP1 | 5.00E−100 |
| APBB3 | 3.34E−189 | PFN2 | 4.92E−184 | CKS2 | 6.30E−99 |
| ARPC3 | 2.30E−186 | PSAP | 1.82E−182 | ID1 | 1.05E−98 |
| PRDX5 | 1.02E−185 | SOX2 | 6.49E−180 | TUBB6 | 3.46E−98 |
| NDUFAF3 | 1.02E−180 | ID4 | 2.14E−178 | CNN3 | 7.70E−98 |
| CHMP2B | 4.40E−180 | DDR1 | 1.41E−176 | CDK1 | 8.92E−98 |
| DNAJC3-DT | 7.09E−180 | ENO1 | 1.65E−174 | H2AFV | 2.67E−96 |
| GNG3 | 2.07E−177 | CTGF | 1.35E−169 | HMGB2 | 4.54E−96 |
| ARF4 | 7.34E−175 | B2M | 4.76E−168 | TYMS | 4.40E−94 |
| AL669831.5 | 8.98E−174 | C12orf75 | 5.32E−168 | RPS20 | 1.72E−92 |

| Cluster 14 | Cluster 14 | Cluster 15 | Cluster 15 | Cluster 16 | Cluster 16 |
|---|---|---|---|---|---|
| Gene | P-value | Gene | P-value | Gene | P-value |
| PEG10 | 4.11E−141 | RPL37A | 1.38E−49 | MALAT1 | 8.04E−85 |
| BTG1 | 2.03E−116 | SBK1 | 3.43E−48 | WSB1 | 1.03E−80 |
| TMSB4X | 6.01E−112 | RPS29 | 6.95E−44 | HES1 | 1.02E−37 |
| TUBB2B | 4.90E−71 | CNIH2 | 9.96E−42 | CTGF | 2.52E−31 |
| MLLT11 | 1.28E−48 | POU2F2 | 3.65E−41 | SRSF5 | 6.68E−31 |
| ACTG1 | 1.34E−46 | NUDT3 | 4.06E−41 | VMP1 | 3.36E−30 |
| TUBA1A | 6.95E−38 | DCX | 2.37E−40 | MIR99AHG | 4.68E−28 |
| TUBB | 3.66E−37 | RPL38 | 3.04E−39 | CDK5RAP3 | 8.29E−26 |
| SOX4 | 2.02E−35 | ZFHX3 | 8.09E−39 | DST | 9.09E−24 |
| NKX2-1 | 1.80E−34 | MEX3A | 1.33E−37 | PNISR | 1.40E−22 |
| BRS3 | 2.09E−34 | CAMK2N1 | 3.59E−36 | SORBS2 | 1.22E−20 |
| PTMS | 3.31E−33 | PPP1R1A | 6.71E−36 | ADGRV1 | 4.98E−20 |
| JPT1 | 7.76E−33 | DPYSL3 | 7.94E−36 | SAT2 | 8.65E−20 |
| HTATSF1 | 2.20E−32 | RPS21 | 8.87E−36 | N4BP2L2 | 9.71E−20 |
| H3F3A | 8.21E−30 | RPS27 | 1.06E−35 | ID3 | 3.54E−18 |
| FHL1 | 4.76E−27 | EFNB3 | 3.01E−35 | NOVA1 | 1.68E−16 |
| ETFB | 1.62E−26 | SDC3 | 3.58E−35 | SAT1 | 1.42E−15 |
| STMN4 | 6.88E−26 | NCAM1 | 4.82E−35 | PDGFRB | 1.70E−15 |
| FDFT1 | 8.05E−26 | NACA | 8.88E−35 | ACADVL | 3.90E−15 |
| DLX2 | 1.90E−25 | MAP6 | 4.61E−34 | THUMPD3-AS1 | 5.27E−15 |
| CD24 | 1.02E−24 | RPL30 | 5.06E−34 | NEAT1 | 6.39E−15 |
| MARCKSL1 | 1.83E−24 | SPTAN1 | 5.45E−34 | NTRK2 | 1.85E−13 |
| PCDH17 | 6.82E−23 | SEPT3 | 6.38E−34 | PDLIM3 | 8.97E−13 |
| DCX | 1.70E−22 | DUSP8 | 8.95E−34 | CYR61 | 1.76E−11 |
| NOVA1 | 1.80E−20 | RPL18 | 1.09E−33 | HNRNPDL | 2.10E−11 |
| LHX6 | 1.92E−20 | ATCAY | 2.14E−33 | NAT9 | 2.04E−10 |
| COX7C | 7.48E−20 | AES | 3.23E−33 | PTPRZ1 | 1.01E−09 |
| NREP | 9.12E−20 | RPS11 | 1.41E−32 | RSRP1 | 1.43E−09 |
| MIR7-3HG | 1.42E−19 | EVL | 1.73E−32 | SRSF2 | 9.39E−09 |
| TMSB15A | 1.06E−17 | ZFAS1 | 2.45E−32 | QKI | 1.37E−08 |

TABLE 7
Differentially expressed genes in bulk RNA-seq datasets (see, U.S. Provisional Application 63/219,705 filed
Jul. 8, 2021). (A) For each ORF overexpression condition, genes that were significantly differentially
expressed (t-test q-value < 0.05 with FDR correction) relative to respective GFP overexpressing cells
that were cultured in mTeSR stem cell media are listed with associated fold change and P-values. (B) For
each DYRK1A perturbation, genes that were significantly differentially expressed (t-test q-value <
0.05 with FDR correction) relative to respective controls are listed with associated fold change and P-values.

| Cardiomyocte TFs | | HSC TFs | | Oligodendrocyte TFs | | Hepatocyte TFs | |
|---|---|---|---|---|---|---|---|
| Table 3 Name | nDatasets | Table 3 Name | nDatasets | Table 3 Name | nDatasets | Table 3 Name | nDatasets |
| TFORF2064 | 7 | TFORF3148 | 5 | TFORF0124 | 9 | TFORFO793 | 6 |
| TFORF2065 | 7 | TFORF2242 | 4 | TFORF2534 | 8 | TFORF0691 | 6 |
| TFORF3104 | 7 | TFORF2997 | 4 | TFORF2535 | 8 | TFORF0692 | 6 |
| TFORF2119 | 5 | TFORF2998 | 4 | TFORF2536 | 8 | TFORF0693 | 6 |
| TFORF2120 | 5 | TFORF0974 | 4 | TFORF2095 | 8 | TFORF0694 | 6 |
| TFORF2121 | 5 | TFORF0975 | 4 | TFORF0123 | 6 | TFORF0695 | 6 |
| TFORF1982 | 5 | TFORF0976 | 4 | TFORF2530 | 5 | TFORF2956 | 6 |
| TFORF1983 | 5 | TFORF2823 | 4 | TFORF0094 | 5 | TFORF2957 | 6 |
| TFORF2236 | 4 | TFORF2824 | 4 | TFORF0095 | 5 | TFORF2546 | 5 |
| TFORF2237 | 4 | TFORF2825 | 4 | TFORF0096 | 5 | TFORF0099 | 4 |
| TFORF2238 | 4 | TFORF2826 | 4 | TFORF2497 | 4 | TFORF3398 | 4 |
| TFORF2239 | 4 | TFORF2827 | 4 | TFORF2605 | 4 | TFORFO280 | 4 |
| TFORF0968 | 4 | TFORF3489 | 4 | TFORF2606 | 4 | TFORF2195 | 4 |
| TFORF1182 | 4 | TFORF0943 | 4 | TFORF0110 | 4 | TFORF2196 | 4 |
| TFORF3330 | 4 | TFORF3073 | 4 | TFORF0111 | 4 | TFORF2197 | 4 |
| TFORF1638 | 3 | TFORF3074 | 4 | TFORF3129 | 4 | TFORF2198 | 4 |
| TFORF0969 | 3 | TFORF1497 | 4 | TFORF3237 | 4 | TFORF1638 | 3 |
| TFORF1506 | 3 | TFORF0337 | 4 | TFORF2539 | 4 | TFORF2209 | 3 |
| TFORF3024 | 3 | TFORF0338 | 4 | TFORF2540 | 4 | TFORF2210 | 3 |
| TFORF0480 | 3 | TFORF0339 | 4 | TFORF2541 | 4 | TFORF2211 | 3 |
| TFORF0481 | 3 | TFORF0340 | 4 | TFORF2542 | 4 | TFORF2212 | 3 |
| TFORF3296 | 3 | TFORF0341 | 4 | TFORF2543 | 4 | TFORF1326 | 3 |
| TFORF3297 | 3 | TFORF1938 | 4 | TFORF2938 | 4 | TFORF0981 | 3 |
| TFORF0018 | 3 | TFORF1939 | 4 | TFORF1607 | 3 | TFORF0982 | 3 |
| TFORF0019 | 3 | TFORF0427 | 4 | TFORF1608 | 3 | TFORF0860 | 3 |
| TFORF0282 | 3 | TFORF0428 | 4 | TFORF1885 | 3 | TFORF0861 | 3 |
| TFORF0283 | 3 | TFORF0429 | 4 | TFORF1886 | 3 | TFORF0862 | 3 |
| TFORF0284 | 3 | TFORF1919 | 4 | TFORF1887 | 3 | TFORF2971 | 3 |
| TFORF0285 | 3 | TFORF1920 | 4 | TFORF1888 | 3 | TFORF2972 | 3 |
| TFORF0286 | 3 | TFORF3473 | 4 | TFORF3282 | 3 | TFORF3015 | 3 |
| TFORF0287 | 3 | TFORF1999 | 4 | TFORF0459 | 3 | TFORF0499 | 3 |
| TFORF0288 | 3 | TFORF0960 | 3 | TFORF0460 | 3 | TFORFO500 | 3 |
| TFORF0289 | 3 | TFORF0961 | 3 | TFORF0461 | 3 | TFORFO731 | 3 |
| TFORF0290 | 3 | TFORF0962 | 3 | TFORF0462 | 3 | TFORF2274 | 3 |
| TFORF0291 | 3 | TFORF0963 | 3 | TFORF2305 | 3 | TFORF2275 | 3 |
| TFORF0235 | 3 | TFORF0964 | 3 | TFORF2306 | 3 | TFORF2276 | 3 |
| TFORF0236 | 3 | TFORF3192 | 3 | TFORF2307 | 3 | TFORF2881 | 3 |
| TFORF1151 | 3 | TFORF2240 | 3 | TFORF2308 | 3 | TFORF2882 | 3 |
| TFORF1152 | 3 | TFORF2241 | 3 | TFORF2309 | 3 | TFORF2553 | 2 |
| TFORF0923 | 3 | TFORF1525 | 3 | TFORF2310 | 3 | TFORF2554 | 2 |
| TFORF0924 | 3 | TFORF0099 | 3 | TFORF3461 | 3 | TFORF3036 | 2 |
| TFORF0925 | 3 | TFORF3398 | 3 | TFORF0079 | 3 | TFORF2545 | 2 |
| TFORF0499 | 3 | TFORF2841 | 3 | TFORF0080 | 3 | TFORF3412 | 2 |
| TFORF0500 | 3 | TFORF2842 | 3 | TFORF0323 | 3 | TFORF1125 | 2 |
| TFORF3498 | 2 | TFORF2070 | 3 | TFORF0324 | 3 | TFORF0959 | 2 |
| TFORF2593 | 2 | TFORF2071 | 3 | TFORF0325 | 3 | TFORF3527 | 2 |
| TFORF1207 | 2 | TFORF2072 | 3 | TFORF1033 | 3 | TFORF3075 | 2 |
| TFORF1208 | 2 | TFORF2073 | 3 | TFORF2401 | 3 | TFORF2609 | 2 |
| TFORF0954 | 2 | TFORF2074 | 3 | TFORF2747 | 3 | TFORF2610 | 2 |
| TFORF0955 | 2 | TFORF2075 | 3 | TFORF3482 | 3 | TFORF3366 | 2 |
| TFORF3533 | 2 | TFORF2076 | 3 | TFORF0006 | 3 | TFORF3274 | 2 |
| TFORF2700 | 2 | TFORF2077 | 3 | TFORF0007 | 3 | TFORF3275 | 2 |
| TFORF2701 | 2 | TFORF0235 | 3 | TFORF1889 | 3 | TFORF3224 | 2 |
| TFORF2702 | 2 | TFORF0236 | 3 | TFORF1890 | 3 | TFORF1684 | 2 |
| TFORF2942 | 2 | TFORF2085 | 3 | TFORF1891 | 3 | TFORF1685 | 2 |
| TFORF2943 | 2 | TFORF2086 | 3 | TFORF1892 | 3 | TFORF1686 | 2 |
| TFORF2234 | 2 | TFORF2087 | 3 | TFORF1922 | 3 | TFORF1687 | 2 |
| TFORF2161 | 2 | TFORF2088 | 3 | TFORF1923 | 3 | TFORF2991 | 2 |
| TFORF2162 | 2 | TFORF2059 | 3 | TFORF0089 | 3 | TFORF0989 | 2 |
| TFORF2849 | 2 | TFORF0675 | 3 | TFORF0090 | 3 | TFORF2384 | 2 |
| TFORF2850 | 2 | TFORF0676 | 3 | TFORF0091 | 3 | TFORF2385 | 2 |
| TFORF2851 | 2 | TFORF0677 | 3 | TFORF0092 | 3 | TFORF2908 | 2 |
| TFORF2852 | 2 | TFORF2633 | 3 | TFORF0093 | 3 | TFORF2909 | 2 |
| TFORF2853 | 2 | TFORF2634 | 3 | TFORF2096 | 3 | TFORF2910 | 2 |
| TFORF3459 | 2 | TFORF2635 | 3 | TFORF2097 | 3 | TFORF2911 | 2 |
| TFORF1658 | 2 | TFORF2636 | 3 | TFORF2098 | 3 | TFORF2912 | 2 |
| TFORF1659 | 2 | TFORF2637 | 3 | TFORF3212 | 3 | TFORF2978 | 2 |
| TFORF1660 | 2 | TFORF3178 | 3 | TFORF1873 | 2 | TFORF2979 | 2 |
| TFORF3247 | 2 | TFORF2152 | 2 | TFORF1874 | 2 | TFORF0628 | 2 |
| TFORF0814 | 2 | TFORF2153 | 2 | TFORF3273 | 2 | TFORF0629 | 2 |
| TFORF1136 | 2 | TFORF2154 | 2 | TFORF0467 | 2 | TFORF0630 | 2 |
| TFORF1137 | 2 | TFORF2155 | 2 | TFORF0660 | 2 | TFORF2007 | 2 |
| TFORF1138 | 2 | TFORF2586 | 2 | TFORF0661 | 2 | TFORF3453 | 2 |
| TFORF1139 | 2 | TFORF0656 | 2 | TFORF0789 | 2 | TFORF2862 | 2 |
| TFORF1938 | 2 | TFORF0657 | 2 | TFORF2873 | 2 | TFORF2863 | 2 |
| TFORF1939 | 2 | TFORF0658 | 2 | TFORF2874 | 2 | TFORF2658 | 2 |
| TFORF2340 | 2 | TFORF0064 | 2 | TFORF1096 | 2 | TFORF2659 | 2 |
| TFORF2341 | 2 | TFORF0065 | 2 | TFORF3156 | 2 | TFORF2656 | 2 |
| TFORF2342 | 2 | TFORF2873 | 2 | TFORF1615 | 2 | TFORF2657 | 2 |
| TFORF2343 | 2 | TFORF2874 | 2 | TFORF2991 | 2 | TFORF3358 | 2 |
| TFORF2344 | 2 | TFORF1846 | 2 | TFORF0075 | 2 | TFORF0244 | 2 |
| TFORF2345 | 2 | TFORF1847 | 2 | TFORF0076 | 2 | TFORF0417 | 2 |
| TFORF2346 | 2 | TFORF1848 | 2 | TFORF0077 | 2 | TFORF0508 | 2 |
| TFORF3303 | 2 | TFORF1849 | 2 | TFORF0078 | 2 | TFORF0509 | 2 |
| TFORF3304 | 2 | TFORF2078 | 2 | TFORF3405 | 2 | TFORF1922 | 2 |
| TFORF0769 | 2 | TFORF2079 | 2 | TFORF3505 | 2 | TFORF1923 | 2 |
| TFORF0770 | 2 | TFORF2080 | 2 | TFORF2855 | 2 | TFORF3084 | 2 |
| TFORF0771 | 2 | TFORF2081 | 2 | TFORF2856 | 2 | TFORF1994 | 2 |
| TFORF2913 | 2 | TFORF2782 | 2 | TFORF2340 | 2 | TFORF2096 | 2 |
| TFORF2914 | 2 | TFORF1507 | 2 | TFORF2341 | 2 | TFORF2097 | 2 |
| TFORF2915 | 2 | TFORF3136 | 2 | TFORF2342 | 2 | TFORF2098 | 2 |
| TFORF2916 | 2 | TFORF3137 | 2 | TFORF2343 | 2 | TFORF3212 | 2 |
| TFORF2917 | 2 | TFORF0001 | 2 | TFORF2344 | 2 | | |
| TFORF2918 | 2 | TFORF0002 | 2 | TFORF2345 | 2 | | |
| TFORF2919 | 2 | TFORF0003 | 2 | TFORF2346 | 2 | | |
| TFORF2920 | 2 | TFORF0004 | 2 | TFORF3303 | 2 | | |
| TFORF3427 | 2 | TFORF0005 | 2 | TFORF3304 | 2 | | |
| TFORF0366 | 2 | TFORF2849 | 2 | TFORF2921 | 2 | | |
| TFORF0367 | 2 | TFORF2850 | 2 | TFORF2922 | 2 | | |
| TFORF0368 | 2 | TFORF2851 | 2 | TFORF2923 | 2 | | |
| TFORF0369 | 2 | TFORF2852 | 2 | TFORF2924 | 2 | | |
| TFORF0370 | 2 | TFORF2853 | 2 | TFORF2913 | 2 | | |
| TFORF0371 | 2 | TFORF0576 | 2 | TFORF2914 | 2 | | |
| TFORF3002 | 2 | TFORF3283 | 2 | TFORF2915 | 2 | | |
| TFORF2016 | 2 | TFORF3288 | 2 | TFORF2916 | 2 | | |
| TFORF2017 | 2 | TFORF0879 | 2 | TFORF2917 | 2 | | |
| TFORF3348 | 2 | TFORF0880 | 2 | TFORF2918 | 2 | | |
| TFORF1054 | 2 | TFORF0881 | 2 | TFORF2919 | 2 | | |
| TFORF1055 | 2 | TFORF0884 | 2 | TFORF2920 | 2 | | |
| TFORF1708 | 2 | TFORF3239 | 2 | TFORF3427 | 2 | | |
| TFORF1674 | 2 | TFORF3037 | 2 | TFORF2023 | 2 | | |
| TFORF1675 | 2 | TFORF3038 | 2 | TFORF2024 | 2 | | |
| TFORF1676 | 2 | TFORF0756 | 2 | TFORF2025 | 2 | | |
| TFORF1677 | 2 | TFORF2772 | 2 | TFORF2026 | 2 | | |
| TFORF1678 | 2 | TFORF2773 | 2 | TFORF0731 | 2 | | |
| TFORF1679 | 2 | TFORF0988 | 2 | TFORF1217 | 2 | | |
| TFORF2311 | 2 | TFORF0989 | 2 | TFORF1218 | 2 | | |
| TFORF3022 | 2 | TFORF1769 | 2 | TFORF0610 | 2 | | |
| TFORF0109 | 2 | TFORF1770 | 2 | TFORF0611 | 2 | | |
| TFORF0104 | 2 | TFORF2402 | 2 | TFORF0612 | 2 | | |
| TFORF3314 | 2 | TFORF2403 | 2 | TFORF3253 | 2 | | |
| TFORF1047 | 2 | TFORF3418 | 2 | TFORF2597 | 2 | | |
| TFORF0584 | 2 | TFORF2927 | 2 | TFORF2598 | 2 | | |
| TFORF3123 | 2 | TFORF2928 | 2 | TFORF2599 | 2 | | |
| TFORF1973 | 2 | TFORF2929 | 2 | TFORF2987 | 2 | | |
| TFORF1974 | 2 | TFORF2930 | 2 | TFORF2258 | 2 | | |
| | | TFORF2016 | 2 | TFORF1696 | 2 | | |
| | | TFORF2017 | 2 | TFORF2294 | 2 | | |
| | | TFORF3348 | 2 | TFORF2245 | 2 | | |
| | | TFORF1316 | 2 | TFORF2246 | 2 | | |
| | | TFORF1317 | 2 | TFORF2247 | 2 | | |
| | | TFORF1674 | 2 | TFORF2248 | 2 | | |
| | | TFORF1675 | 2 | TFORF2249 | 2 | | |
| | | TFORF1676 | 2 | TFORF1902 | 2 | | |
| | | TFORF1677 | 2 | TFORF1903 | 2 | | |
| | | TFORF1678 | 2 | TFORF1904 | 2 | | |
| | | TFORF1679 | 2 | TFORF1905 | 2 | | |
| | | TFORF0379 | 2 | TFORF1906 | 2 | | |
| | | TFORF0380 | 2 | TFORF1907 | 2 | | |
| | | TFORF0381 | 2 | TFORF1908 | 2 | | |
| | | TFORF0382 | 2 | TFORF1909 | 2 | | |
| | | TFORF0383 | 2 | TFORF1910 | 2 | | |
| | | TFORF0384 | 2 | TFORF1911 | 2 | | |
| | | TFORF1652 | 2 | TFORF1912 | 2 | | |
| | | TFORF1653 | 2 | TFORF1913 | 2 | | |
| | | TFORF1902 | 2 | TFORF3417 | 2 | | |
| | | TFORF1903 | 2 | TFORF1457 | 2 | | |
| | | TFORF1904 | 2 | TFORF1458 | 2 | | |
| | | TFORF1905 | 2 | TFORF2934 | 2 | | |
| | | TFORF1906 | 2 | TFORF3376 | 2 | | |
| | | TFORF1907 | 2 | TFORF3084 | 2 | | |
| | | TFORF1908 | 2 | TFORF2398 | 2 | | |
| | | TFORF1909 | 2 | TFORF2388 | 2 | | |
| | | TFORF1910 | 2 | TFORF1988 | 2 | | |
| | | TFORF1911 | 2 | TFORF0009 | 2 | | |
| | | TFORF1912 | 2 | | | | |
| | | TFORF1913 | 2 | | | | |
| | | TFORF3417 | 2 | | | | |
| | | TFORF2689 | 2 | | | | |
| | | TFORF2690 | 2 | | | | |
| | | TFORF2691 | 2 | | | | |
| | | TFORF2985 | 2 | | | | |
| | | TFORF1039 | 2 | | | | |
| | | TFORF1040 | 2 | | | | |
| | | TFORF1041 | 2 | | | | |
| | | TFORF1042 | 2 | | | | |
| | | TFORF1419 | 2 | | | | |
| | | TFORF3529 | 2 | | | | |
| | | TFORF2096 | 2 | | | | |
| | | TFORF2097 | 2 | | | | |
| | | TFORF2098 | 2 | | | | |
| | | TFORF3212 | 2 | | | | |

TABLE 8
Genes with TF ChIP-seq peaks (see, U.S. provisional application 63/219,705
filed Jul. 8, 2021). For each TF, genes with transcriptional start sites that
that were within 10 kb of the TF ChIP-seq peak region identified by MACS.

| | | |
|---|---|---|
| Endothelial TFs | Epithelial TFs | Limb muscle TFs |

| Table 3 Name | nDatasets | Table 3 Name | nDatasets | Table 3 Name | nDatasets |
|---|---|---|---|---|---|
| TFORF1852 | 5 | TFORF2209 | 2 | TFORF2946 | 4 |
| TFORF2926 | 4 | TFORF2210 | 2 | TFORF0526 | 4 |
| TFORF1995 | 4 | TFORF2211 | 2 | TFORF0527 | 4 |
| TFORF3081 | 3 | TFORF2212 | 2 | TFORF3020 | 4 |
| TFORF0960 | 3 | TFORF2694 | 2 | TFORF0956 | 3 |
| TFORF0961 | 3 | TFORF2695 | 2 | TFORF0101 | 2 |
| TFORF0962 | 3 | TFORF2696 | 2 | TFORF3361 | 2 |
| TFORF0963 | 3 | TFORF3109 | 2 | TFORF2641 | 2 |
| TFORF0964 | 3 | TFORF3366 | 2 | TFORF2642 | 2 |
| TFORF3192 | 3 | TFORF2163 | 2 | TFORF2643 | 2 |
| TFORF2260 | 3 | TFORF2164 | 2 | TFORF2644 | 2 |
| TFORF0171 | 3 | TFORF2165 | 2 | TFORF2645 | 2 |
| TFORF3075 | 2 | TFORF2166 | 2 | TFORF2646 | 2 |
| TFORF2801 | 2 | TFORF2167 | 2 | TFORF2647 | 2 |
| TFORF2802 | 2 | TFORF2168 | 2 | TFORF2648 | 2 |
| TFORF2803 | 2 | TFORF0689 | 2 | TFORF2016 | 2 |
| TFORF2804 | 2 | TFORF0690 | 2 | TFORF2017 | 2 |
| TFORF0024 | 2 | TFORF2954 | 2 | TFORF3348 | 2 |
| TFORF1140 | 2 | TFORF2464 | 2 | TFORF1219 | 2 |
| TFORF1141 | 2 | TFORF2465 | 2 | TFORF1919 | 2 |
| TFORF1142 | 2 | TFORF0056 | 2 | TFORF1920 | 2 |
| TFORF1143 | 2 | TFORF0057 | 2 | TFORF3473 | 2 |
| TFORF0987 | 2 | TFORF0058 | 2 | TFORF2568 | 2 |
| TFORF0978 | 2 | | | TFORF2569 | 2 |
| TFORF0979 | 2 | | | TFORF2570 | 2 |
| TFORF0980 | 2 | | | TFORF2996 | 2 |
| TFORF3464 | 2 | | | | |
| TFORF0587 | 2 | | | | |
| TFORF3163 | 2 | | | | |
| TFORF2537 | 2 | | | | |

| Endothelial Markers | | Epithelial Markers | | Limb muscle Markers | |
|---|---|---|---|---|---|
| Gene | nDatasets | Gene | nDatasets | Gene | nDatasets |
| CLDN5 | 6 | KRT8 | 5 | FLNC | 3 |
| CD34 | 6 | KRT18 | 4 | VCAM1 | 3 |
| TEK | 6 | CLDN6 | 4 | TNFRSF12A | 3 |
| CDH5 | 5 | KRT7 | 4 | CD82 | 3 |
| RAMP2 | 5 | EPCAM | 4 | SDC4 | 3 |
| FLT1 | 5 | KRT19 | 3 | ERRFI1 | 2 |
| PECAM1 | 5 | CDH1 | 3 | MEG3 | 2 |
| ECSCR | 5 | CLDN7 | 3 | CDKN1A | 2 |
| ICAM2 | 5 | SPINT2 | 3 | ITGA7 | 2 |
| EGFL7 | 5 | SPINT1 | 3 | PDLIM4 | 2 |
| ESAM | 5 | KRT20 | 3 | GPX3 | 2 |
| ARHGEF15 | 4 | AP1M2 | 2 | FBN2 | 2 |
| EMCN | 4 | PPAP2A | 2 | SYTL2 | 2 |
| SHE | 4 | ADH6A | 2 | ASB5 | 2 |
| CD93 | 4 | CBLC | 2 | VGLL2 | 2 |
| FLT4 | 4 | CNDP2 | 2 | VGLL3 | 2 |
| MMRN2 | 4 | MYL12B | 2 | ODC1 | 2 |
| GIMAP4 | 4 | CLEC2H | 2 | SEMA6A | 2 |
| GNG11 | 4 | ITGA3 | 2 | MUSK | 2 |
| PLVAP | 4 | APOA4 | 2 | CRLF1 | 2 |
| KLHL4 | 4 | LSR | 2 | FGFR4 | 2 |
| CTLA2A | 4 | REG3A | 2 | FGFR1 | 2 |
| EXOC3L | 4 | MOGAT2 | 2 | CHODL | 2 |
| MYCT1 | 4 | SLC39A4 | 2 | PDPN | 2 |
| GPR116 | 3 | CYP2D26 | 2 | NPPC | 2 |
| RASGRP3 | 3 | KRT14 | 2 | CHRNB1 | 2 |
| MYZAP | 3 | MYH14 | 2 | CD63 | 2 |
| SRGAP1 | 3 | COX7A1 | 2 | CDH15 | 2 |
| TFPI | 3 | ENPEP | 2 | GAL | 2 |
| SCARF1 | 3 | MME | 2 | HNRNPA2B1 | 2 |
| SH2D3C | 3 | CYP3A13 | 2 | FAM132B | 2 |
| ACER2 | 3 | IGSF9 | 2 | RPL6 | 2 |
| SPTBN1 | 3 | RDH7 | 2 | DES | 2 |
| N4BP3 | 3 | CYP2C65 | 2 | NACA | 2 |
| NOS3 | 3 | CYP2C66 | 2 | TENM4 | 2 |
| CD40 | 3 | HSD17B6 | 2 | ARL4D | 2 |
| CMTM3 | 3 | CYB5B | 2 | | |
| PRCP | 3 | GSTM6 | 2 | | |
| PLXND1 | 3 | GSTA1 | 2 | | |
| SH3BP5 | 3 | DHRS1 | 2 | | |
| VIM | 3 | LAD1 | 2 | | |
| CTLA2B | 3 | SLC2A2 | 2 | | |
| CALCRL | 3 | XPNPEP1 | 2 | | |
| ENG | 3 | OCM | 2 | | |
| PCDH12 | 3 | RETSAT | 2 | | |
| S1PR1 | 3 | EPHX2 | 2 | | |
| FGD5 | 3 | CAR4 | 2 | | |
| ARAP3 | 3 | FABP1 | 2 | | |
| CD38 | 3 | SLC5A1 | 2 | | |
| CAV1 | 3 | FRK | 2 | | |
| THSD1 | 3 | CKMT1 | 2 | | |
| TIE1 | 3 | CYP3A25 | 2 | | |
| RASIP1 | 3 | SLC16A1 | 2 | | |
| TMEM204 | 3 | PHGR1 | 2 | | |
| BC028528 | 3 | CKB | 2 | | |
| ANXA3 | 3 | APOC3 | 2 | | |
| FAM43A | 3 | 2200002D01RIK | 2 | | |
| KANK3 | 3 | NAALADL1 | 2 | | |
| KCNE3 | 3 | UPK1B | 2 | | |
| PLK2 | 3 | GSTA4 | 2 | | |
| EDN1 | 3 | GLT28D2 | 2 | | |
| KLHL6 | 3 | MYO5C | 2 | | |
| ACVRL1 | 3 | UGDH | 2 | | |
| RHOJ | 3 | PRLR | 2 | | |
| GRAP | 3 | XDH | 2 | | |
| VAMP5 | 3 | VIL1 | 2 | | |
| PTPRB | 3 | MAL2 | 2 | | |
| GPM6B | 2 | H2-Q2 | 2 | | |
| GPR182 | 2 | LCT | 2 | | |
| APBB2 | 2 | MS4A10 | 2 | | |
| DYSF | 2 | KRT5 | 2 | | |
| TMEM184B | 2 | CEACAM20 | 2 | | |
| GAP43 | 2 | SLC34A2 | 2 | | |
| CSGALNACT1 | 2 | GSTM3 | 2 | | |
| FMNL3 | 2 | WNT6 | 2 | | |
| FLNB | 2 | WNT4 | 2 | | |
| TMEM88 | 2 | RIPK4 | 2 | | |
| MCAM | 2 | GPD1 | 2 | | |
| GJA4 | 2 | LPGAT1 | 2 | | |
| IL2RG | 2 | ALDH1A1 | 2 | | |
| PRKD2 | 2 | ANPEP | 2 | | |
| NPR1 | 2 | ALDOB | 2 | | |
| PFN1 | 2 | CASP6 | 2 | | |
| TSPAN18 | 2 | FAM213A | 2 | | |
| TMEM173 | 2 | FAM160A1 | 2 | | |
| CLEC1A | 2 | KHK | 2 | | |
| ELTD1 | 2 | RBP2 | 2 | | |
| ADORA2A | 2 | PRAP1 | 2 | | |
| NID1 | 2 | TREH | 2 | | |
| ITPKB | 2 | ACSL5 | 2 | | |
| TDRP | 2 | GRB7 | 2 | | |
| IGF1 | 2 | DPEP1 | 2 | | |
| APLNR | 2 | ABCB1A | 2 | | |
| RALB | 2 | GRAMD3 | 2 | | |
| HDAC7 | 2 | SLC26A3 | 2 | | |
| FABP4 | 2 | WFDC2 | 2 | | |
| HSPA12B | 2 | BCAM | 2 | | |
| HBB-BS | 2 | MEP1A | 2 | | |
| SIPA1 | 2 | SLC51A | 2 | | |
| VGLL4 | 2 | SLC51B | 2 | | |
| DLL4 | 2 | MTTP | 2 | | |
| OIT3 | 2 | SULT1B1 | 2 | | |
| TJP1 | 2 | ACE | 2 | | |
| LPAR6 | 2 | EPHA1 | 2 | | |
| AMOTL1 | 2 | CYB5R3 | 2 | | |
| STAB1 | 2 | SLC7A9 | 2 | | |
| ECE1 | 2 | SLC13A1 | 2 | | |
| ICA1 | 2 | FERMT1 | 2 | | |
| PRKCH | 2 | GDA | 2 | | |
| CARD10 | 2 | SCP2 | 2 | | |
| ROCK2 | 2 | BEX1 | 2 | | |
| LYVE1 | 2 | TMPRSS2 | 2 | | |
| RAPGEF4 | 2 | AMN | 2 | | |
| CAV2 | 2 | | | | |
| PPP1R2 | 2 | | | | |
| MAP3K3 | 2 | | | | |
| STAP2 | 2 | | | | |
| CTSW | 2 | | | | |
| ADCY4 | 2 | | | | |
| PTPN12 | 2 | | | | |
| PPFIBP1 | 2 | | | | |
| CCM2L | 2 | | | | |
| FKBP1A | 2 | | | | |
| HSPG2 | 2 | | | | |
| KIF26A | 2 | | | | |
| SLC31A2 | 2 | | | | |
| LIMCH1 | 2 | | | | |
| MALL | 2 | | | | |
| GIMAP8 | 2 | | | | |
| GIMAP6 | 2 | | | | |
| HAPLN1 | 2 | | | | |
| GRK5 | 2 | | | | |
| VEGFC | 2 | | | | |
| MYO1C | 2 | | | | |
| CD81 | 2 | | | | |
| CCDC85B | 2 | | | | |
| COLGALT2 | 2 | | | | |
| MAP4K2 | 2 | | | | |
| YES1 | 2 | | | | |
| RGS3 | 2 | | | | |
| PEAK1 | 2 | | | | |
| COL18A1 | 2 | | | | |
| PIEZO2 | 2 | | | | |
| PKN3 | 2 | | | | |
| CYYR1 | 2 | | | | |
| CASP7 | 2 | | | | |
| CNRIP1 | 2 | | | | |
| FXYD5 | 2 | | | | |
| S100A16 | 2 | | | | |
| MRC1 | 2 | | | | |
| DENND3 | 2 | | | | |
| ARHGAP27 | 2 | | | | |
| VWA1 | 2 | | | | |
| AU021092 | 2 | | | | |
| KCTD12 | 2 | | | | |
| ROBO4 | 2 | | | | |
| AFAP1L1 | 2 | | | | |
| USHBP1 | 2 | | | | |
| ABCB1A | 2 | | | | |
| PREX2 | 2 | | | | |
| PGM1 | 2 | | | | |
| ITPR3 | 2 | | | | |
| GNAI2 | 2 | | | | |
| RASSF2 | 2 | | | | |
| LRRC8C | 2 | | | | |
| C130074G19RIK | 2 | | | | |
| EOGT | 2 | | | | |
| PODXL | 2 | | | | |
| MSN | 2 | | | | |
| SLC9A3R2 | 2 | | | | |
| DOK4 | 2 | | | | |
| GNGT2 | 2 | | | | |
| ADGRF5 | 2 | | | | |
| PCDH1 | 2 | | | | |
| LY6C1 | 2 | | | | |
| ESM1 | 2 | | | | |

TABLE 9
Lists of marker genes and TFs for applying TF screening to additional cell types. For some additional cell
types, Applicants have recommended lists of marker genes and TFs based on published RNA-seq datasets.

| Cardiomyocte Markers | | Hepatocyte Markers | | HSC Markers | | Oligodendrocyte Markers | |
|---|---|---|---|---|---|---|---|
| Gene | nDatasets | Gene | nDatasets | Gene | nDatasets | Gene | nDatasets |
| MYL4 | 8 | ALB | 9 | MPL | 5 | MOG | 10 |
| MYH7 | 8 | ASS1 | 6 | GUCY1A3 | 4 | MAG | 8 |
| NEBL | 7 | APOA1 | 6 | PROCR | 4 | MAL | 8 |
| NPPA | 7 | AGT | 5 | KIT | 4 | PDGFRA | 8 |
| TNNC1 | 7 | GC | 5 | TSPAN32 | 4 | OPALIN | 8 |
| MYH6 | 7 | MGST1 | 5 | SERPINF1 | 4 | CLDN11 | 8 |
| CSRP3 | 7 | TTR | 5 | SPNS2 | 3 | MOBP | 7 |
| MYL7 | 7 | PCK1 | 5 | RAB27B | 3 | PLEKHH1 | 7 |
| PLN | 7 | KNG1 | 5 | PPP1R11 | 3 | ITPR2 | 7 |
| TPM1 | 6 | CYP2E1 | 5 | DEF6 | 3 | QDPR | 7 |
| SMPX | 6 | HAL | 5 | GCNT2 | 3 | CNP | 7 |
| NPPB | 6 | FN1 | 5 | RBP1 | 3 | ERMN | 7 |
| ACTC1 | 6 | APOH | 5 | DAPP1 | 3 | TNR | 7 |
| MYL2 | 6 | AHSG | 5 | BEX1 | 3 | ASPA | 7 |
| CRYAB | 6 | ASL | 5 | IGF1R | 3 | PLLP | 6 |
| TTN | 5 | ALDOB | 5 | SLC18A2 | 3 | SIRT2 | 6 |
| SH3BGR | 5 | APOA2 | 4 | ZFP467 | 3 | LHFPL3 | 6 |
| PPP1R3C | 5 | FTCD | 4 | OSBPL1A | 3 | PTPRZ1 | 6 |
| ACTN2 | 5 | SC5D | 4 | ANGPT1 | 3 | CDK18 | 6 |
| FITM1 | 5 | CTH | 4 | ENG | 3 | FA2H | 6 |
| RRAD | 5 | GPT2 | 4 | F10 | 3 | PCDH15 | 6 |
| MYBPC3 | 5 | SULT1A1 | 4 | CAR2 | 3 | HAPLN2 | 6 |
| FHL2 | 5 | TCEA3 | 4 | PRKCA | 3 | SLC44A1 | 6 |
| MDH1 | 5 | PIPOX | 4 | PDZK1IP1 | 3 | BCAN | 6 |
| ADPRHL1 | 5 | SPP2 | 4 | WAS | 3 | ANLN | 6 |
| CSRP2 | 5 | DPYS | 4 | MSI2 | 3 | UGT8A | 6 |
| TNNT2 | 5 | CFI | 4 | GSE1 | 3 | APOD | 6 |
| LRRC10 | 5 | CFB | 4 | RBPMS | 3 | CNTN2 | 6 |
| TNNI3 | 5 | HAMP | 4 | DUSP2 | 3 | GPR17 | 6 |
| TNNI1 | 5 | ITIH3 | 4 | LYZ2 | 3 | LG13 | 6 |
| MYL3 | 5 | AFM | 4 | CDKN1C | 3 | EPN2 | 6 |
| MYL9 | 5 | PROZ | 4 | APOE | 3 | TMEFF2 | 6 |
| HSPB7 | 5 | AZGP1 | 4 | VWF | 3 | HHIP | 6 |
| HSPB2 | 5 | PROC | 4 | LTB | 3 | PLP1 | 6 |
| ANKRD1 | 5 | EPHX2 | 4 | LGALS3BP | 3 | ABCA2 | 6 |
| MYLK3 | 4 | ETFA | 4 | GNG11 | 3 | TMEM88B | 6 |
| SLC25A4 | 4 | ASGR2 | 4 | IFITM1 | 3 | MBP | 6 |
| TCAP | 4 | GCGR | 4 | CTLA2A | 3 | OPHN1 | 5 |
| VSNL1 | 4 | PAH | 4 | CDC42BPA | 3 | PHLDB1 | 5 |
| PPP1R14C | 4 | MASP2 | 4 | BLVRB | 3 | SECISBP2L | 5 |
| ENO3 | 4 | ACOX2 | 4 | VAMP8 | 3 | FYN | 5 |
| SORBS2 | 4 | DMGDH | 4 | CBFA2T3 | 3 | KANK1 | 5 |
| LDB3 | 4 | C3 | 4 | TNIP3 | 3 | GJC3 | 5 |
| NEXN | 4 | HMGCS2 | 4 | RBM38 | 3 | TUBB4A | 5 |
| APOBEC2 | 4 | SORD | 4 | GIMAP5 | 3 | GJB1 | 5 |
| MYOM1 | 4 | CP | 4 | MLLT3 | 3 | PPP1R14A | 5 |
| DES | 4 | HPX | 4 | MYCT1 | 3 | CASK | 5 |
| COX6A2 | 4 | AADAC | 4 | MAGED2 | 3 | EDIL3 | 5 |
| PDLIM5 | 4 | HPN | 4 | TRIM47 | 3 | VCAN | 5 |
| TRIM55 | 4 | EBP | 4 | ESAM | 3 | CHN2 | 5 |
| COX5A | 4 | FBP1 | 4 | KRT18 | 3 | DOCK5 | 5 |
| POPDC2 | 4 | RBP4 | 4 | SGMS1 | 3 | FRMD4B | 5 |
| SMYD1 | 4 | ACSL1 | 4 | ITIH5 | 3 | SERPINE2 | 5 |
| PGAM2 | 4 | HP | 4 | GABARAPL1 | 3 | SLC35F1 | 5 |
| TRIM63 | 4 | GNMT | 4 | PIK3IP1 | 3 | NTM | 5 |
| THBS4 | 4 | ERRFI1 | 4 | NRGN | 3 | SNX22 | 5 |
| AGL | 3 | HSD17B13 | 4 | AFAP1L1 | 3 | NEU4 | 5 |
| ASB2 | 3 | APOC4 | 4 | RAB38 | 3 | AATK | 5 |
| KCNG2 | 3 | ECHDC2 | 4 | LAPTM5 | 2 | DOCK10 | 5 |
| BVES | 3 | AC01 | 4 | SLC50A1 | 2 | BCAS1 | 5 |
| LRRC39 | 3 | SLC27A2 | 4 | CAMK1 | 2 | CRYAB | 5 |
| ABRA | 3 | ABAT | 4 | GRINA | 2 | ENPP6 | 5 |
| CKM | 3 | BHMT2 | 4 | FAM84B | 2 | ENPP2 | 5 |
| SLC25A5 | 3 | GJB1 | 4 | SNN | 2 | TSPAN2 | 5 |
| TMEM176B | 3 | GRHPR | 4 | TRAPPC5 | 2 | LUZP2 | 5 |
| CHCHD10 | 3 | F12 | 4 | MGST1 | 2 | ZFP488 | 4 |
| VDAC2 | 3 | SERPINA10 | 4 | GPRASP2 | 2 | PPP2R2B | 4 |
| COL1A1 | 3 | HAAO | 4 | DSEL | 2 | DBNDD2 | 4 |
| TAGLN | 3 | AMDHD1 | 4 | THSD1 | 2 | KNDC1 | 4 |
| MPPED2 | 3 | F13B | 4 | COL4A2 | 2 | KLK6 | 4 |
| RASSF5 | 3 | ACOX1 | 4 | COL4A1 | 2 | LSAMP | 4 |
| ADM | 3 | BDH1 | 4 | CHST2 | 2 | NXPH1 | 4 |
| CCDC141 | 3 | GCKR | 4 | RPS6KA6 | 2 | SEZ6L | 4 |
| ALPK2 | 3 | GOT2 | 4 | KHK | 2 | ALCAM | 4 |
| MB | 3 | SLC25A47 | 4 | NPHP1 | 2 | TRIO | 4 |
| CNN1 | 3 | SDC4 | 4 | IGF2R | 2 | SMOC1 | 4 |
| HRC | 3 | SERPINA6 | 4 | ART4 | 2 | NINJ2 | 4 |
| GYG | 3 | ALDH6A1 | 4 | SULT1A1 | 2 | POLR3E | 4 |
| TECRL | 3 | AKR1D1 | 4 | CCDC112 | 2 | NTRK3 | 4 |
| IDH2 | 3 | ANGPTL3 | 4 | CXXC5 | 2 | ARHGAP23 | 4 |
| RBPMS | 3 | TST | 4 | IPO11 | 2 | PPP1R16B | 4 |
| PPP1R12B | 3 | APOF | 4 | SASH3 | 2 | ABHD2 | 4 |
| BMP10 | 3 | APOB | 4 | TRIM16 | 2 | OPCML | 4 |
| IDH3A | 3 | APOM | 4 | PPP2R3A | 2 | GJC2 | 4 |
| JPH2 | 3 | MST1 | 4 | CSAD | 2 | TRAF4 | 4 |
| ACTA2 | 3 | ALDH8A1 | 4 | SERINC3 | 2 | NOVA1 | 4 |
| MYO18B | 3 | LIPC | 4 | PINK1 | 2 | PTGDS | 4 |
| XIRP1 | 3 | HGFAC | 4 | PRKG1 | 2 | SORT1 | 4 |
| FBXO32 | 3 | VTN | 4 | PPP1R9A | 2 | SLC1A2 | 4 |
| ANXA2 | 3 | PON1 | 4 | IGF2 | 2 | OSBPL1A | 4 |
| COX7A1 | 3 | PXMP2 | 4 | PHLDB1 | 2 | DNAJB2 | 4 |
| CAV1 | 3 | OTC | 4 | GJA1 | 2 | SLC24A2 | 4 |
| PRELID2 | 3 | SERPINC1 | 4 | MFNG | 2 | GAL3ST1 | 4 |
| SYNPO2L | 3 | SHMT1 | 4 | TXNIP | 2 | MATN4 | 4 |
| S100A10 | 3 | BHMT | 4 | ITGA2B | 2 | MARCKS | 4 |
| FSD2 | 3 | FAH | 4 | KTN1 | 2 | ERBB3 | 4 |
| MYOZ2 | 3 | UPB1 | 4 | PCBD1 | 2 | TMEM108 | 4 |
| CCND2 | 3 | HADH | 4 | MMRN1 | 2 | NKAIN2 | 4 |
| PDLIM3 | 3 | PANK1 | 4 | ARHGAP31 | 2 | EFHD1 | 4 |
| CRIP2 | 3 | F2 | 4 | CD34 | 2 | ZDHHC20 | 4 |
| POPDC3 | 3 | F7 | 4 | IGF2BP2 | 2 | NRCAM | 4 |
| FABP3 | 3 | GSTZ1 | 4 | MBNL1 | 2 | BRINP3 | 4 |
| TRDN | 3 | ACAA2 | 4 | PER3 | 2 | SLC5A11 | 4 |
| SLC8A1 | 3 | HGD | 4 | TMEM176A | 2 | TRF | 4 |
| CYCS | 3 | MAT1A | 4 | TMEM176B | 2 | CARNS1 | 4 |
| TMOD1 | 3 | SLC25A13 | 4 | PTPN18 | 2 | PACS2 | 4 |
| RYR2 | 3 | FGG | 4 | F2R | 2 | HIPK2 | 4 |
| DSTN | 3 | FGA | 4 | H19 | 2 | SEMA4D | 4 |
| UNC45B | 3 | FGB | 4 | LARGE | 2 | MMP16 | 4 |
| LDHA | 3 | SERPIND1 | 4 | ECSCR | 2 | TMEM125 | 4 |
| LINC00881 | 3 | MAOB | 4 | CX3CL1 | 2 | CPOX | 4 |
| ATP2A2 | 2 | FABP1 | 4 | ZFP532 | 2 | NLGN1 | 4 |
| ITGA6 | 2 | ITIH1 | 4 | OBSL1 | 2 | PLEKHA1 | 4 |
| H19 | 2 | ITIH2 | 4 | SRC | 2 | CNTN1 | 4 |
| COL4A5 | 2 | ITIH4 | 4 | SORD | 2 | GATM | 4 |
| KCNH2 | 2 | ALDH2 | 4 | AGPAT4 | 2 | CERCAM | 4 |
| FAM134B | 2 | KLKB1 | 4 | MYO10 | 2 | CHST11 | 4 |
| SPARC | 2 | APOC1 | 4 | SLC48A1 | 2 | GPR37 | 4 |
| PRKAR1B | 2 | C1RL | 4 | EYA1 | 2 | CTNND2 | 4 |
| CLIP4 | 2 | CPB2 | 4 | SIGIRR | 2 | SH3GL3 | 4 |
| HOMER1 | 2 | PLG | 4 | CALCRL | 2 | TTYH2 | 4 |
| NDUFA4L2 | 2 | C8B | 4 | IL11RA1 | 2 | CSPG4 | 4 |
| UQCRC2 | 2 | GPD1 | 4 | KLHL7 | 2 | C1QL1 | 4 |
| UQCRC1 | 2 | C8G | 4 | PTGS1 | 2 | FNBP1 | 4 |
| IGFBP5 | 2 | AMBP | 4 | ZFAND5 | 2 | COL9A1 | 4 |
| GJA1 | 2 | SUCLG2 | 4 | CREBRF | 2 | SLAIN1 | 4 |
| MLF1 | 2 | ALDH1L1 | 4 | PPP1R16B | 2 | DSCAM | 4 |
| ALCAM | 2 | BCHE | 4 | PTOV1 | 2 | SRCIN1 | 4 |
| TGFBR3 | 2 | G6PC | 4 | CHD9 | 2 | GRB14 | 4 |
| MYH7B | 2 | SERPINF1 | 4 | TTC3 | 2 | CSRP1 | 4 |
| SLC16A3 | 2 | SERPINF2 | 4 | TTC8 | 2 | PDLIM2 | 4 |
| QK | 2 | SCP2 | 4 | DCUN1D1 | 2 | NFASC | 4 |
| PAM | 2 | TMEM56 | 3 | DYNC1LI2 | 2 | TNK2 | 4 |
| CACNA1C | 2 | ABCD3 | 3 | F11R | 2 | PLCL1 | 4 |
| CACNA1D | 2 | ORM1 | 3 | ABCG1 | 2 | TMEM151A | 4 |
| SLC25A3 | 2 | MGST2 | 3 | ABCG2 | 2 | KIF13A | 4 |
| TMEM176A | 2 | APOA5 | 3 | DEPTOR | 2 | COL11A1 | 4 |
| SRSF1 | 2 | DGAT2 | 3 | USP54 | 2 | SLC12A2 | 4 |
| PPM1K | 2 | SHROOM1 | 3 | MAPK14 | 2 | JAM3 | 4 |
| PPARGC1B | 2 | NIPSNAP1 | 3 | TEK | 2 | GRIA3 | 4 |
| TMEM71 | 2 | FAM20A | 3 | FZD6 | 2 | JOSD2 | 4 |
| PRKAB2 | 2 | FGL1 | 3 | ZFP521 | 2 | OMG | 4 |
| MSRB3 | 2 | AASS | 3 | CACNB2 | 2 | ARAP2 | 4 |
| VDAC1 | 2 | ETNK2 | 3 | SLA2 | 2 | KCND2 | 4 |
| SRL | 2 | CFH | 3 | NEURL3 | 2 | PEX5L | 4 |
| MYL12A | 2 | AGMO | 3 | MAMDC2 | 2 | GPR37L1 | 4 |
| EIF1B | 2 | SLC47A1 | 3 | GPR125 | 2 | CDH13 | 4 |
| RGS5 | 2 | DBI | 3 | TTC14 | 2 | MAP4K5 | 4 |
| RGS6 | 2 | IGFBP2 | 3 | P2RX1 | 2 | MAP4K4 | 4 |
| C530008M17RIK | 2 | CYP8B1 | 3 | BEX4 | 2 | S100B | 4 |
| PTP4A3 | 2 | GLYCTK | 3 | HOOK1 | 2 | ERBB2IP | 4 |
| BMP2 | 2 | CYP27A1 | 3 | ELTD1 | 2 | APLP1 | 4 |
| CAP2 | 2 | FETUB | 3 | KLRB1C | 2 | GSN | 4 |
| NPC2 | 2 | QPRT | 3 | RYK | 2 | ENPP4 | 4 |
| KLHL41 | 2 | ASGR1 | 3 | CTNNAL1 | 2 | CSPG5 | 4 |
| CACNB2 | 2 | PRDX6 | 3 | PEG12 | 2 | DNM3 | 4 |
| ADO | 2 | UQCRQ | 3 | DSP | 2 | SCRG1 | 4 |
| FHOD3 | 2 | GPAM | 3 | HID1 | 2 | PDCD4 | 4 |
| FAM195A | 2 | FAM46A | 3 | WDFY3 | 2 | TPRN | 3 |
| CORO6 | 2 | LYPLA1 | 3 | ACP5 | 2 | SH3D19 | 3 |
| 3425401B19RIK | 2 | HMGCL | 3 | CUEDC1 | 2 | ZFYVE16 | 3 |
| SDHD | 2 | SLC25A1 | 3 | SCARF1 | 2 | BIN1 | 3 |
| MTUS2 | 2 | TMEM176A | 3 | AK3 | 2 | CDC37L1 | 3 |
| HCN4 | 2 | TMEM176B | 3 | PRKD1 | 2 | NIPAL4 | 3 |
| KLHL31 | 2 | DNAJC22 | 3 | CTTN | 2 | PDE8A | 3 |
| DSP | 2 | HABP2 | 3 | MATK | 2 | NRXN1 | 3 |
| ACAT1 | 2 | NDRG2 | 3 | TGM2 | 2 | PAK4 | 3 |
| TOB1 | 2 | ACADM | 3 | LRRC49 | 2 | DPYSL2 | 3 |
| LRRC4B | 2 | NNMT | 3 | FCHSD2 | 2 | TRIM2 | 3 |
| ATP5B | 2 | CHCHD10 | 3 | ZFP184 | 2 | ARPP21 | 3 |
| FAM189A2 | 2 | ADI1 | 3 | MADD | 2 | NLGN2 | 3 |
| PALM2 | 2 | C9 | 3 | CYP26B1 | 2 | KCNIP1 | 3 |
| PRSS23 | 2 | TMEM205 | 3 | FZD3 | 2 | GAB1 | 3 |
| ATP5A1 | 2 | C2 | 3 | TRIM6 | 2 | MYO1D | 3 |
| FGF12 | 2 | HMGCS1 | 3 | PTPRCAP | 2 | AGPAT4 | 3 |
| HAPLN3 | 2 | GALM | 3 | SUGP2 | 2 | SLC48A1 | 3 |
| OBSCN | 2 | ALDH1A1 | 3 | CLU | 2 | CALCRL | 3 |
| PRKAA2 | 2 | GCDH | 3 | OGT | 2 | FXYD6 | 3 |
| SPHKAP | 2 | PCYOX1 | 3 | SPECC1 | 2 | BMP4 | 3 |
| LMNA | 2 | IL1RAP | 3 | H2-K1 | 2 | TRIM36 | 3 |
| UNC13C | 2 | HPD | 3 | GULP1 | 2 | PTN | 3 |
| TPI1 | 2 | PECR | 3 | SYTL4 | 2 | SCD | 3 |
| PPP1R3B | 2 | FXYD1 | 3 | GHR | 2 | RHOU | 3 |
| PPP1R3A | 2 | SLC39A14 | 3 | TBXAS1 | 2 | PADI2 | 3 |
| PARD6B | 2 | HSDL2 | 3 | FGFR3 | 2 | TPD52 | 3 |
| SPEG | 2 | ACSL5 | 3 | FGFR1 | 2 | PDZRN4 | 3 |
| GM1821 | 2 | USMG5 | 3 | SMPDL3A | 2 | PHLPP1 | 3 |
| COL12A1 | 2 | MTTP | 3 | RAI14 | 2 | FAM155A | 3 |
| NDUFA5 | 2 | RNF128 | 3 | UBA7 | 2 | TMPRSS5 | 3 |
| WNT2 | 2 | A1CF | 3 | ARHGEF6 | 2 | TMEM165 | 3 |
| PALLD | 2 | GAMT | 3 | CPXM1 | 2 | PCDH9 | 3 |
| MEST | 2 | PHYH | 3 | TMCC1 | 2 | PCDH7 | 3 |
| NDUFS6 | 2 | DECR2 | 3 | GSTM1 | 2 | PCDH11X | 3 |
| MICAL2 | 2 | DECR1 | 3 | GSTM2 | 2 | SLC45A3 | 3 |
| GOT1 | 2 | MBL2 | 3 | TREML2 | 2 | HCN2 | 3 |
| PYGM | 2 | HSD11B1 | 3 | SAT1 | 2 | ANO4 | 3 |
| HCFC1R1 | 2 | TMPRSS6 | 3 | SAMHD1 | 2 | HIP1R | 3 |
| PGM5 | 2 | PMVK | 3 | TENC1 | 2 | GRM5 | 3 |
| FYTTD1 | 2 | SDHC | 3 | TIMP3 | 2 | DST | 3 |
| USP13 | 2 | SDHB | 3 | CCDC88A | 2 | CSGALNACT1 | 3 |
| MOV10L1 | 2 | SDHD | 3 | RNASE6 | 2 | DNAJC6 | 3 |
| BRAF | 2 | SLC38A4 | 3 | KCNN4 | 2 | SLC22A23 | 3 |
| DUSP27 | 2 | SLC38A3 | 3 | ROBO4 | 2 | GRID1 | 3 |
| ACTA1 | 2 | TTC36 | 3 | INADL | 2 | RAB33A | 3 |
| CDKN1C | 2 | TTC38 | 3 | CCDC60 | 2 | SULF2 | 3 |
| APOE | 2 | ECHDC3 | 3 | MPDZ | 2 | CDK14 | 3 |
| NAB1 | 2 | ACAT1 | 3 | TNFAIP8 | 2 | SLC24A3 | 3 |
| COL2A1 | 2 | SLC27A5 | 3 | ARHGAP29 | 2 | FRYL | 3 |
| ADSSL1 | 2 | SLC17A9 | 3 | SGCE | 2 | SETD5 | 3 |
| LMOD1 | 2 | AK3 | 3 | FERMT3 | 2 | LRRTM4 | 3 |
| LMOD3 | 2 | SLC17A2 | 3 | SERPINA3G | 2 | LRRTM3 | 3 |
| LMOD2 | 2 | BAAT | 3 | GPR56 | 2 | CAR2 | 3 |
| NRP1 | 2 | DHTKD1 | 3 | CPNE8 | 2 | S1PR5 | 3 |
| FBXL22 | 2 | EHHADH | 3 | EXOC6B | 2 | TTC28 | 3 |
| MIF | 2 | DHRS1 | 3 | ICK | 2 | SLC22A17 | 3 |
| RBM24 | 2 | PCYT2 | 3 | IQCB1 | 2 | LPAR1 | 3 |
| CENPH | 2 | LEAP2 | 3 | RHBDD2 | 2 | CAR14 | 3 |
| RAMP1 | 2 | PHGDH | 3 | ACTA2 | 2 | PTK2 | 3 |
| GPI1 | 2 | HRG | 3 | EMCN | 2 | LIMS2 | 3 |
| RRAS | 2 | ECHS1 | 3 | SETBP1 | 2 | ATP10B | 3 |
| HACD1 | 2 | SMLR1 | 3 | VEGFC | 2 | NRM | 3 |
| ALDOA | 2 | RRBP1 | 3 | MYH10 | 2 | SHC3 | 3 |
| ABRACL | 2 | AGMAT | 3 | MBOAT2 | 2 | PID1 | 3 |
| CASQ1 | 2 | F10 | 3 | ATAD2B | 2 | NKAIN1 | 3 |
| TXLNB | 2 | SARDH | 3 | ARMCX1 | 2 | CCP110 | 3 |
| ADCY5 | 2 | VKORC1 | 3 | IFI44 | 2 | TALDO1 | 3 |
| ZAK | 2 | RCL1 | 3 | FUT8 | 2 | PIP4K2A | 3 |
| DCAF12L1 | 2 | CLU | 3 | EVA1B | 2 | DPP6 | 3 |
| A2M | 2 | SLC22A18 | 3 | IFITM3 | 2 | SCD5 | 3 |
| TMEM38A | 2 | KNG2 | 3 | CGNL1 | 2 | PRUNE2 | 3 |
| PTGES3L | 2 | SERPINA1C | 3 | PABPC4L | 2 | SCN3A | 3 |
| KLHL30 | 2 | DNAJC12 | 3 | KMT2D | 2 | ELOVL7 | 3 |
| GBAS | 2 | FMO5 | 3 | PLA2G16 | 2 | ELOVL1 | 3 |
| RBM20 | 2 | IDH1 | 3 | TRPC6 | 2 | NRBP2 | 3 |
| ME2 | 2 | RGN | 3 | VGLL4 | 2 | ATP8A1 | 3 |
| CITED1 | 2 | PNPLA3 | 3 | FGD5 | 2 | RDX | 3 |
| VCAM1 | 2 | ECH1 | 3 | PARD3B | 2 | PRR5L | 3 |
| PDE4DIP | 2 | GULO | 3 | LPHN2 | 2 | FAM83D | 3 |
| SNTA1 | 2 | SEC14L2 | 3 | CARD10 | 2 | PXK | 3 |
| TUBA1A | 2 | NDUFA4 | 3 | NCEH1 | 2 | DGKB | 3 |
| FKBP3 | 2 | CYP1A2 | 3 | MMP2 | 2 | ZDHHC14 | 3 |
| GPX3 | 2 | AGXT | 3 | BCL2L1 | 2 | OTUD7B | 3 |
| FLNC | 2 | CBR1 | 3 | PODXL | 2 | ARHGEF10 | 3 |
| CRIP1 | 2 | SDS | 3 | IL12RB2 | 2 | SLITRK2 | 3 |
| KRT19 | 2 | HIBADH | 3 | ENSA | 2 | CNDP1 | 3 |
| TMEM88 | 2 | SOD1 | 3 | AQP1 | 2 | GALNT13 | 3 |
| RCAN2 | 2 | NIT2 | 3 | FAM132A | 2 | SGK1 | 3 |
| TRIM54 | 2 | SLC7A2 | 3 | RBBP9 | 2 | EDNRB | 3 |
| LAMA4 | 2 | KRT8 | 3 | ADCY7 | 2 | FBXO32 | 3 |
| MYBPHL | 2 | PGRMC1 | 3 | PNPO | 2 | S100A1 | 3 |
| MUM1L1 | 2 | SDC2 | 3 | GUCY1B3 | 2 | TMEM63A | 3 |
| DKK3 | 2 | GCH1 | 3 | DOCK1 | 2 | EMID1 | 3 |
| PKP2 | 2 | ECI2 | 3 | DOCK6 | 2 | TRIM9 | 3 |
| LBR | 2 | ECI1 | 3 | ZFP788 | 2 | KAZN | 3 |
| LBH | 2 | SAA4 | 3 | GIMAP8 | 2 | PDE1C | 3 |
| ATP1B1 | 2 | ACAD11 | 3 | GIMAP6 | 2 | ANK2 | 3 |
| VIM | 2 | PEMT | 3 | PHF6 | 2 | ADAMTS4 | 3 |
| YPEL2 | 2 | SEMA4G | 3 | TIE1 | 2 | LDB3 | 3 |
| SMYD2 | 2 | TAT | 3 | MDFI | 2 | REV3L | 3 |
| FAM78A | 2 | ANGPTL4 | 3 | LAX1 | 2 | SHISA9 | 3 |
| FILIP1 | 2 | GLS2 | 3 | FHL1 | 2 | ASTN1 | 3 |
| GAPDH | 2 | CAT | 3 | YES1 | 2 | SEMA5A | 3 |
| USP2 | 2 | GHR | 3 | FSTL1 | 2 | CADM2 | 3 |
| NDRG2 | 2 | ATP5G3 | 3 | ALOX5 | 2 | CADM1 | 3 |
| LOXL2 | 2 | STARD10 | 3 | KLHL4 | 2 | RALGDS | 3 |
| PFKP | 2 | GOS2 | 3 | MAGED1 | 2 | CDC42EP2 | 3 |
| CTNNA3 | 2 | MTHFD1 | 3 | ZFP12 | 2 | TMEM144 | 3 |
| CNN2 | 2 | CPN2 | 3 | PCMTD1 | 2 | FMNL2 | 3 |
| PGK1 | 2 | CPN1 | 3 | CMAS | 2 | PLD1 | 3 |
| SMTNL2 | 2 | CALD1 | 3 | CLDN12 | 2 | PPFIBP1 | 3 |
| RBFOX2 | 2 | ACADVL | 3 | HNRNPH3 | 2 | GRM3 | 3 |
| ATP5G3 | 2 | TFR2 | 3 | MPZL1 | 2 | SOX2-OT | 3 |
| HSPB3 | 2 | DDT | 3 | HSPA12B | 2 | GRIA2 | 3 |
| HSPB1 | 2 | ANG | 3 | CITED2 | 2 | GRIA4 | 3 |
| ALDOC | 2 | ALDH4A1 | 3 | CC2D2A | 2 | LIMCH1 | 3 |
| CACNA2D2 | 2 | A2M | 3 | UNC13D | 2 | PLEKHB1 | 3 |
| CYP2S1 | 2 | SLC10A1 | 3 | VAMP5 | 2 | PLCB1 | 3 |
| PLPPR5 | 2 | DCXR | 3 | CNTLN | 2 | EPHB1 | 3 |
| GYS1 | 2 | PCBD1 | 3 | OSGIN1 | 2 | MOB3B | 3 |
| CFL2 | 2 | ALDH7A1 | 3 | SLC9A3R2 | 2 | SUSD5 | 3 |
| | | RARRES2 | 3 | PREX2 | 2 | FTH1 | 3 |
| | | OAF | 3 | PTPRE | 2 | SLCO3A1 | 3 |
| | | OAT | 3 | MFAP2 | 2 | CHADL | 3 |
| | | ENTPD5 | 3 | PIK3R1 | 2 | TMBIM1 | 3 |
| | | CPS1 | 3 | GRB10 | 2 | CLMN | 3 |
| | | TDO2 | 3 | CCND2 | 2 | KLHL5 | 3 |
| | | GLYAT | 3 | LAT | 2 | KLHL2 | 3 |
| | | CMBL | 3 | RC3H2 | 2 | CYP2J12 | 3 |
| | | LECT2 | 3 | PDLIM1 | 2 | PCBP4 | 3 |
| | | RPS27L | 3 | ZDHHC1 | 2 | SPOCK3 | 3 |
| | | INSIG1 | 3 | CYP2J6 | 2 | SEMA3D | 3 |
| | | NDUFV2 | 3 | NBEAL2 | 2 | RIN2 | 3 |
| | | ALDH9A1 | 3 | GM13152 | 2 | RNF144A | 3 |
| | | F5 | 3 | MUM1L1 | 2 | FRMD4A | 3 |
| | | F9 | 3 | IER3 | 2 | KCNJ10 | 3 |
| | | ABCA6 | 3 | WBSCR27 | 2 | PTPRG | 3 |
| | | TM4SF4 | 3 | DDAH1 | 2 | PTPRE | 3 |
| | | APCS | 3 | DDAH2 | 2 | GPM6A | 3 |
| | | HSD17B4 | 3 | VSIG2 | 2 | CCND2 | 3 |
| | | MPC2 | 3 | YPEL3 | 2 | CHL1 | 3 |
| | | LBP | 3 | TRAF3IP3 | 2 | C1ORF61 | 3 |
| | | HSD17B2 | 3 | PLXDC2 | 2 | TRIM59 | 3 |
| | | DDAH1 | 3 | ORAI1 | 2 | SDC3 | 3 |
| | | CFHR1 | 3 | JAM3 | 2 | BAALC | 3 |
| | | ETFB | 3 | CD74 | 2 | SPON1 | 3 |
| | | LCAT | 3 | CHAD | 2 | RTN4 | 3 |
| | | ABCB4 | 3 | CIRBP | 2 | PARD3 | 3 |
| | | HDLBP | 3 | CBX6 | 2 | PKP4 | 3 |
| | | CIDEB | 3 | DOCK2 | 2 | XYLT1 | 3 |
| | | DHCR24 | 3 | KLHL13 | 2 | TNFRSF21 | 3 |
| | | TM7SF2 | 3 | AMIGO2 | 2 | D16ERTD472E | 3 |
| | | APOC3 | 3 | GABARAPL2 | 2 | GNG7 | 3 |
| | | ASPDH | 3 | UNC119 | 2 | TTLL7 | 3 |
| | | ADK | 3 | VIPR2 | 2 | YPEL2 | 3 |
| | | SELENBP1 | 3 | TTPA | 2 | GALNT6 | 3 |
| | | ETFDH | 3 | SELENBP1 | 2 | EFNB3 | 3 |
| | | CRP | 3 | FAM110C | 2 | FABP7 | 3 |
| | | GLDC | 3 | GBP7 | 2 | KAT2B | 3 |
| | | SERPING1 | 3 | CHRNB1 | 2 | MYO6 | 3 |
| | | IYD | 3 | GIMAP1 | 2 | NDRG1 | 3 |
| | | C8A | 3 | EFNA1 | 2 | TPPP | 3 |
| | | COL18A1 | 3 | OCLN | 2 | DHCR24 | 3 |
| | | EBPL | 3 | EFCAB14 | 2 | MAP6D1 | 3 |
| | | PSAT1 | 3 | CREG1 | 2 | CERS2 | 3 |
| | | HAO1 | 3 | PKN1 | 2 | SNTG1 | 3 |
| | | ABCC6 | 3 | RHOBTB3 | 2 | MAML2 | 3 |
| | | ABCC2 | 3 | FAM213A | 2 | MAN2A1 | 3 |
| | | QDPR | 3 | TROVE2 | 2 | CD9 | 3 |
| | | UGP2 | 3 | ITSN1 | 2 | CD82 | 3 |
| | | FDPS | 3 | HK1 | 2 | EFCAB14 | 3 |
| | | PTMS | 3 | DKKL1 | 2 | LRP1 | 3 |
| | | H6PD | 3 | DNMT3B | 2 | PDE4B | 3 |
| | | GLUL | 3 | UBE2L6 | 2 | SEPP1 | 3 |
| | | ALDH5A1 | 3 | SLC25A36 | 2 | MAP7 | 3 |
| | | ARG1 | 3 | NBEA | 2 | RAP1GAP | 3 |
| | | GCSH | 3 | EHD3 | 2 | MT3 | 3 |
| | | ALAD | 3 | STAU2 | 2 | LDLRAD3 | 3 |
| | | GLUD1 | 3 | LEPREL2 | 2 | NAV1 | 3 |
| | | LDHA | 3 | RAB37 | 2 | NAV2 | 3 |
| | | LONP2 | 3 | NDN | 2 | LRRC4C | 3 |
| | | LRG1 | 3 | LDHB | 2 | KCTD13 | 3 |
| | | AGL | 2 | YPEL2 | 2 | MEGF11 | 3 |
| | | HRSP12 | 2 | PTRF | 2 | AFAP1L2 | 3 |
| | | HSPA9 | 2 | | | IGSF11 | 3 |
| | | SPR | 2 | | | NCAM2 | 3 |
| | | ZC3H13 | 2 | | | RNF220 | 3 |
| | | GOLIM4 | 2 | | | RAB37 | 3 |
| | | CLDN3 | 2 | | | CLASP2 | 3 |
| | | ORM2 | 2 | | | CFL2 | 3 |
| | | ACLY | 2 | | | SPATA6 | 3 |
| | | PNISR | 2 | | | RNF13 | 2 |
| | | PHLDA1 | 2 | | | LINC00609 | 2 |
| | | LSR | 2 | | | CRB1 | 2 |
| | | LSS | 2 | | | CNP1 | 2 |
| | | TMEM192 | 2 | | | MTMR10 | 2 |
| | | SIGIRR | 2 | | | AI414108 | 2 |
| | | FAM134B | 2 | | | LSS | 2 |
| | | FAHD1 | 2 | | | COL4A5 | 2 |
| | | AIG1 | 2 | | | CHST3 | 2 |
| | | PRKAR1A | 2 | | | KCNH8 | 2 |
| | | SAR1B | 2 | | | ITGAD | 2 |
| | | SLCO1B1 | 2 | | | TUBB2B | 2 |
| | | SLCO1B3 | 2 | | | DIP2C | 2 |
| | | CYP3A13 | 2 | | | GLTP | 2 |
| | | CHP1 | 2 | | | ENOPH1 | 2 |
| | | PGLYRP2 | 2 | | | NOL4 | 2 |
| | | GCHFR | 2 | | | SRPK3 | 2 |
| | | DPYD | 2 | | | CADPS2 | 2 |
| | | RDH7 | 2 | | | ADARB2 | 2 |
| | | PEX14 | 2 | | | SPP1 | 2 |
| | | FPGS | 2 | | | CTHRC1 | 2 |
| | | CYB5A | 2 | | | RGS20 | 2 |
| | | CDO1 | 2 | | | DPYD | 2 |
| | | APOC4-APOC2 | 2 | | | PCDH17 | 2 |
| | | CHI3L1 | 2 | | | CA10 | 2 |
| | | CYP4F2 | 2 | | | SASH1 | 2 |
| | | CYP4F3 | 2 | | | FAR1 | 2 |
| | | MRPL34 | 2 | | | CDO1 | 2 |
| | | CSAD | 2 | | | SORCS1 | 2 |
| | | UQCRFS1 | 2 | | | ARRDC3 | 2 |
| | | UQCRC1 | 2 | | | DBI | 2 |
| | | GGCX | 2 | | | APP | 2 |
| | | RETSAT | 2 | | | SERINC5 | 2 |
| | | SAA2 | 2 | | | KHDRBS3 | 2 |
| | | PINK1 | 2 | | | MDGA2 | 2 |
| | | CYP2D6 | 2 | | | PEAK1 | 2 |
| | | AKR1C1 | 2 | | | MFSD2A | 2 |
| | | FDFT1 | 2 | | | PRKG2 | 2 |
| | | IGF2 | 2 | | | FDFT1 | 2 |
| | | IGFBP4 | 2 | | | C1ORF21 | 2 |
| | | AFP | 2 | | | COL16A1 | 2 |
| | | COX17 | 2 | | | ABTB2 | 2 |
| | | UGT2A3 | 2 | | | GAS1 | 2 |
| | | PPA1 | 2 | | | AMPD3 | 2 |
| | | CFHR3 | 2 | | | CSMD2 | 2 |
| | | PLPP5 | 2 | | | CSMD3 | 2 |
| | | CFHR4 | 2 | | | CDKN1C | 2 |
| | | UGDH | 2 | | | PRIMA1 | 2 |
| | | TJP2 | 2 | | | GPCPD1 | 2 |
| | | PRG4 | 2 | | | TRIL | 2 |
| | | SH3PXD2A | 2 | | | NLGN3 | 2 |
| | | PRDX4 | 2 | | | UGDH | 2 |
| | | PRDX3 | 2 | | | AC012593.1 | 2 |
| | | PRDX1 | 2 | | | TMEM141 | 2 |
| | | SMOC1 | 2 | | | TJP1 | 2 |
| | | POR | 2 | | | RTKN2 | 2 |
| | | PPP1R1A | 2 | | | MPPED2 | 2 |
| | | NSUN6 | 2 | | | PRDX1 | 2 |
| | | DCAF6 | 2 | | | PDK4 | 2 |
| | | ACADSB | 2 | | | SBDS | 2 |
| | | A1BG | 2 | | | GM98 | 2 |
| | | SLC25A4 | 2 | | | ARHGAP31 | 2 |
| | | HMGCR | 2 | | | LAMP2 | 2 |
| | | ORMDL3 | 2 | | | B3GAT1 | 2 |
| | | PBLD2 | 2 | | | CACNA1A | 2 |
| | | KIF5B | 2 | | | DCC | 2 |
| | | MASP1 | 2 | | | DLGAP1 | 2 |
| | | SLC31A1 | 2 | | | TMEM178B | 2 |
| | | C4BPA | 2 | | | WSB1 | 2 |
| | | C4BPB | 2 | | | CDH20 | 2 |
| | | XDH | 2 | | | TMEM176B | 2 |
| | | CISD3 | 2 | | | SLC15A4 | 2 |
| | | CISD1 | 2 | | | CCDC50 | 2 |
| | | PTPN3 | 2 | | | RRAS2 | 2 |
| | | ATOX1 | 2 | | | NDRG2 | 2 |
| | | KMO | 2 | | | RNF130 | 2 |
| | | MSRB1 | 2 | | | S100A16 | 2 |
| | | C6 | 2 | | | DDR1 | 2 |
| | | C5 | 2 | | | C10ORF90 | 2 |
| | | LGALS9 | 2 | | | NKX6.2 | 2 |
| | | LGALS4 | 2 | | | MYO1E | 2 |
| | | CRYZ | 2 | | | RTKN | 2 |
| | | SPINK1 | 2 | | | ADI1 | 2 |
| | | AADAT | 2 | | | TPPP3 | 2 |
| | | HPR | 2 | | | LY6G6F | 2 |
| | | C1RA | 2 | | | HMGCS1 | 2 |
| | | RDH16 | 2 | | | ARHGAP24 | 2 |
| | | CYP2C70 | 2 | | | IGSF21 | 2 |
| | | PLIN5 | 2 | | | ASAP1 | 2 |
| | | PLIN2 | 2 | | | CMYA5 | 2 |
| | | PTP4A1 | 2 | | | TMEM159 | 2 |
| | | RBP5 | 2 | | | PRICKLE1 | 2 |
| | | ABHD2 | 2 | | | HIP1 | 2 |
| | | MT1M | 2 | | | D7ERTD443E | 2 |
| | | UBR4 | 2 | | | 7-Sep | 2 |
| | | MLYCD | 2 | | | PSEN1 | 2 |
| | | HC | 2 | | | EPCAM | 2 |
| | | ATP5C1 | 2 | | | PIGZ | 2 |
| | | SCD | 2 | | | FSD1L | 2 |
| | | AKR1C4 | 2 | | | RHPN2 | 2 |
| | | GADD45B | 2 | | | WFDC18 | 2 |
| | | COL27A1 | 2 | | | NTRK2 | 2 |
| | | MRPL12 | 2 | | | ARHGAP20 | 2 |
| | | ITPR2 | 2 | | | DDIT4 | 2 |
| | | CHDH | 2 | | | CD22 | 2 |
| | | AKR7A3 | 2 | | | KCNMB4 | 2 |
| | | IL1RN | 2 | | | ARPC1B | 2 |
| | | IL17RC | 2 | | | ACSL1 | 2 |
| | | CD302 | 2 | | | CCNY | 2 |
| | | HPGD | 2 | | | LRP4 | 2 |
| | | UGT2B15 | 2 | | | KCNQ1OT1 | 2 |
| | | UGT2B10 | 2 | | | NCKAP5 | 2 |
| | | SRD5A1 | 2 | | | LRRK2 | 2 |
| | | ADH1 | 2 | | | CHD9 | 2 |
| | | ADH6 | 2 | | | HTRA1 | 2 |
| | | ADH5 | 2 | | | MBP6 | 2 |
| | | ADH4 | 2 | | | TANC2 | 2 |
| | | IGFALS | 2 | | | RHOG | 2 |
| | | PSMB7 | 2 | | | ANKRD28 | 2 |
| | | MBL1 | 2 | | | RNF128 | 2 |
| | | HADHA | 2 | | | RNF122 | 2 |
| | | HIGD1A | 2 | | | DSCAML1 | 2 |
| | | ACOT12 | 2 | | | GAMT | 2 |
| | | KLB | 2 | | | NLGN4X | 2 |
| | | RMDN1 | 2 | | | FZD9 | 2 |
| | | UROC1 | 2 | | | CTNNA3 | 2 |
| | | NADK2 | 2 | | | ADO | 2 |
| | | CYP2C68 | 2 | | | LGR5 | 2 |
| | | SLC38A2 | 2 | | | TMEM163 | 2 |
| | | PTGR1 | 2 | | | EVI2A | 2 |
| | | CYP3A4 | 2 | | | PPAP2C | 2 |
| | | STARD4 | 2 | | | CTTNBP2 | 2 |
| | | CELF1 | 2 | | | ANKIB1 | 2 |
| | | PEPD | 2 | | | DLG1 | 2 |
| | | TMEM97 | 2 | | | SAMD12 | 2 |
| | | GSTO1 | 2 | | | LINC01608 | 2 |
| | | GLYATL1 | 2 | | | AKAP6 | 2 |
| | | ECHDC1 | 2 | | | TMEM132C | 2 |
| | | PRODH2 | 2 | | | ATP1A2 | 2 |
| | | RHOB | 2 | | | CAMSAP2 | 2 |
| | | ACAT2 | 2 | | | ERMP1 | 2 |
| | | ACAT3 | 2 | | | WDFY2 | 2 |
| | | RNF152 | 2 | | | MKRN3 | 2 |
| | | ELL2 | 2 | | | LHFPL2 | 2 |
| | | LDLR | 2 | | | PHYHIPL | 2 |
| | | CYP2C9 | 2 | | | ACAT2 | 2 |
| | | CYP2C8 | 2 | | | FAM110B | 2 |
| | | ZFYVE21 | 2 | | | KIF21A | 2 |
| | | AK4 | 2 | | | GRID2 | 2 |
| | | HSPE1 | 2 | | | ZNF638 | 2 |
| | | ERBB3 | 2 | | | TBCB | 2 |
| | | LARP1B | 2 | | | AK5 | 2 |
| | | HERPUD1 | 2 | | | PRKD1 | 2 |
| | | TMEM220 | 2 | | | ERC1 | 2 |
| | | LACTB2 | 2 | | | EPS8 | 2 |
| | | RND3 | 2 | | | GRIN3A | 2 |
| | | FUOM | 2 | | | NEO1 | 2 |
| | | IDI1 | 2 | | | SHROOM4 | 2 |
| | | MTCH2 | 2 | | | VWC2 | 2 |
| | | SLC2A2 | 2 | | | NLGN4Y | 2 |
| | | F11 | 2 | | | BFSP2 | 2 |
| | | 2-Mar | 2 | | | RGCC | 2 |
| | | SERPINA11 | 2 | | | SLC1A1 | 2 |
| | | PSMB10 | 2 | | | 1-Mar | 2 |
| | | CYP2B6 | 2 | | | DAAM2 | 2 |
| | | ATP5A1 | 2 | | | PCYT2 | 2 |
| | | HFE2 | 2 | | | FCHSD2 | 2 |
| | | KEG1 | 2 | | | HEPN1 | 2 |
| | | HNRNPA3 | 2 | | | DIXDC1 | 2 |
| | | IL6R | 2 | | | LINC01322 | 2 |
| | | IRS2 | 2 | | | IL33 | 2 |
| | | SERPINA1B | 2 | | | CAR8 | 2 |
| | | SERPINA1A | 2 | | | TAOK3 | 2 |
| | | SERPINA1D | 2 | | | GRIK2 | 2 |
| | | SERPINA1E | 2 | | | SPECC1 | 2 |
| | | PHB2 | 2 | | | SEMA6A | 2 |
| | | SF3B1 | 2 | | | GYG | 2 |
| | | SORBS3 | 2 | | | SUN2 | 2 |
| | | HSPD1 | 2 | | | PRKCA | 2 |
| | | UGT2B36 | 2 | | | BCAS11 | 2 |
| | | UGT2B34 | 2 | | | SEC11C | 2 |
| | | UGT2B35 | 2 | | | GSTP1 | 2 |
| | | CES1 | 2 | | | PKD2L1 | 2 |
| | | CES2 | 2 | | | IDH1 | 2 |
| | | LMAN1 | 2 | | | NACAD | 2 |
| | | FAM195A | 2 | | | TMEM100 | 2 |
| | | GSTP1 | 2 | | | FGFR2 | 2 |
| | | PCK2 | 2 | | | PLP19 | 2 |
| | | FKBP11 | 2 | | | VPS37B | 2 |
| | | MARVELD2 | 2 | | | GRIK1 | 2 |
| | | ZNF207 | 2 | | | TIAM1 | 2 |
| | | IDH2 | 2 | | | NKAIN3 | 2 |
| | | GSTA3 | 2 | | | MAP1B | 2 |
| | | GPX4 | 2 | | | UNC5B | 2 |
| | | THRSP | 2 | | | UNC5C | 2 |
| | | PHKA2 | 2 | | | FRMD8 | 2 |
| | | FAM162A | 2 | | | FRMD5 | 2 |
| | | CDHR5 | 2 | | | BTBD16 | 2 |
| | | FGGY | 2 | | | SIK3 | 2 |
| | | SEC14L4 | 2 | | | TMCC3 | 2 |
| | | SIK2 | 2 | | | CYP51 | 2 |
| | | NDUFA1 | 2 | | | GPR62 | 2 |
| | | COMT | 2 | | | WNT3 | 2 |
| | | FIS1 | 2 | | | LRRN1 | 2 |
| | | EFHD1 | 2 | | | IL23A | 2 |
| | | INSR | 2 | | | TIMP4 | 2 |
| | | GNE | 2 | | | ARRDC2 | 2 |
| | | ANKRD17 | 2 | | | BOK | 2 |
| | | TMEM37 | 2 | | | SUSD4 | 2 |
| | | CPT1A | 2 | | | RNASE1 | 2 |
| | | PAPSS2 | 2 | | | BRINP1 | 2 |
| | | C1S | 2 | | | STXBP3A | 2 |
| | | C1R | 2 | | | STMN4 | 2 |
| | | AKR1C13 | 2 | | | AMER2 | 2 |
| | | CPT2 | 2 | | | ZFP276 | 2 |
| | | GOT1 | 2 | | | ZCCHC24 | 2 |
| | | PYGL | 2 | | | 42986 | 2 |
| | | SOD2 | 2 | | | TNFAIP6 | 2 |
| | | RNASE4 | 2 | | | ELOVL6 | 2 |
| | | TF | 2 | | | PDZD2 | 2 |
| | | SMIM24 | 2 | | | SORCS3 | 2 |
| | | FST | 2 | | | SGCD | 2 |
| | | SLC19A2 | 2 | | | CNKSR3 | 2 |
| | | NACA | 2 | | | GP1BB | 2 |
| | | PGM1 | 2 | | | ANKS1B | 2 |
| | | PGM2 | 2 | | | AUTS2 | 2 |
| | | TRF | 2 | | | UST | 2 |
| | | SDC1 | 2 | | | GPR56 | 2 |
| | | ELOVL5 | 2 | | | EXOC6B | 2 |
| | | CYP2C44 | 2 | | | CPNE2 | 2 |
| | | TECR | 2 | | | RFTN2 | 2 |
| | | PAQR9 | 2 | | | RFTN1 | 2 |
| | | PHYHD1 | 2 | | | DGKG | 2 |
| | | RDX | 2 | | | ICK | 2 |
| | | FERMT2 | 2 | | | TMCC2 | 2 |
| | | FADS1 | 2 | | | JPH1 | 2 |
| | | CCL16 | 2 | | | OTUD7A | 2 |
| | | SERPINA1 | 2 | | | NCAN | 2 |
| | | SERPINA4 | 2 | | | AMZ1 | 2 |
| | | SERPINA5 | 2 | | | ATRNL1 | 2 |
| | | SERPINA7 | 2 | | | SCCPDH | 2 |
| | | HAGH | 2 | | | RASGRP3 | 2 |
| | | COPZ1 | 2 | | | GPM6B5 | 2 |
| | | PCSK9 | 2 | | | D630045J12RIK | 2 |
| | | ESPN | 2 | | | TMEM123 | 2 |
| | | H2-Q10 | 2 | | | DLG2 | 2 |
| | | SCCPDH | 2 | | | PPP1R18 | 2 |
| | | CNDP1 | 2 | | | LMF1 | 2 |
| | | CDA | 2 | | | INSC | 2 |
| | | PTER | 2 | | | ADSSL1 | 2 |
| | | GADD45GIP1 | 2 | | | STK32A | 2 |
| | | FDX1 | 2 | | | ARL8A | 2 |
| | | ANGPTL8 | 2 | | | PDE1A | 2 |
| | | GPLD1 | 2 | | | PCDH20 | 2 |
| | | APOE | 2 | | | 3110035E14RIK | 2 |
| | | HNMT | 2 | | | ARSG | 2 |
| | | NUPR1 | 2 | | | ARSB | 2 |
| | | VEGFA | 2 | | | ANK3 | 2 |
| | | SLC39A4 | 2 | | | FUT9 | 2 |
| | | SLC39A5 | 2 | | | FUT8 | 2 |
| | | FBXO31 | 2 | | | RLBP1 | 2 |
| | | AOX1 | 2 | | | DAB1 | 2 |
| | | METTL7A1 | 2 | | | USP24 | 2 |
| | | HINT1 | 2 | | | DPP10 | 2 |
| | | HINT2 | 2 | | | SCD3 | 2 |
| | | ALAS1 | 2 | | | ENOX1 | 2 |
| | | LEPR | 2 | | | RAMP1 | 2 |
| | | RIOK3 | 2 | | | SSH3 | 2 |
| | | ZNHIT1 | 2 | | | SCARB2 | 2 |
| | | EGFR | 2 | | | CSMD1 | 2 |
| | | NDUFC2 | 2 | | | G0S2 | 2 |
| | | LGALS3BP | 2 | | | ASTN2 | 2 |
| | | IL32 | 2 | | | HHATL | 2 |
| | | CA2 | 2 | | | PLA2G16 | 2 |
| | | EPHX1 | 2 | | | SEMA5B | 2 |
| | | GABPB1-AS1 | 2 | | | HS6ST3 | 2 |
| | | GSTA1 | 2 | | | DUSP15 | 2 |
| | | GSTA2 | 2 | | | GM10863 | 2 |
| | | AGXT2 | 2 | | | RASSF10 | 2 |
| | | CDH1 | 2 | | | CADM4 | 2 |
| | | CDH2 | 2 | | | FGD3 | 2 |
| | | IFITM3 | 2 | | | UNC80 | 2 |
| | | IFITM2 | 2 | | | FAM107B | 2 |
| | | AMACR | 2 | | | CLIC4 | 2 |
| | | SCARB1 | 2 | | | TMEM132B | 2 |
| | | ADGRG6 | 2 | | | AGAP1 | 2 |
| | | HULC | 2 | | | FEZ1 | 2 |
| | | PROS1 | 2 | | | SLCO1A2 | 2 |
| | | ARFGAP2 | 2 | | | GM9895 | 2 |
| | | TRIB1 | 2 | | | MAPRE2 | 2 |
| | | ARHGEF10L | 2 | | | CRYL1 | 2 |
| | | MT1X | 2 | | | GRM7 | 2 |
| | | GATM | 2 | | | LIMA1 | 2 |
| | | MT1H | 2 | | | DOCK1 | 2 |
| | | MT1E | 2 | | | SEPT4 | 2 |
| | | MT1F | 2 | | | SLC9A9 | 2 |
| | | MT1G | 2 | | | DDC | 2 |
| | | MT1A | 2 | | | AAMDC | 2 |
| | | COX6C | 2 | | | CCDC88A | 2 |
| | | VNN1 | 2 | | | FBXO7 | 2 |
| | | SLC23A2 | 2 | | | KCNA1 | 2 |
| | | CFHR2 | 2 | | | MTSS1L | 2 |
| | | CHST13 | 2 | | | GAREML | 2 |
| | | CYP2C18 | 2 | | | IL1RAPL1 | 2 |
| | | NDUFB9 | 2 | | | DIP2B | 2 |
| | | PCCB | 2 | | | PTPRZ12 | 2 |
| | | PZP | 2 | | | FAM19A2 | 2 |
| | | SLC22A7 | 2 | | | FAH | 2 |
| | | CRYL1 | 2 | | | HNRNPA2B1 | 2 |
| | | ACSM2A | 2 | | | SYNJ2 | 2 |
| | | AQP9 | 2 | | | MIDN | 2 |
| | | ACOT4 | 2 | | | SHTN1 | 2 |
| | | SHMT2 | 2 | | | NKX2-9 | 2 |
| | | TOR1AIP2 | 2 | | | ATP2B4 | 2 |
| | | ADCY1 | 2 | | | ELFN2 | 2 |
| | | DDI2 | 2 | | | TMEM132D | 2 |
| | | RBM39 | 2 | | | DLEU2 | 2 |
| | | DST | 2 | | | FBXL7 | 2 |
| | | DDC | 2 | | | PLXNB3 | 2 |
| | | GSTT1 | 2 | | | GRAMD3 | 2 |
| | | PHF8 | 2 | | | KLHL32 | 2 |
| | | PPP2R5A | 2 | | | SEZ6L2 | 2 |
| | | NADK | 2 | | | C9ORF3 | 2 |
| | | SMIM14 | 2 | | | SPOCK1 | 2 |
| | | NAMPT | 2 | | | CLDN14 | 2 |
| | | ACACB | 2 | | | MPZL1 | 2 |
| | | PLA2G2A | 2 | | | FGF12 | 2 |
| | | ATRX | 2 | | | FGF14 | 2 |
| | | COX7B | 2 | | | COL9A3 | 2 |
| | | HIBCH | 2 | | | UNC13C | 2 |
| | | MDH1 | 2 | | | SYNE2 | 2 |
| | | HNRNPA2B1 | 2 | | | DEGS1 | 2 |
| | | ZCCHC6 | 2 | | | CNTNAP5 | 2 |
| | | DIO1 | 2 | | | CNTNAP4 | 2 |
| | | TMBIM6 | 2 | | | PAPSS1 | 2 |
| | | ENPP1 | 2 | | | TF | 2 |
| | | CCS | 2 | | | PTPRT | 2 |
| | | RALGAPA2 | 2 | | | PTPRD | 2 |
| | | P4HB | 2 | | | PTPRO | 2 |
| | | SPRYD4 | 2 | | | PTPRK | 2 |
| | | FAXDC2 | 2 | | | PTPRJ | 2 |
| | | CDV3 | 2 | | | ADGRL3 | 2 |
| | | LINC00844 | 2 | | | CPM | 2 |
| | | TKFC | 2 | | | UBL3 | 2 |
| | | ADGRA3 | 2 | | | THBS3 | 2 |
| | | ATP5J | 2 | | | GPM6B | 2 |
| | | TENM1 | 2 | | | APBB1 | 2 |
| | | ATP5H | 2 | | | GPRC5B | 2 |
| | | ATP50 | 2 | | | ABLIM2 | 2 |
| | | ATP5D | 2 | | | CCND1 | 2 |
| | | AFMID | 2 | | | KCNMA1 | 2 |
| | | OSGIN1 | 2 | | | ZDHHC9 | 2 |
| | | PDE4DIP | 2 | | | CYP2J9 | 2 |
| | | ARHGEF26 | 2 | | | PARVB | 2 |
| | | DESI1 | 2 | | | IL12RB1 | 2 |
| | | TXN | 2 | | | GM6682 | 2 |
| | | UBE2G2 | 2 | | | FAM89A | 2 |
| | | CYP4A11 | 2 | | | SPARCL1 | 2 |
| | | ACTN4 | 2 | | | EPS15 | 2 |
| | | CYP3A5 | 2 | | | QKI | 2 |
| | | FKBP4 | 2 | | | HSD17B7 | 2 |
| | | FKBP5 | 2 | | | LRRC7 | 2 |
| | | SRSF11 | 2 | | | ITGB4 | 2 |
| | | TIMD2 | 2 | | | BACE1 | 2 |
| | | ABLIM3 | 2 | | | SLC35F3 | 2 |
| | | GRB14 | 2 | | | B230206H07RIK | 2 |
| | | AK2 | 2 | | | KIF13B | 2 |
| | | BBOX1 | 2 | | | CMTM5 | 2 |
| | | SFXN1 | 2 | | | MPC1 | 2 |
| | | SERPINE1 | 2 | | | TSPAN12 | 2 |
| | | CCT8 | 2 | | | TSPAN15 | 2 |
| | | C4B | 2 | | | KIRREL3 | 2 |
| | | HEATR5A | 2 | | | TESK2 | 2 |
| | | INSIG2 | 2 | | | GNG8 | 2 |
| | | CYP2D26 | 2 | | | H2-AB1 | 2 |
| | | ZDHHC9 | 2 | | | PPFIBP2 | 2 |
| | | GPX1 | 2 | | | SAPCD2 | 2 |
| | | CBS | 2 | | | FIGN | 2 |
| | | GPX3 | 2 | | | LINC00511 | 2 |
| | | GPX2 | 2 | | | CLK1 | 2 |
| | | ANPEP | 2 | | | SH3BP4 | 2 |
| | | TTC39C | 2 | | | FABP5 | 2 |
| | | RCAN1 | 2 | | | PANX1 | 2 |
| | | ACSM5 | 2 | | | LINC00461 | 2 |
| | | CROT | 2 | | | DOCK4 | 2 |
| | | XIAP | 2 | | | LAMP1 | 2 |
| | | FH | 2 | | | REEP3 | 2 |
| | | PSMD9 | 2 | | | DLC1 | 2 |
| | | NDUFV3 | 2 | | | TNNI1 | 2 |
| | | NDUFV1 | 2 | | | SCN1A | 2 |
| | | ASPG | 2 | | | CTNNA2 | 2 |
| | | GGH | 2 | | | FAM181B | 2 |
| | | FAM96A | 2 | | | ARHGAP21 | 2 |
| | | MVD | 2 | | | TM7SF3 | 2 |
| | | BPHL | 2 | | | RAPGEF5 | 2 |
| | | MVK | 2 | | | MPP5 | 2 |
| | | C11ORF54 | 2 | | | INHBB | 2 |
| | | MT2A | 2 | | | MAGI2 | 2 |
| | | COX5B | 2 | | | DEB1 | 2 |
| | | EI24 | 2 | | | MYLK | 2 |
| | | RTP3 | 2 | | | FAM13C | 2 |
| | | TM4SF5 | 2 | | | CORO2B | 2 |
| | | ACAA1 | 2 | | | STRN | 2 |
| | | HSD17B6 | 2 | | | KNOP1 | 2 |
| | | MPC1 | 2 | | | STK39 | 2 |
| | | LINC01554 | 2 | | | CD81 | 2 |
| | | SLC25A18 | 2 | | | ANKRD36C | 2 |
| | | SLC25A15 | 2 | | | RDX1 | 2 |
| | | NDUFA11 | 2 | | | NEAT1 | 2 |
| | | NDUFA13 | 2 | | | SGK2 | 2 |
| | | LINC01485 | 2 | | | PDE4D | 2 |
| | | APOL1 | 2 | | | NNAT | 2 |
| | | MMAB | 2 | | | MAP2 | 2 |
| | | CLDN1 | 2 | | | ADCYAP1R1 | 2 |
| | | BCO2 | 2 | | | ZFP740 | 2 |
| | | MAOA | 2 | | | CLDN25 | 2 |
| | | MUT | 2 | | | PSAT1 | 2 |
| | | AKR1C2 | 2 | | | ARC | 2 |
| | | TMEM150A | 2 | | | GSS | 2 |
| | | RAB13 | 2 | | | TMOD1 | 2 |
| | | RAB17 | 2 | | | ZFP365 | 2 |
| | | GMPPA | 2 | | | NIPA1 | 2 |
| | | GAPDH | 2 | | | GOLGA7 | 2 |
| | | CMC2 | 2 | | | PTBP2 | 2 |
| | | KIF1C | 2 | | | SCAMP2 | 2 |
| | | ATP5F1 | 2 | | | FNTA | 2 |
| | | UQCR11 | 2 | | | EPB4.1L3 | 2 |
| | | TSKU | 2 | | | KIF26B | 2 |
| | | NDRG1 | 2 | | | TSPAN6 | 2 |
| | | SEC16B | 2 | | | TSPAN5 | 2 |
| | | GABARAPL1 | 2 | | | FDPS | 2 |
| | | TTPA | 2 | | | GLUL | 2 |
| | | ABHD14B | 2 | | | BCHE | 2 |
| | | ACMSD | 2 | | | GNG4 | 2 |
| | | ADH1B | 2 | | | OS9 | 2 |
| | | ADH1A | 2 | | | FAM102A | 2 |
| | | EPB41L4B | 2 | | | PLPPR1 | 2 |
| | | LURAP1L | 2 | | | C030030A07RIK | 2 |
| | | FURIN | 2 | | | ELMO1 | 2 |
| | | GADD45A | 2 | | | GPC6 | 2 |
| | | PARK7 | 2 | | | PPAPDC1A | 2 |
| | | SELENBP2 | 2 | | | REEP1 | 2 |
| | | ZYG11B | 2 | | | RGS16 | 2 |
| | | UGT2B7 | 2 | | | XKR4 | 2 |
| | | UGT2B4 | 2 | | | DICER1 | 2 |
| | | UGT2B5 | 2 | | | RAB31 | 2 |
| | | SLC25A20 | 2 | | | LRP1B | 2 |
| | | GOLT1A | 2 | | | ACAP3 | 2 |
| | | PC | 2 | | | MTAP | 2 |
| | | PEBP1 | 2 | | | BICD1 | 2 |
| | | GALK1 | 2 | | | PLEKHG1 | 2 |
| | | ADIPOR2 | 2 | | | | |
| | | LY6E | 2 | | | | |
| | | EFNA1 | 2 | | | | |
| | | OCLN | 2 | | | | |
| | | LRP6 | 2 | | | | |
| | | METTL7A | 2 | | | | |
| | | SEPP1 | 2 | | | | |
| | | PPP2R1B | 2 | | | | |
| | | ATP5G1 | 2 | | | | |
| | | SUCLG1 | 2 | | | | |
| | | PON3 | 2 | | | | |
| | | ABCC3 | 2 | | | | |
| | | MSMO1 | 2 | | | | |
| | | DHCR7 | 2 | | | | |
| | | GSN | 2 | | | | |
| | | CYP2F2 | 2 | | | | |
| | | MPST | 2 | | | | |
| | | KHK | 2 | | | | |
| | | CYP39A1 | 2 | | | | |
| | | NNT | 2 | | | | |
| | | MYO1B | 2 | | | | |
| | | PRAP1 | 2 | | | | |
| | | TFPI2 | 2 | | | | |
| | | CINP | 2 | | | | |
| | | SLC25A33 | 2 | | | | |
| | | MUP3 | 2 | | | | |
| | | TRAP1 | 2 | | | | |
| | | GYS2 | 2 | | | | |
| | | DENND5B | 2 | | | | |
| | | FMO3 | 2 | | | | |
| | | CYB5R3 | 2 | | | | |
| | | SORL1 | 2 | | | | |
| | | REEP6 | 2 | | | | |
| | | SLC13A5 | 2 | | | | |
| | | PBLD | 2 | | | | |
| | | GCAT | 2 | | | | |
| | | FAAH | 2 | | | | |
| | | LINC00261 | 2 | | | | |
| | | CD59 | 2 | | | | |
| | | DAO | 2 | | | | |
| | | DAP | 2 | | | | |

TABLE 10
List of sgRNA spacer sequences and
corresponding targets for mediating
CRISPR knockout, activation, and HDR.

| | | sgRNA target | |
|---|---|---|---|
| Target | | sequence | |
| gene | Name | (5′ to 3′) | Purpose |
| NEUROD1 | SAM sgRNA 1 | CATGCGCCAT | Activation |
| | | ATGGTCTTCC | |
| | | (SEQ ID | |
| | | NO: 10741) | |
| NEUROD1 | SAM sgRNA 2 | ATACAAATGG | Activation |
| | | GCAGGTCACG | |
| | | (SEQ ID | |
| | | NO: 10742) | |
| NEUROG2 | SAM sgRNA 1 | GAAAAGAATA | Activation |
| | | AGCCAGAGGA | |
| | | (SEQ ID | |
| | | NO: 10743) | |
| NEUROG2 | SAM sgRNA 2 | CTGACAGGAG | Activation |
| | | GAGGAGGCGG | |
| | | (SEQ ID | |
| | | NO: 10744) | |
| Non- | NT sgRNA 1 | CTGAAAAAGG | Activation; |
| targeting | | AAGGAGTTGA | knockout |
| | | (SEQ ID | |
| | | NO: 10745) | |
| Non- | NT sgRNA 2 | AAGATGAAAG | Activation; |
| targeting | | GAAAGGCGTT | knockout |
| | | (SEQ ID | |
| | | NO: 10746) | |
| SLC1A3 | sgRNA | ATGGAGAAGA | HDR |
| | | GCCCAAGA | |
| | | (SEQ ID | |
| | | NO: 10747) | |
| VIM | sgRNA | TCCGCAGCCA | HDR |
| | | TGTCCACC | |
| | | (SEQ ID | |
| | | NO: 10748) | |
| DYRK1A | KO sgRNA 1 | TCAGCAACCT | Knockout |
| | | CTAACTAACC | |
| | | (SEQ ID | |
| | | NO: 10749) | |
| DYRK1A | KO sgRNA 2 | TTACAGGAGT | Knockout |
| | | ACAAACCACC | |
| | | (SEQ ID | |
| | | NO: 10750) | |

TABLE 11
TaqMan qPCR probe ID's from Thermo Fisher
Scientific for detecting mRNA expression.

| Gene Name | RefSeq isoform(s) | Probe ID |
|---|---|---|
| NEUROD1 | NM_002500 | Hs01922995_s1 |
| NEUROG2 | NM_024019 | Hs00702774_s1 |
| SLC1A3 | NM_001166695; NM_001289939; NM_001289940; | Hs00904823_g1 |
| | NM_004172 | |
| VIM | NM_003380 | Hs00958111_m1 |
| TUBB3 | NM_001197181; NM_006086 | Hs00801390_s1 |
| MAP2 | NM_001039538; NM_002374; NM_031845; NM_031847 | Hs00258900_m1 |
| DYRK1A | NM_001396; NM_101395; NM_130436; NM_130438 | Hs00176369_m1 |

TABLE 12
Custom TaqMan qPCR probes for
detecting codon-optimized
DYRKIA ORF mRNA expression.

| Target | Primer | |
|---|---|---|
| Transcript | type | Sequence (5′ to 3′) |
| DYRK1A | Forward | ACACCTCAGGAGACCTGTAA |
| | | (SEQ ID NO: 10785) |
| DYRK1A | Probe | /56-FAM/AACTGACAG/ZEN/ |
| | | GAACTGCCGAAGTCC/3IABKFQ/ |
| | | (SEQ ID NO: 10786) |
| DYRK1A | Reverse | CCGAAGAGAAGCGCGATAAA |
| | | (SEQ ID NO: 10787) |

TABLE 13
Primers for PCR amplification used in this study.

| Name | Primer Sequence (5′ to 3′) | Purpose |
|---|---|---|
| SLC1A3 HDR Fwd 1 | TCCTGTAAAGCACCAGGAGG (SEQ ID NO: 10751) | SLC1A3 reporter line |
| | | genotyping |
| SLC1A3 HDR Fwd 2 | ACCAAAGAGGAGGTTTGGCT (SEQ ID NO: 10752) | SLC1A3 reporter line |
| | | genotyping |
| SLC1A3 HDR Rev | AGCAGCACAAAAGCATTCCG (SEQ ID NO: 10753) | SLC1A3 reporter line |
| | | genotyping |
| VIM HDR Fwd 1 | AGCCCGCTGAGACTTGAATC (SEQ ID NO: 10754) | VIM reporter line |
| | | genotyping |
| VIM HDR Fwd 2 | CTCGTTCGCCTCTTCTCCG (SEQ ID NO: 10755) | VIM reporter line |
| | | genotyping |
| VIM HDR Rev | GGTGGACGTAGTCACGTAGC (SEQ ID NO: 10756) | VIM reporter line |
| | | genotyping |
| TF NGS Fwd 1 | AATGATACGGCGACCACCGAGATCTACACTCTTTCCCTACACGA | TF library amplification for |
| | CGCTCTTCCGATCTTAAGTAGAGGCTTTATATATCTTGTGGAAA | NGS |
| | GGACGAAACACC (SEQ ID NO: 10757) | |
| TF NGS Fwd 2 | AATGATACGGCGACCACCGAGATCTACACTCTTTCCCTACACGA | TF library amplification for |
| | CGCTCTTCCGATCTATCATGCTTAGCTTTATATATCTTGTGGAAA | NGS |
| | GGACGAAACACC (SEQ ID NO: 10758) | |
| TF NGS Fwd 3 | AATGATACGGCGACCACCGAGATCTACACTCTTTCCCTACACGA | TF library amplification for |
| | CGCTCTTCCGATCTGATGCACATCTGCTTTATATATCTTGTGGAA | NGS |
| | AGGACGAAACACC (SEQ ID NO: 10759) | |
| TF NGS Fwd 4 | AATGATACGGCGACCACCGAGATCTACACTCTTTCCCTACACGA | TF library amplification for |
| | CGCTCTTCCGATCTCGATTGCTCGACGCTTTATATATCTTGTGGA | NGS |
| | AAGGACGAAACACC (SEQ ID NO: 10760) | |
| TF NGS Fwd 5 | AATGATACGGCGACCACCGAGATCTACACTCTTTCCCTACACGA | TF library amplification for |
| | CGCTCTTCCGATCTTCGATAGCAATTCGCTTTATATATCTTGTGG | NGS |
| | AAAGGACGAAACACC (SEQ ID NO: 10761) | |
| TF NGS Fwd 6 | AATGATACGGCGACCACCGAGATCTACACTCTTTCCCTACACGA | TF library amplification for |
| | CGCTCTTCCGATCTATCGATAGTTGCTTGCTTTATATATCTTGTG | NGS |
| | GAAAGGACGAAACACC (SEQ ID NO: 10762) | |
| TF NGS Fwd 7 | AATGATACGGCGACCACCGAGATCTACACTCTTTCCCTACACGA | TF library amplification for |
| | CGCTCTTCCGATCTGATCGATCCAGTTAGGCTTTATATATCTTGT | NGS |
| | GGAAAGGACGAAACACC (SEQ ID NO: 10763) | |
| TF NGS Fwd 8 | AATGATACGGCGACCACCGAGATCTACACTCTTTCCCTACACGA | TF library amplification for |
| | CGCTCTTCCGATCTCGATCGATTTGAGCCTGCTTTATATATCTTG | NGS |
| | TGGAAAGGACGAAACACC (SEQ ID NO: 10764) | |
| TF NGS Fwd 9 | AATGATACGGCGACCACCGAGATCTACACTCTTTCCCTACACGA | TF library amplification for |
| | CGCTCTTCCGATCTACGATCGATACACGATCGCTTTATATATCTT | NGS |
| | GTGGAAAGGACGAAACACC (SEQ ID NO: 10765) | |
| TF NGS Fwd 10 | AATGATACGGCGACCACCGAGATCTACACTCTTTCCCTACACGA | TF library amplification for |
| | CGCTCTTCCGATCTTACGATCGATGGTCCAGAGCTTTATATATCT | NGS |
| | TGTGGAAAGGACGAAACACC (SEQ ID NO: 10766) | |
| TF NGS Rev 1 | CAAGCAGAAGACGGCATACGAGATTCGCCTTGGTGACTGGAGT | TF library amplification for |
| | TCAGACGTGTGCTCTTCCGATCTTAAAGCAGCGTATCCACATAG | NGS |
| | CGT (SEQ ID NO: 10767) | |
| TF NGS Rev 2 | CAAGCAGAAGACGGCATACGAGATATAGCGTCGTGACTGGAG | TF library amplification for |
| | TTCAGACGTGTGCTCTTCCGATCTTAAAGCAGCGTATCCACATA | NGS |
| | GCGT (SEQ ID NO: 10768) | |
| TF NGS Rev 3 | CAAGCAGAAGACGGCATACGAGATGAAGAAGTGTGACTGGAG | TF library amplification for |
| | TTCAGACGTGTGCTCTTCCGATCTTAAAGCAGCGTATCCACATA | NGS |
| | GCGT (SEQ ID NO: 10769) | |
| TF NGS Rev 4 | CAAGCAGAAGACGGCATACGAGATATTCTAGGGTGACTGGAGT | TF library amplification for |
| | TCAGACGTGTGCTCTTCCGATCTTAAAGCAGCGTATCCACATAG | NGS |
| | CGT (SEQ ID NO: 10770) | |
| TF NGS Rev 5 | CAAGCAGAAGACGGCATACGAGATCGTTACCAGTGACTGGAGT | TF library amplification for |
| | TCAGACGTGTGCTCTTCCGATCTTAAAGCAGCGTATCCACATAG | NGS |
| | CGT (SEQ ID NO: 10771) | |
| TF NGS Rev 6 | CAAGCAGAAGACGGCATACGAGATGTCTGATGGTGACTGGAG | TF library amplification for |
| | TTCAGACGTGTGCTCTTCCGATCTTAAAGCAGCGTATCCACATA | NGS |
| | GCGT (SEQ ID NO: 10772) | |
| TF NGS Rev 7 | CAAGCAGAAGACGGCATACGAGATTTACGCACGTGACTGGAGT | TF library amplification for |
| | TCAGACGTGTGCTCTTCCGATCTTAAAGCAGCGTATCCACATAG | NGS |
| | CGT (SEQ ID NO: 10773) | |
| TF NGS Rev 8 | CAAGCAGAAGACGGCATACGAGATTTGAATAGGTGACTGGAG | TF library amplification for |
| | TTCAGACGTGTGCTCTTCCGATCTTAAAGCAGCGTATCCACATA | NGS |
| | GCGT (SEQ ID NO: 10774) | |
| TF NGS Rev 9 | CAAGCAGAAGACGGCATACGAGATTCCTTGGTGTGACTGGAGT | TF library amplification for |
| | TCAGACGTGTGCTCTTCCGATCTTAAAGCAGCGTATCCACATAG | NGS |
| | CGT (SEQ ID NO: 10775) | |
| TF NGS Rev 10 | CAAGCAGAAGACGGCATACGAGATACAGGTATGTGACTGGAG | TF library amplification for |
| | TTCAGACGTGTGCTCTTCCGATCTTAAAGCAGCGTATCCACATA | NGS |
| | GCGT (SEQ ID NO: 10776) | |
| TF NGS Rev 11 | CAAGCAGAAGACGGCATACGAGATAGGTAAGGGTGACTGGAG | TF library amplification for |
| | TTCAGACGTGTGCTCTTCCGATCTTAAAGCAGCGTATCCACATA | NGS |
| | GCGT (SEQ ID NO: 10777) | |
| TF NGS Rev 12 | CAAGCAGAAGACGGCATACGAGATAACAATGGGTGACTGGAG | TF library amplification for |
| | TTCAGACGTGTGCTCTTCCGATCTTAAAGCAGCGTATCCACATA | NGS |
| | GCGT (SEQ ID NO: 10778) | |
| TF Perturb Fwd | AATGATACGGCGACCACCGAGATCTACACTCTTTCCCTACACGA | Perturb-seq TF and cell |
| | CGCTCTTCCGATCT (SEQ ID NO: 10779) | barcode amplification for |
| | | NGS |
| TF Perturb Rev | TTGGCTTTATATATCTTGTGGAAAGGACGA | Perturb-seq TF and cell |
| | (SEQ ID NO: 10780) | barcode amplification for |
| | | NGS |
| DYRK1A KO | CTTTCCCTACACGACGCTCTTCCGATCTCGTCGCCAGCCAAACAT | DYRK1A knockout indel |
| sgRNA 1 | AAG (SEQ ID NO: 10781) | analysis |
| Fwd | | |
| DYRK1A KO | GACTGGAGTTCAGACGTGTGCTCTTCCGATCTCCCACGTTGCAT | DYRK1A knockout indel |
| sgRNA 1 | GTAAAACTGAA (SEQ ID NO: 10782) | analysis |
| Rev | | |
| DYRK1A KO | CTTTCCCTACACGACGCTCTTCCGATCTATCGGTCTCCAGAGGT | DYRK1A knockout indel |
| sgRNA 2 | GCTA (SEQ ID NO: 10783) | analysis |
| Fwd | | |
| DYRK1A KO | GACTGGAGTTCAGACGTGTGCTCTTCCGATCTAGACATCTTTGC | DYRK1A knockout indel |
| sgRNA 2 | CTAAAAACAACTT (SEQ ID NO: 10784) | analysis |
| Rev | | |

TABLE 14
FISH probes.

| Gene | | |
|---|---|---|
| Name | RefSeq isoform(s) | Probe ID |
| RPL13A | NM_001270491; NM_012423 | VA10-19016-PF |
| SLC1A3 | NM_001166695; NM_001166696; NM_001289939; NM_001289940; | VA4-3088280- |
| | NM_004172 | PF |
| VIM | NM_003380 | VA4-14372-PF |
| PTN | NM_001321386; NM_001321387; NM_002825 | VA4-3087919- |
| | | PF |
| NCAN | NM_004386 | VA4-3086032- |
| | | PF |
| FABP7 | NM_001319039; NM_001319041; NM_001319042; NM_001446 | VA4-3086347- |
| | | PF |
| CLU | NM_001831 | VA1-11566-PF |
| CKB | NM_001823 | VA1-3000320- |
| | | PF |
| NR2E1 | NM_001286102; NM_003269 | VA1-3004772- |
| | | PF |
| TTYH1 | NM_001005367; NM_001201461; NM_020659 | VA1-3000024- |
| | | PF |
| F3 | NM_001178096; NM_001993 | VA1-19910-PF |

### Example 22—Transcription Factor Atlas of Directed Differentiation

[0597] Achieving a comprehensive understanding of the gene regulatory networks that govern cell states is a fundamental goal in molecular cell biology. Transcription factors (TFs) can bind to specific sequences in the genome to regulate the expression of ensembles of genes. Some TFs function as “master regulators” that exert control over processes that specify cell types and alter cell states (1-5). Perturbing TFs, especially by overexpression, can thus offer a simpler way to guide cell states than perturbing their downstream genes.

[0598] Generation of diverse cell types has the potential to realize a broad array of cellular replacement therapies and provide tractable models that can be perturbed, genetically or chemically, to assess effects in a cell type-specific context (6-20). However, it remains challenging or impossible to generate many cell types. The best differentiation methods are often labor-intensive and can require months to produce even heterogenous or immature cell populations. Overexpression of TFs can direct differentiation of pluripotent stem cells towards many different cell types (21-28), including neurons (24, 28) and skeletal muscle cells (26), or reprogram differentiated cells, such as fibroblasts, into other cell types, such as stem cells (25, 27) or neurons (22). Compared to exogenous growth factors or small molecules, which go through a TF intermediary to affect gene expression, directly overexpressing TFs to drive differentiation may enhance efficiency and reduce variability (29). As TF overexpression often mimics natural developmental processes, this approach should in theory be capable of generating all possible cell types. Elucidating the gene programs regulated by TFs will guide the production of diverse cellular models with higher fidelity while illuminating aspects of development. Here, Applicants sought to systematically map expression changes driven by TFs and identify TFs and their combinations that govern specific cellular differentiation programs in human embryonic stem cells (hESCs) by developing a TF overexpression screening platform for high-throughput interrogation of TF function.

[0599] Transcription factors (TFs) regulate gene programs, thereby controlling diverse cellular processes and cell states. To achieve a comprehensive understanding of TFs and their respective programs, Applicants developed a platform for high-throughput, systematic TF ORF overexpression that leverages barcodes for pooled screening. Applicants created a library of all annotated human TF splice isoforms (1,836 genes encoding 3,548 isoforms) and applied it to build a TF Atlas charting expression profiles in human embryonic stem cells (hESCs) overexpressing each TF. The comprehensive TF Atlas allowed systematic investigation and generalized observations, showing that 27% of TF genes could function as “master regulators” that induce differentiation when overexpressed in hESCs. Applicants mapped TF-induced expression profiles to reference cell types and validated candidate TFs for generation of diverse cell types, spanning all three germ layers and trophoblasts. Further targeted screens with a subset of the library allowed us to create a tailored cellular disease model and integrate mRNA expression and chromatin accessibility data to identify downstream regulators. Finally, Applicants predicted the effects of TF combinations, demonstrated the validity of Applicants' predictions in a combinatorial TF overexpression dataset, and showed how to predict combinations of TFs that could produce target profiles of reference cell types, reducing the combinatorial search space for experiments. The TF atlas provides a comprehensive overview of gene regulatory networks and a roadmap for further understanding developmental trajectories and guiding cellular engineering efforts.

[0600] Development of Multiplexed Overexpression of Regulatory Factors (MORF) library. Applicants first established the most efficient mode of TF upregulation by comparing the ability of CRISPR activation (CRISPRa) (30) and ORF-based methods using overexpression of NEUROD1 or NEUROG2 to induce neuronal differentiation in HUES66 hESCs as a test case (FIG. 49A) (28). ORF expression of both TFs effectively induced neuronal differentiation, but TF upregulation using CRISPRa or ORFs with endogenous UTRs did not, despite robust upregulation of expression (FIG. 49B-F). This may indicate that hESCs have post-transcriptional regulatory mechanisms in endogenous UTRs that buffer against TF protein expression. Applicants therefore proceeded with TF ORF overexpression for screening.

[0601] To enable pooled screening, Applicants created a barcoded human TF library, which Applicants named Multiplexed Overexpression of Regulatory Factors (MORF) (FIG. 42A, FIG. 50A, and Table 3). The MORF library consists of 3,548 splice isoforms encoded by 1,836 genes, including histone modifiers, considering all overlapping RefSeq and Gencode annotations, as choice of isoform has been shown to affect differentiation efficiency (21). As ORF libraries generated from cDNA libraries often contain missense mutations that can result in screening artifacts, Applicants individually synthesized and sequence verified all constructs in the MORF library.

[0602] MORF has several advantages over prior libraries. First, it is the most comprehensive TF library to date, compared to 1,732 isoforms in a recent collection (21). Furthermore, in contrast to the previous collection, the MORF library vectors contain unique barcodes that facilitate isoform identification and minimize ORF length-dependent PCR bias that could confound screening results (31). Applicants' MORF library design minimized barcode shuffling rates observed in another previous design (23), by reducing the distance between barcode and TF (FIG. 50A). Finally, as an arrayed library of all annotated human TFs that could be selectively pooled for targeted screening, MORF is a generalizable resource that enables the comprehensive discovery of TFs that induce phenotypes of interest.

[0603] Construction of a TF atlas of directed differentiation. Applicants first applied MORF to comprehensively test which and how many TFs can drive cell fate changes in directed differentiation. Because existing protocols for cellular differentiation often use different culture media, depending on the target cell type (28, 32-34), Applicants first identified an optimal cell culture media that could capture the broadest range of effects of TFs. To this end, Applicants pooled the MORF library TFs and packaged them into a lentiviral library for delivery in H1 hESCs. Applicants tested 7 media conditions selected from published reprogramming protocols for cell types of different lineages (see Methods; FIG. 50B). After 7 days, for each media condition, Applicants sorted cells into two populations (top and bottom 10%) based on the expression level of pluripotency markers (TRA-1-60 and SSEA4), as a proxy for differentiation, and sequenced the TF barcodes in the unsorted and sorted bulk populations. Despite initial even distributions in the plasmid and lentiviral libraries (skew=5), in the unsorted populations, the TF distributions became very skewed across all media conditions (skew=105-115; FIG. 50C). As the TF distributions were remarkably consistent across replicates and media conditions (Pearson r >0.94; FIG. 50D, E), Applicants reasoned that the increase in skew is likely a result of TF-dependent effects on cell fitness. TFs that promote pluripotency maintenance (e.g., KLFs 1, 2, and 5; IDs 1, 3, and 4; and YAF2) (35-37) increased cell fitness (i.e., the TFs were overrepresented in the unsorted populations), whereas TFs involved in DNA damage sensing and repair (e.g., BRCA1 and TP53BP1) (38), decreased cell fitness (FIG. 50D). TF distributions in the lentivirus library and unsorted populations negatively correlated with TF length, suggesting that the packaging and integration efficiency may be lower for larger genes (FIG. 50F, G). Similar to the unsorted populations, TF distributions in the sorted populations were relatively consistent across media conditions (FIG. 51A-D). Out of the top 5% of TFs driving differentiation, 94% were reproducible across 3 or more media conditions (average Pearson r=0.51), suggesting that cell culture media does not strongly influence differentiation outcome. TFs enriched in the differentiated cell population (i.e., the bottom 10% relative to the top 10%) included developmentally critical TFs, such as MSGN1, TBXT, and CDX1 (FIG. 51B). By examining the enrichment of known developmentally critical TFs (23), Applicants selected the media condition that produced the highest enrichment and most even distribution, STEMdiff APEL (FIG. 51C, E).

[0604] To build an expression atlas of all TF overexpression effects, Applicants transduced hESCs with the MORF library, differentiated cells in STEMdiff APEL media for 7 days, and profiled the cells by single cell RNA-Seq (scRNA-seq), using a combinatorial indexing protocol based on SHARE-seq (FIG. 42A; see Methods) (39). After filtering for quality and TF barcode mapping, Applicants retained >1.1 million high quality cell profiles (3,761 UMIs per cell on average) with a comparable TF distribution to the bulk TF screen, and no strong dependence between TF detectability and number of UMIs per cell (FIG. 52A-C). Applicants then down-sampled the data by TF ORF to 671,453 cells covering 3,266 TFs (92% of the MORF library; FIG. 42B and FIG. 52C; see Methods) to ensure even representation (3-1,000 cells, with an average of 206 cells, per TF ORF). Expression level of TF ORFs did not correlate with TF length or expression of the respective endogenous TF, as the TF ORF sequence is too distant (>1 kb) from the 3′ end of the transcript to be captured by SHARE-seq (FIG. 50A and FIG. 59D, E). This allows us to decouple expression of the TF ORF from the corresponding endogenous TF and observe potential positive feedback mechanisms, as many TFs are known to regulate themselves (40).

[0605] Over a quarter of TFs direct differentiation of hESCs. To study the effects of TF overexpression on hESC differentiation, Applicants computationally inferred differentiation trajectories from the TF Atlas. Applicants used two different approaches to order TF-overexpressing cells in pseudotime based on expression profile similarity to cells expressing GFP or mCherry controls (FIG. 42C, D, FIG. 52F, G, and FIG. 53A-F). Inferred pseudotimes were comparable between the two methods and correlated with the scale of expression changes, rather than quality control variables such as the number of detected genes per cell (FIG. 53G-K).

[0606] Confirming Applicants' pseudotime inference, genes that drive differentiation (FBN2, TTN, and SOX5) were upregulated over pseudotime, whereas those that maintain pluripotency (CD24, LIN28A, and POU5F1 (OCT4)) were downregulated (FIG. 42E, FIG. 54A, B, and Table 16). Accordingly, pathway analysis confirmed that differentiation pathways such as axonogenesis and heart morphogenesis were enriched in pseudotime-upregulated genes (FIG. 42F). Pluripotency maintenance pathways such as telomere and stem cell maintenance were enriched in pseudotime-downregulated genes (FIG. 1G). Besides pluripotency maintenance, translation was by far the most significantly downregulated pathway with increased pseudotime, as the majority of top downregulated genes were ribosomal genes and translation initiation factors (FIG. 42G). This may suggest that regulation of either translation (41) or cell growth (42) could play a major role in differentiation.

[0607] Using pseudotime as a measurement of differentiation, Applicants evaluated the ability of each TF isoform to direct differentiation by comparing the pseudotime distribution of cells with each TF to those of control cells (Wilcoxon rank-sum test). Some TF ORFs that increased pseudotimes were also enriched in the differentiated cells from the pooled marker-based TF screen (TBXT, MSGN1, RFX4, and EOMES), while others (SOX6, KLF4, and TOX3) were only enriched in the scRNA-seq screen, potentially because scRNA-seq captures the full expression profile, rather than only two pluripotency marker genes (FIG. 54C). Surprisingly, 496 (27%) TFs encoding 694 (20%) isoforms could significantly alter pseudotime (FDR<0.05), suggesting a high percentage of TFs could act as master regulators, perhaps because of the relatively open chromatin in hESCs (43). Notably, differentiation efficiencies were sometimes drastically different between splice isoforms of the same TF gene (FIG. 42H and FIG. 54D). Applicants could not simply identify the splice isoform that most efficiently induced differentiation based on nominal protein domain annotations, length, or consensus sequence (Table 17), highlighting the need to experimentally test different isoforms.

[0608] Co-functional TF modules annotate uncharacterized TFs. Applicants next leveraged the comprehensive scope of Applicants' TF Atlas to group co-functional modules of TFs that impact the same programs, and thus classify unknown, orphan TFs. Applicants first inferred gene programs across the mean expression profiles associated with each TF using non-negative matrix factorization (NMF) and then clustered the 3,266 TFs by their effects across the programs (clusters have a maximum Pearson correlation P-value of 10-7; FIG. 43). Clustering TFs using pairwise correlation of their mean expression profiles produced similar groupings (FIG. 55).

[0609] Our analysis grouped together splice isoforms and TFs that are known to be functionally equivalent (e.g., NEUROD4 and NEUROG1 (44), PAX2 and PAX5 (45), ESRRB and NANOG (46)) (FIG. 43B, C), as well as TFs from the same family, including 18 TF isoforms from the Lim homeobox TF family (LHXs 1-6, 8, 9 and LMXs 1A and 1B), 9 posterior Hox genes (HOXA7, HOXB8, HOXD8, HOXB9, HOXA10, HOXA11, and HOXC12), and 8 nuclear receptors (NR1H2, NR1H3, NR112, NR113, PPARD, and ESRRA) (FIG. 43B, C).

[0610] This analysis helps annotate relatively uncharacterized TFs by their association with well-characterized TFs in the same co-functional module. For instance, there is little functional information on KLF17, and it is considered distantly related to the rest of the KLF TF family, members of which can function as activators or repressors (47). As KLF17 induces a similar gene program to KLF activators (KLFs 1,2,4, and 5), it is likely an activator (FIG. 43C). TFs from different families also group together based on similarities in gene programs, such as DMRTA2 and TBXT in mesoderm development and FERD3L and NEUROD1 in neural development (FIG. 43B). These results demonstrate the utility of the TF Atlas for identifying shared functional modules of TFs.

[0611] Mapping TF effects to reference cell types. To characterize the ability of TFs to drive differentiation to particular endpoints, Applicants next mapped TF-induced expression profiles to those of reference cell types. Applicants subclustered differentiated cells from the TF Atlas (clusters 6-8 from FIG. 42B and FIG. 53A, defined by differentiation pseudotime, FIG. 42D and FIG. 53B; see Methods) to obtain higher resolution and annotated each cell in Applicants' atlas by label-transfer from the human fetal transcriptome atlas (48) cell type that most closely resembled it (FIG. 44A, B).

[0612] The mapping results suggest that Applicants generated cells resembling types from each of the three germ layers, such as (i) squamous epithelial and neurons from ectoderm, (ii) smooth muscle and metanephric from mesoderm, and (iii) intestinal epithelial and bronchiolar and alveolar epithelial from endoderm, as well as from the extraembryonic lineage (syncytio- and villous cyto-trophoblast) (FIG. 44B). Each cluster is comprised of cells with distinct groups of TF ORFs (adjusted mutual information score of 0.43 for TFs with >5% cells in any cluster) and is associated differentially expressed genes, indicating the diversity and specificity of TF-induced gene programs and differentiation states, as well as high penetrance of TF effects (FIG. 44C, FIG. 56A, and Table 18). The biological pathways enriched in each cluster were consistent with their assigned cell type annotations (FIG. 56B, C). For instance, cluster 13 was enriched in cilium assembly and movement pathway genes and mapped to ciliated epithelial cells. Cluster 7.1 was enriched in vasculogenesis and vasculature development pathway genes and mapped to vascular endothelial cells.

[0613] Matching TF ORFs to cell types suggested candidate TFs that could induce differentiation of each cell type (FIG. 44D). Notably, several of these candidate TFs are known to be important for specifying the target cell type during development, further supporting the mapping results. For instance, FERD3L is important for neurogenesis (49), FLI1 for endothelial development (50), and KLF4 for intestinal epithelial homeostasis (51, 52).

[0614] Validation of differentiation-directing TFs. To validate the cell type mapping results, Applicants selected a diverse set of 24 candidate TFs that were predicted to generate 10 distinct cell types. Out of 24 candidate TFs, only one, NEUROD1, has been previously shown to direct differentiation of the nominated cell type and was included as a control (28). Three pairs of TFs that induce similar gene programs (CDX1 and CDX2, PAX2 and PAX5, and two isoforms of HNF4A) were included for comparison. Applicants overexpressed each candidate TF separately in H1 hESCs for 7 days and measured expression of known marker genes that delineate each cell type (FIG. 45A, FIG. 57). Most candidate TFs (22 out of 24) induced expression of marker genes for the cell type predicted by Applicants' TF atlas screen and analysis (FIG. 45A and FIG. 57). For instance, based on marker expression, NEUROD1, FERD3L, and LMX1B produced peripheral neuron-like cells; FLI1 produced vascular endothelial-like cells; KLF4, HNF4A, and NR542 produced intestinal epithelial-like cells; and NHLH1 and ASCL2 produced lung ciliated epithelial-like cells. Within each cell type, different candidate TFs sometimes generated distinct mean expression profiles of marker genes (FIG. 45A), indicating differences in either differentiation efficiencies or trajectories towards the target cell type. GRHL3, which was predicted to induce both trophoblasts and ureteric bud cells, only generated trophoblast-like cells (FIG. 45A and FIG. 57B). Overexpression of EOMES and GLIS1 increased expression of LUM and COL1A1, but not ENG, indicating that the TFs produced general stromal-like cells rather than a subpopulation of ENG-expressing stromal mesenchymal cells (FIG. 57B). Although PAX2 and PAX5 generated distinct expression changes (FIG. 44C), neither produced epithelial-like cells (FIG. 57B). The expression changes induced by each TF were remarkably consistent across two additional cell lines: H9 hESCs and 11a iPSCs (Pearson r=0.84 and 0.89, respectively), suggesting that the TF Atlas results extend beyond the cell line used in the screen (FIG. 45B, C and FIG. 58).

[0615] Applicants further validated Applicants' results by immunostaining for a subset of 17 candidate TFs covering 8 cell types, confirming that changes in protein expression and cell morphology were consistent with the target cell type (FIG. 45D-K, FIG. 59). Out of 17 candidate TFs, 15 significantly upregulated protein expression of marker genes and induced morphology that resembled that of reference cell types (FIG. 45D-K, FIG. 59). HNF4A and ASCL2 did not significantly upregulate protein expression of marker genes on average (by automated image quantification): the cells with morphology changes did have increased protein expression, but there was only a low fraction of such differentiated cells with these two TFs (FIG. 59B, C). Together, these results show that Applicants can identify and validate TFs for directed differentiation into diverse cell types.

[0616] Targeted TF screening to create tailored cellular disease models. Cellular disease models are a tractable system that can be perturbed, genetically or chemically, to assess effects in a cell type-specific context (6-17). However, it remains challenging or impossible to generate many cell types. To address this challenge, Applicants sought to demonstrate that the MORF library could be applied to create a tailored cellular disease model.

[0617] To demonstrate a generalizable approach for constructing targeted TF libraries for generation of cellular disease models, Applicants selected 90 TF isoforms specifically expressed in a selected target cell type, induced neural progenitors (iNPs), using available expression data (53-60) (Table 1; see Methods). iNPs offer a tractable model for studying neurological diseases, but current methods for producing iNPs, namely embryoid body formation (EB) (7, 18) or dual SMAD inhibition (DS) (19, 20), are low-throughput or cell line-dependent (61), respectively. Applicants introduced the pooled, targeted TF library into hESCs and differentiated the cells for 7 days (FIG. 46A and FIG. 60A). Applicants explored three different methods for selecting iNPs that can simultaneously assay different numbers of marker genes: reporter cell line (1 gene), flow-FISH (62) (2-10 genes), and scRNA-seq (up to ˜2,000 genes; FIG. 46A; see Methods). Deep sequencing of the TF barcodes identified candidate TFs that were enriched in iNPs (FIG. 46A, FIG. 60B-I, FIG. 61A-G, and Table 1). Applicants also individually tested the same 90 TF isoforms in an arrayed screening format (FIG. 42H, I). Applicants obtained concordant screening results (maximum Spearman correlation P-value of 10-3) with overlapping sets of top candidate TFs for iNP differentiation (FIG. 46B and Table 1), some of which (NFIB (63), OTX1 (64), PAX6 (65, 66), EOMES (66, 67), and ASCL1 (68)) are known to be critical for neural development, further supporting the screening results.

[0618] For downstream analysis, Applicants focused on eight TFs (RFX4, NFIB, FOS, OTX1, NFIC, PAX6, EOMES, and ASCL1) that were enriched in at least two screens. While all eight TFs produced iNPs that expressed VIM, an NP marker used to select target cells in the screens, RFX4, ASCL1, and PAX6 produced iNPs with bulk RNA-seq expression signatures that were the most similar to human fetal and organoid NPs (FIG. 62) (56, 69, 70). Overexpression of four of the eight TFs (RFX4, NFIB, PAX6, and ASCL1) produced multipotent iNPs that, like NPs, could spontaneously differentiate into neurons and astrocytes, as assayed by immunostaining and scRNA-seq (FIG. 46C, FIG. 63-64, Note 1). Intriguingly, cells overexpressing EOMES spontaneously differentiated into cardiomyocytes by both immunostaining and scRNA-Seq (FIG. 65 and Note 2). ScRNA-seq profiles of cells spontaneously differentiated from iNPs expressing these four TFs revealed a broad range of cell types that was reproducible across replicates and distinct between TFs, with RFX4-iNPs producing more CNS cell types (FIG. 66-68, Note 3, Table 6). Chromatin immunoprecipitation with sequencing (ChIP-seq) targeting each of the four TFs allowed us to identify motifs, transcriptional co-regulators, and candidate genes that drive iNP differentiation (FIG. 68F-I, Note 4).

[0619] RFX4-iNPs as a reproducible and tractable model for neural development and disease. Applicants further optimized RFX4-iNPs by combining RFX4 overexpression with dual SMAD inhibition (FIG. 69A-D) and compared Applicants' optimized protocol (RFX4-DS) to two previous NP differentiation methods (7, 33) using scRNA-seq. RFX4-DS-iNPs were most consistent within and between replicates, as measured by pairwise Euclidean distances and cluster distributions (FIG. 69E-K and Table 6), and may resemble subpallial NPs (71). Moreover, spontaneously differentiated cells from RFX4-DS-iNPs were remarkably consistent between replicates and consisted of predominantly radial glia and neurons, with a small subset (2-6%) of meningeal cells (FIG. 46D-F, FIG. 70, and Table 6). The propensity for RFX4-DS-iNPs to spontaneously differentiate into GABAergic neurons (FIG. 70F, G), rather than glutamatergic neurons like iNPs produced by alternative methods (7, 20), may stem from higher levels of NR2F2, a marker gene for GABAergic interneurons (FIG. 69K) (72, 73). Integrated analysis of ChIP-seq and bulk RNA-seq data further suggests that RFX4 directly binds the NR2F2 locus and upregulates its expression.

[0620] To explore the utility of RFX4-iNPs for modeling neurological disorders, Applicants evaluated the effects of DYRK1A perturbation on neurogenesis in this model (FIG. 71A-E). DYRK1A knockout and overexpression have been implicated in autism spectrum disorder (74, 75) and Down syndrome (76), respectively. Bulk RNA-seq of DYRK1A knockout and overexpression identified 42 genes, including those involved in neuronal migration and synapse formation, that were expressed in a DYRK1A dosage-dependent manner (FIG. 71F-J). During spontaneous differentiation, DYRK1A knockout increased, whereas DYRK1A overexpression decreased, the proportion of proliferating iNPs (FIG. 46G, H). Interestingly, DYRK1A knockout iNPs and overpressing iNPs ultimately have reduced neurogenesis as measured by neuronal MAP2 staining: in the knockout, this is because increased iNP proliferation deters neurogenesis (FIG. 461 and FIG. 71K), whereas in DYRK1A overexpression iNPs, it is because there were fewer iNPs due to lower initial proliferation (FIG. 46J). Electrophysiological characterization of spontaneously differentiated neurons showed that both DYRK1A knockout and overexpression resulted in reduced proportions of neurons with properties indicative of maturation (FIG. 72). Applicants' results are consistent with previous DYRK1A studies in other model systems (77-83) and provide additional insight. Thus, RFX4-iNPs may serve as a tractable system for studying neural development and disease.

[0621] Discovery of regulatory networks by joint profiling of chromatin accessibility and expression under TF overexpression. To decipher the interplay between TF activity and chromatin state in the context of causal TF overexpression, Applicants profiled 198 diverse TFs in the MORF library by joint single cell chromatin accessibility (by ATAC-Seq) and RNA profiles (SHARE-Seq (39, 84)). Applicants introduced the targeted 198 TF MORF library into hESCs and, after 4 or 7 days, performed SHARE-seq (3,317 and 2,384 UMIs per cell on average for scATAC- and scRNA-seq, respectively; FIG. 73A-D). Applicants constructed a weighted nearest neighbor (WNN) graph based on a weighted combination of RNA and ATAC similarities that integrated the two profiles into a single representation for clustering and visualization (FIG. 47A) (85). However, when comparing two separate embeddings of RNA and ATAC profiles (FIG. 73E, labeled by the WNN clusters), there was much stronger separation between RNA profiles than between ATAC profiles, with some ATAC profiles of cells belonging to distinct clusters in the WNN embedding, now grouping together. This suggests that changes in expression, rather than in chromatin accessibility, may have primarily contributed to the TF-driven cell state alterations (FIG. 47A and FIG. 73E), potentially because the chromatin landscape in hESCs is highly accessible and primed for differentiation (43). Cluster and pseudotime distributions were not drastically different between time points, suggesting that most TF ORFs have altered gene expression within 4 days (FIG. 73F-H). For each cluster, Applicants identified marker genes enriched in both scATAC- and scRNA-seq profiles (FIG. 47B). Consistent with the clustering analyses (FIG. 73E), changes in gene expression, instead of chromatin accessibility, drove marker gene specificity across clusters (FIG. 47B). Although Applicants did observe a few instances in which marker genes exhibited an increase in both chromatin accessibility and gene expression (FIG. 47C), most showed little (FIG. 48D) or no (FIG. 47E) change in chromatin accessibility. Instead, the chromatin at marker gene promoters tended to be open and primed for TF binding to alter gene expression.

[0622] Applicants leveraged the joint chromatin accessibility and expression profiles to identify downstream TFs regulated by each TF ORF that may facilitate cell state changes. Specifically, for each cluster, Applicants nominated key putative regulators by identifying TFs with both enriched expression in the scRNA-seq and enriched accessibility for their motifs in the scATAC-seq. Applicants then mapped TF ORFs in each cluster to these respective downstream regulators (FIG. 6F). For instance, GRHL1 and GRHL3 induce upregulation of TFAP2C and TEAD family TFs, consistent with their roles in trophoblast differentiation (FIG. 44D and FIG. 47F) (86). FLI1 induces the AP-1 family of TFs (JUN and FOS) and ETV2, consistent with its ability to induce vascular endothelial cells (FIG. 44D and FIG. 47F) (87). CDX1, CDX2, and HOXD11 induced posterior Hox genes, consistent with their roles in anterior-posterior specification (FIG. 44D and FIG. 47F) (88). For 18 TF ORFs, such as KLF5, GRHL1, MSGN1, and NHLH1, the endogenous TF itself was nominated as the top regulator, suggesting a positive feedback mechanism that enhances TF expression. The MORF library design allows this distinction, because expression of the overexpressed ORF is not captured by 3′ scRNA-seq (FIG. 50A). A complementary approach to identify top downstream regulators based on TF motif enrichment in significantly functional ATAC peaks (significant correlation between chromatin accessibility and expression of neighboring genes) yielded similar relationships (FIG. 731).

[0623] Combinatorial TF screening and prediction. Finally, as differentiation into more mature cell types often requires multiple TFs, Applicants explored how TF ORFs combine to produce the resulting expression state. To model combinatorial TF overexpression, Applicants first generated a scRNA-seq dataset for 10 TF ORFs in combinations, including 44 of the 45 possible doubles (the remaining pair was not detected) and 3 triples, as well as 10 singles (TF and GFP) as controls. Low dimensionality embedding and cluster analysis showed that expression profiles of combinations with similar TFs often grouped together, such that TF combinations were in some cases grouped with the single TF profile of one member of the respective pair, but not the other (FIG. 48A and FIG. 74), yielding a grouping of TF combinations associated with that single TF profile (e.g., CDX1, FLI1, and KLF4). In some other cases, two TFs generated a continuum of combinations, first centered around one, followed by their combination, and then centered around the other (e.g., FERD3L and NR5A2). This suggested that some TF effects may dominate those of others, whereas in other cases, the relationship may be more additive (in either nominal terms or in a non-linear embedded space).

[0624] Applicants next quantitively modeled TF interactions for every gene, by a linear regression model (ab=c1*a+c2*b+c3*a*b) that fits the expression profiles observed in cells overexpressing two TFs (ab) as a linear combination of the profiles in cells overexpressing one TF (a and b) along with an interaction term (a*b) (89, 90). This linear model explained, on average, 68% of the variance in gene expression (mean R2=0.68; FIG. 75A-C). For each TF combination, Applicants used the model to assess whether their relationship was overall additive, synergistic, buffering (antagonistic), or dominant (FIG. 75D-E) when aggregating their effects across targets (as their effects can vary for each gene target). Although most TF combinations were broadly additive, Applicants identified TFs that tended to interact non-additively with other TFs in a consistent manner. For instance, combinations with PTF1A had mostly buffering effects, FLI1 was enriched for synergistic effects, and CDX1 was often dominant (FIG. 75D-E).

[0625] Applicants then used the combinatorial dataset to nominate TF combinations that could produce a measured combinatorial expression profile. For each measured mean combinatorial profile for TFs A and B, Applicants nominated possible combinations of any pair of TFs X and Y, based on how well X and Y's respective single TF profiles when combined fit the measured combinatorial profile of A and B. Applicants tested different approaches for combining and fitting, including taking the average or using linear and nonlinear (kernel ridge and random forest) regression methods. As the baseline, Applicants randomly selected TF combinations from the same set of possible combinations (i.e., 45 combinations for doubles and 120 combinations for triples). Applicants compared the nominated and known TF combinations to evaluate prediction accuracy. Surprisingly, simply computing the average of the single TF profiles outperformed linear and nonlinear regression approaches (FIG. 48B, C). Averaging single TF profiles to predict double TF profiles had an accuracy of 81% when evaluating only the top TF combination and 91% when evaluating the top 10% of possible TF combinations (i.e., top 4 out of 45 total combinations; FIG. 48B). For triple TF profiles, averaging correctly predicted all 3 sets of TFs when evaluating the top ˜2% of possible TF combinations (i.e., top 2 out of 120 total combinations; FIG. 48C). The relatively worse performance of linear and nonlinear regression approaches may be because most TF combinations were additive (FIG. 75D). Applicants then extended this approach by using single TF profiles from the TF Atlas for fitting and testing if Applicants can recover the correct combination of TFs that generated the measured combinatorial profile. Applicants found that Applicants could still predict both double and triple TF combinations, though with lower accuracy (FIG. 76A-F). Double TF prediction had an accuracy of 57% when evaluating the top 10% of possible TF combinations and 80% when evaluating the top 20% (FIG. 76A-C). Triple TF prediction correctly identified all 3 sets of TFs when evaluating the top 5% of possible TF combinations (FIG. 76D-F). Both double and triple TF prediction outperformed the null of randomly selecting TF combinations from the corresponding set of possible combinations.

[0626] Applicants leveraged Applicants' findings from the combinatorial dataset to develop an approach for nominating TF combinations that could differentiate hESCs into different cell types. As averaging single TF expression profiles gave us a relatively good approximation for their combinatorial TF profile, Applicants estimated the profile of all possible double and triple TF combinations by averaging single TF profiles from the TF Atlas. Applicants then scored each combinatorial TF profile for enrichment of cell type-specific gene signatures using the human fetal cell atlas (48). For each cell type, Applicants ranked potential TF combinations by the respective gene signature score. Applicants confirmed that Applicants' approach enriched for experimentally validated double TF combinations for the respective cell types, such as hepatoblasts (HNF4A and FOXA1) (91), astrocytes (SOX9 and NFIB) (92), and inhibitory neurons (ASCL1 and DLX2) (93), within the 80th percentile (FIG. 48D). Moreover, the top predicted combinations for each cell type included TFs that are part of experimentally validated combinations as well as TFs that are developmentally critical, suggesting that the TF drives core gene programs for the cell type (FIG. 48E-I and Table 19). As an example, KLF6, unlike HNF4A and HNF1B, has not been applied to hepatocyte differentiation, even though Klf6 knockout mice do not develop a liver (FIG. 48E) (94). Similarly, ERG has not been previously used for endothelial cell differentiation, but it is required for angiogenesis (FIG. 48H) (95). As expected, TF combinations enriched for TFs that Applicants experimentally validated, such as NHLH1 for bronchiolar and alveolar epithelial-like cells, CDX1 for metanephric-like cells, and GRHL3 for trophoblast-like cells, suggesting combinations that could further improve the efficiency and fidelity of differentiating these cell types (FIG. 48F-I). Similarly, for triple TF combinations, Applicants' approach enriched for combinations that were experimentally validated and developmentally relevant (FIG. 76G-L and Table 19). Thus, Applicants suggest this approach may reduce the exponentially vast search space of combinatorial TF effects for follow up empirical experimentation, accelerating the pace of cellular engineering.

[0627] Discussion. To achieve a comprehensive understanding of the gene programs governed by each TF, Applicants developed a platform for systematic TF overexpression. Applicants created a comprehensive library of 3,548 human TF splice isoforms and built a TF Atlas that maps TF ORFs to corresponding expression changes. The TF Atlas allows for systematic investigation of the relationships between TFs as well as broad-spectrum findings. Applicants mapped TF-induced expression profiles to those of reference cell types and validated TFs for production of cell types from all three germ layers and trophoblasts. Applicants then performed a targeted TF screen to establish a cellular model for neurological disorders using RFX4-derived iNPs. In a second targeted screen, Applicants integrated expression and chromatin accessibility data to identify downstream regulatory networks for a subset of TFs. Finally, Applicants generated a combinatorial TF overexpression dataset and demonstrated that Applicants could often predict the effects of combining TFs in a useful way. Applicants leveraged Applicants' findings to develop an approach for predicting TF combinations for reference cell types, which can help investigators reduce the combinatorial search space for iterative experimentation.

[0628] The accessibility and flexibility of Applicants' screening approach lends itself to scalable extensions of the technology to additional contexts. Applicants' screening approach may be applied to identify TF combinations for any cell type of interest by increasing the screening MOI to increase the probability of introducing more than one TF in the same cell (89). Iterative or sequential TF screens may also expand the landscape of possible cell types as sequential overexpression of TFs may mimic the natural developmental trajectory. For instance, one could perform a TF screen in RFX4-iNPs for more mature cell types like specific neuronal or glial cell types. In addition to identifying TFs for directed differentiation, TF screening can be used to nominate candidates involved in trans-differentiation (22, 96), as well as aging (97) and cancer progression (98). Applicants' analysis of combinations suggests that while simple additive models provide a first-generation method to predict combinations, enhanced models that perform algebra in a latent space (such as the embedding in FIG. 48A) may be able to better predict combinatorial relations, especially as those vary for individual gene targets.

[0629] The TF Atlas establishes a framework for large-scale exploration of gene regulatory networks and, in concert with its application in other contexts such as additional cell types and differentiation time scales, will contribute to a comprehensive understanding of the processes controlling cell states. Moreover, as single cell profiling becomes more affordable, Applicants anticipate that the resolution of this TF Atlas will increase. In addition, Applicants' ORF barcoding approach allows for a variety of screening selection methods and could be extended to pooled ORF screening of other protein families of interest. Future applications of Applicants' MORF library and other pooled ORF libraries will accelerate our ability to scalably identify factors driving nearly any cellular phenotype of interest.
[0630] Note 1: Functional validation of candidate TFs by spontaneous differentiation. Applicants evaluated the multipotency of iNPs produced by candidate TFs by spontaneously differentiating the iNPs (FIG. 63A). Spontaneous differentiation of iNPs generated by four TFs (RFX4, NFIB, PAX6, and ASCL1) followed the natural developmental progression of neurogenesis starting at week 1 and proceeding to gliogenesis at week 4 (FIG. 46C and FIG. 63B, C). RFX4-iNPs patterned into neural rosettes prior to neurogenesis. Applicants validated these four candidate TFs in two additional cell lines, 11a induced pluripotent stem cells (iPSCs) and H1 hESCs. For both cell lines, overexpression of the four TFs produced iNPs that expressed higher levels of NP marker genes relative to GFP control (FIG. 64A, B). Following spontaneous differentiation, Applicants found that RFX4 and NFIB consistently produced functional iNPs in 11a iPSCs (FIG. 64C), and RFX4 produced functional iNPs in H1 hESCs (FIG. 64D). These results indicate that the effects of some TFs are cell line-dependent, while others, like RFX4, are cell line-independent, which may point to a more critical role in NP specification during development.
[0631] Note 2: Induced cardiomyocytes. During candidate TF assessment, Applicants noticed that EOMES generated cells that contracted rhythmically, a phenotype indicative of cardiomyocytes (iCM). After protocol optimization, including shortening EOMES induction to 2 days, EOMES-iCMs were comparable to iCMs generated using the canonical GSK and WNT inhibition method (GW-iCMs) (1), producing 73% and 84% TNNT2-positive cells respectively at day 10 that formed lattice-like structures (FIG. 65A-C). ScRNA-seq characterization of EOMES- and GW-iCMs at 4 weeks showed that both methods produced 72% ventricular cardiomyocytes (FIG. 65D-I). EOMES produced more smooth muscle cells, while GW produced more atrial cardiomyocytes and skeletal muscle cells (FIG. 65G-I). EOMES-iCMs expressed higher levels of maturation markers, MYL2 and HOPX (FIG. 65J, K) (2). Though a previous study showed that combining EOMES overexpression with WNT inhibition could produce iCMs (3), Applicants' results suggested that EOMES alone could generate iCMs, potentially due to the differences in EOMES splice isoforms used. These results show that TF screening can identify TFs for cell types of different lineages.
[0632] Note 3: ScRNA-seq profiling of differentiated cells from four candidate TFs. Applicants further characterized the cells spontaneously differentiated from iNPs produced by four TFs (RFX4, NFIB, PAX6, and ASCL1) using scRNA-seq. iNPs generated a broad range of cell types from the CNS, retina, epithelium, and neural crest (FIG. 66 and Table 6). For the CNS, iNPs spontaneously produced different regionally-restricted neural progenitors, as well as neurons, astrocytes, and ependyma (FIG. 67A). Applicants found that the spontaneously differentiated cell types were generally consistent between biological replicates of the same TF, except for those from RFX4-iNPs, and distinct between TFs (FIG. 67B-D). RFX4-iNPs produced more CNS cell types; NFIB-iNPs produced more epithelium and neural crest cell types; PAX6-iNPs generated diverse cell types; and ASCL1-iNPs produced more retina cell types (FIG. 67B-D). Further analysis of CNS neurons spontaneously differentiated from iNPs showed that the neurons expressed marker genes representative of diverse brain regions and neurotransmitters, including newborn cortical excitatory neurons and cortical projection neurons (FIG. 68A-D). RFX4-iNPs generated diverse neurons, NFIB-iNPs produced more cortical projection and excitatory neurons, PAX6-iNPs produced more forebrain neurons, and ASCL1-iNPs generated more forebrain GABAergic neurons (FIG. 68E). These differences potentially indicate different roles of each TF in neural development.
[0633] Note 4: ChIP-seq analysis of four candidate TFs. To better understand the transcriptional networks that lead to iNP production, Applicants profiled the four TFs using chromatin immunoprecipitation with sequencing (ChIP-seq). Motif analysis generated distinct motifs for each TF and suggested potential transcriptional coregulators, some of which have been found in previous studies (FIG. 68F) (4, 5). Applicants identified candidate genes that could contribute to iNP differentiation by examining NP marker genes with TF ChIP-seq peaks that were also differentially expressed upon TF overexpression (FIG. 68G-I). In addition, Applicants found that each of the four TFs had ChIP-seq peaks that were proximal to its own promoter, indicating a positive feedback mechanism that contributes to the high expression levels required for driving differentiation (FIG. 68H,I).

### Example 23—Materials and Methods

[0634] Sequences and cloning. The plasmids lentiMPHv2 (Addgene 89308) and lentiSAMv2 (Addgene 75112) were used for CRISPR activation. LentiCRISPRv2 (Addgene 52961) was used for CRISPR-Cas9 mediated homology-directed repair (HDR). The Puromycin resistance gene in lentiCRISPRv2 was replaced with Blasticidin resistance gene (Addgene 75112) for CRISPR-Cas9 knockout of DYRK1A. Single guide RNA (sgRNA) spacer sequences used in this study are listed in Table 11-15, and were cloned into the respective vectors as previously described (6). For spontaneous differentiation using a dox-inducible gene expression system, the plasmid pUltra-puro-RTTA3 (Addgene 58750) was used for rtTA. The EF1a promoter in pLX_TRC209 (Broad Genetic Perturbation Platform) was replaced with the pTight promoter (Addgene 31877). For DYRK1A overexpression, the codon-optimized DYRK1A sequence (NM_001396) was cloned into pLX_TRC209 (Broad Genetic Perturbation Platform) for expression under EF1a and the Hygromycin resistance gene was replaced with a Blasticidin resistance gene (Addgene 75112).

[0635] Cell culture and differentiation. HEK293FT cells (Thermo Fisher Scientific R70007) were maintained in high-glucose DMEM with GlutaMax and pyruvate (Thermo Fisher Scientific 10569010), 10% fetal bovine serum (VWR 97068-085), and 1% penicillin/streptomycin (Thermo Fisher Scientific 15140122). Cells were passaged every other day at a ratio of 1:4 or 1:5 using TrypLE Express (Thermo Fisher Scientific 12604021).

[0636] Unless otherwise specified, human embryonic stem cells (hESCs) used in these experiments were from H1 hESCs (WiCell). HUES66 hESCs (Harvard Stem Cell Institute iPS Core Facility) were used for the neural progenitor screens and candidate TF validation. Other stem cell lines used in this study include H9 hESCs (WiCell) and 11a human induced pluripotent stem cell (iPSCs) (gift from the Arlotta laboratory, Harvard University). hESCs and iPSCs were maintained in cell culture dishes coated with 1% Geltrex membrane matrix (Thermo Fisher Scientific A1413202) in mTeSR1 medium (STEMCELL Technologies 85850). For routine maintenance, stem cells were passaged 1:10-1:20 using ReLeSR (STEMCELL Technologies 05873). For lentivirus transduction and differentiation, cells were dissociated using Accutase (STEMCELL Technologies 07920) and seeded in mTeSR1 with 10 AM ROCK Inhibitor Y27632 (Enzo Life Sciences ALX-270-333-M025). All stem cells were maintained below passage 30 and confirmed to be karyotypically normal and negative for mycoplasma every 5-10 passages. Normocin (Invivogen ant-nr-1) was used as an antibiotic for stem cell culture and differentiation.

[0637] During neuronal differentiation, stem cell media was incrementally shifted towards neuronal media [Neurobasal medium (Thermo Fisher Scientific 21103049), B-27 (Thermo Fisher Scientific 17504044), and GlutaMAX (Thermo Fisher Scientific 35050061)] in 25% increments starting from day 2. On day 5, media was changed to 100% neuronal media.

[0638] During TF-driven neural progenitor (NP) differentiation, stem cell media was gradually shifted towards NP media [DMEM/F-12 with HEPES (Thermo Fisher Scientific 11330057), B-27 (Thermo Fisher Scientific 17504044), 20 ng/ml EGF (MilliporeSigma E9644), 20 ng/mL bFGF (STEMCELL Technologies 78003), and 2 μg/mL heparin (STEMCELL Technologies 07980)] in 25% increments as described above for neuronal differentiation. Cells were passaged at day 4. For spontaneous differentiation, 2 μg/ml doxycycline (MilliporeSigma D9891) was added to the media starting on day 0 for 7 days to induce TF expression. After 7 days, cells were maintained in NP media for 3 days before media was changed to differentiation media, which had the same components as NP media but without EGF and bFGF. Half of the media was refreshed every other day during spontaneous differentiation.

[0639] For RFX4-iNP protocol optimization, base media from the dual SMAD inhibition (DS) (7) and embryoid body (EB) (8) protocols were tested. DS media is a 1:1 mix of N-2 [DMEM/F12 with HEPES (Thermo Fisher Scientific 11330057), N-2 (Thermo Fisher Scientific 17502048), 5 μg/mL insulin (Millipore Sigma 19278), 100 μM nonessential amino acids (Thermo Fisher Scientific 11140050), and 100 μM 2-mercaptoethanol (Millipore Sigma M6250)] and neuronal media. EB media [DMEM/F12 with HEPES (Thermo Fisher Scientific 11330057), N-2 (Thermo Fisher Scientific 17502048), and B27 minus vitamin A (Thermo Fisher Scientific 12587010)] was also tested. SMAD inhibitors dorsomorphin (Millipore Sigma P5499) and SB-431542 (R&D Systems 1614) were added where indicated. To provide the best comparison between RFX4-iNP, DS, and EB methods, the differentiation timelines were aligned such that the iNPs produced by the three methods were dissociated for scRNA-seq at the same time.

[0640] For cardiomyocyte differentiation using EOMES-derived progenitors, HUES66 hESCs were seeded at 3×10⁵ or 5×10⁵ cells/cm². After 2 days, on day 0, 2 μg/mL doxycycline (MilliporeSigma D9891) was added to the media for 2 days unless otherwise indicated. On day 1, media was switched to cardiomyocyte differentiation media [RPMI 1640 with GlutaMax (Thermo Fisher Scientific A1895601), B-27 minus insulin (Thermo Fisher Scientific 17504044), and 10 mg/mL Ascorbic acid (Millipore Sigma A4403-100 MG)]. Media was refreshed on day 2 and every other day afterwards. On day 7, half of the media was replaced with cardiomyocyte maintenance media [RPMI 1640 with GlutaMax (Thermo Fisher Scientific A1895601) and B-27 (Thermo Fisher Scientific 17504044)]. On day 8, all of the media was replaced with cardiomyocyte maintenance media. For cardiomyocyte differentiation using GSK and Wnt inhibitors, 10 μM CHIR99021 (Selleckchem S1263) and 5 mM IWP4 (Stemgent 04-0036) were used as described previously (1).

[0641] To select the optimal media condition for the TF Atlas, stem cell media was gradually shifted towards 7 medias in 25% increments starting from day 2 as described above. Medias tested include M1 [DMEM/F-12 with HEPES (Thermo Fisher Scientific 11330057), N-2 (Thermo Fisher Scientific 17502048), B-27 (Thermo Fisher Scientific 17504044), and 100 μM nonessential amino acids (Thermo Fisher Scientific 11140050)], M2 [1:1 mix of neuronal media and DMEM/F-12 with HEPES (Thermo Fisher Scientific 11330057), N-2 (Thermo Fisher Scientific 17502048), and 100 μM nonessential amino acids (Thermo Fisher Scientific 11140050)], M3 [StemPro-34 SFM (Thermo Fisher Scientific 10639011) and GlutaMAX (Thermo Fisher Scientific 35050061)], M4 [STEMdiff APEL 2 (STEMCELL Technologies 05275)], M5 [cardiomyocyte maintenance media], M6 [KnockOut DMEM (Thermo Fisher Scientific 10829018), KnockOut Serum Replacement (Thermo Fisher Scientific 10828010), GlutaMAX (Thermo Fisher Scientific 35050061), and 100 μM nonessential amino acids (Thermo Fisher Scientific 11140050)], and M7 [stem cell media]. M4 was selected for the TF Atlas and validation.

[0642] Lentivirus production. HEK293FT cells (Thermo Fisher Scientific R70007) were cultured as described above. 1 day prior to transfection, cells were seeded at ˜40% confluency in T25, T75, or T225 flasks (Thermo Fisher Scientific 156367, 156499, or 159934). Cells were transfected the next day at ˜90-99% confluency. For each T25 flask, 3.4 μg of plasmid containing the vector of interest, 2.6 μg of psPAX2 (Addgene 12260), and 1.7 μg of pMD2.G (Addgene 12259) were transfected using 17.5 μL of Lipofectamine 3000 (Thermo Fisher Scientific L3000150), 15 μL of P3000 Enhancer (Thermo Fisher Scientific L3000150), and 1.25 mL of Opti-MEM (Thermo Fisher Scientific 31985070). Transfection parameters were scaled up linearly with flask area for T75 and T225 flasks. Media was changed 5 h after transfection. Virus supernatant was harvested 48 h post-transfection, filtered with a 0.45 μm PVDF filter (MilliporeSigma SLHV013SL), aliquoted, and stored at −80° C.

[0643] Lentivirus transduction. For transduction, 3×10⁶ hESCs or iPSCs were seeded in 10-cm cell culture dishes with an appropriate volume of lentivirus. After 24 h, media was refreshed with the appropriate antibiotic. For 5 days, media with the appropriate antibiotic was refreshed every day, and cells were passaged after 3 days of selection. Concentrations for selection agents were determined using a kill curve: 150 μg/mL Hygromycin (Thermo Fisher Scientific 10687010), 3 μg/mL Blasticidin (Thermo Fisher Scientific A1113903), and 1 μg/mL Puromycin (Thermo Fisher A1113803). Lentiviral titers were calculated by transducing cells with 5 different volumes of lentivirus and determining viability after a complete selection of 3 days (6).

[0644] qPCR quantification of transcript expression. Cells were seeded in 96-well plates and grown to 60-90% confluency before RNA was reverse transcribed for qPCR as described previously (6). TaqMan qPCR was performed with custom or readymade probes (Table 11-14).

[0645] Western blot. Protein lysates were harvested with RIPA lysis buffer (Cell Signaling Technologies 9806S) containing protease inhibitor cocktail (MilliporeSigma 05892791001). Samples were standardized for protein concentration using the Pierce BCA protein assay (VWR 23227), and incubated at 70° C. for 10 mins under reducing conditions. After denaturation, samples were separated by Bolt 4-12% Bis-Tris Plus Gels (Thermo Fisher Scientific NW04125BOX) and transferred onto a PVDF membrane using iBlot Transfer Stacks (Thermo Fisher Scientific IB401001).

[0646] For NEUROD1 and V5, blots were blocked with Odyssey Blocking Buffer (TBS; LiCOr 927-50000) for 1 h at room temperature. Blots were then probed with different primary antibodies in Odyssey Blocking Buffer overnight at 4° C. Blots were washed with TBST before incubation with secondary antibodies in Odyssey Blocking Buffer for 1 h at room temperature. Blots were washed with TBST and imaged using the Odyssey CLx (LiCOr).

[0647] For DYRK1A, blots were blocked with 5% BLOT-QuickBlocker (G Biosciences 786-011) in TBST for 1 h at room temperature. Blots were then probed with different primary antibodies in 2.5% BLOT-QuickBlocker (G Biosciences 786-011) in TBST overnight at 4° C. Blots were washed with TBST before incubation with secondary antibodies in 2.5% BLOT-QuickBlocker (G Biosciences 786-011) in TBST for 1 h at room temperature. Blots were washed with TBST and imaged using the Pierce ECL Western Blotting Substrate (Thermo Fisher Scientific 32209) on the ChemiDox XRS+(Bio-Rad).

[0648] Immunofluorescence and imaging. Cells were cultured on poly-D-lysine/laminin coated glass coverslips (VWR 354087) in 24-well plates as described above. Prior to staining, cells were washed with 1 mL PBS and fixed with 4% paraformaldehyde (VWR 15710) in PBS for 30 mins at room temperature. Cells were washed with PBS and blocked in PBS with 2.5% goat serum (Cell Signaling Technologies 5425S) and 0.1% Triton X-100 (MilliporeSigma 93443) for 1 h at room temperature. Cells were then stained with different primary antibodies in PBS with 1.25% goat serum (Cell Signaling Technologies 5425S) and 0.1% Triton X-100 (MilliporeSigma 93443) overnight at 4° C. Cells were washed in PBS with 0.1% Triton X-100 (MilliporeSigma 93443) before staining with the appropriate secondary antibodies in PBS with 1.25% goat serum (Cell Signaling Technologies 5425S) and 0.1% Triton X-100 (MilliporeSigma 93443) for 1 h at room temperature. Cells were washed in PBS with 0.1% Triton X-100 (MilliporeSigma 93443), mounted onto slides using ProLong Gold Antifade Mountant with DAPI (Thermo Fisher Scientific P36941), and nail polished (VWR 100491-940). Immunostained coverslips for NPs were imaged on a Zeiss Axio Observer with a Hamatsu Camera using a Plan-Apochromat 20× objective and a 1.6x Optovar. Immunostained coverslips for TF Atlas validation were imaged on a Leica Stellaris 5 confocal microscope using a 20× objective.

[0649] Image quantification. Images were taken from randomly selected regions using fixed exposure times. For quantification of MAP2 staining (FIG. 46I, J and FIG. 49F), the MeasureImageIntensity module in CellProfiler 3.1.8 was used to measure mean intensity on grayscale MAP2 420 μm×420 μm images. The IdentifyPrimaryObjects module in CellProfiler was used to identify and count nuclei in grayscale DAPI images with the following settings modified from default: Typical diameter of objects, in pixel units (Min, Max)=25, 70; Threshold strategy=Adaptive; Threshold smoothing scale=1.5; Lower and upper bounds on threshold=0.06, 1.0. For quantification of marker gene staining (FIG. 45D-K and FIG. 59), the MeasureImageIntensity module in CellProfiler 4.2.1 was used to measure mean intensity on grayscale 580 μm×580 μm images. The IdentifyPrimaryObjects module in CellProfiler was used to identify and count nuclei in grayscale DAPI images with the following settings modified from default: Typical diameter of objects, in pixel units (Min, Max): 25, 100; Threshold method=Otsu; Three-class thresholding; Assign pixels in the middle intensity class to the foreground; Threshold smoothing scale=5; Threshold correction factor=0.9; Lower and upper bounds on threshold=0.02, 1.0; Size of smoothing filter=10; Suppress local maxima that are closer than this minimum allowed distance=15; speed up by using lower-resolution image to find local maxima=no.

[0650] Design and cloning of TF ORF libraries. The barcoded human TF library (MORF) consisted of 1,836 genes that were selected based on AnimalTFDB (9) and Uniprot (10) annotations and included histone modifiers. The library included all 3,548 splice isoforms that overlapped between RefSeq and Gencode annotations, as well as 2 control vectors expressing GFP and mCherry. 593 of the 3,548 isoforms were obtained from the Broad Genomic Perturbation Platform and sequence verified. The rest of the isoforms were synthesized (Genewiz) and sequence verified. Table 3 lists the sequences of TFs in MORF.

[0651] To design a targeted TF ORF library for NP differentiation, single-cell or bulk RNA-seq datasets of human or mouse radial glia, neural stem cells, differentiated neural progenitors from 2D cultures or brain organoids, and fetal astrocytes were used to select TFs that were shown to be specifically expressed in these cell types (11-18). TFs that were identified in 2 or more datasets (out of 8) were included in the library. Then, bulk RNA-seq data of human fetal astrocytes (18) was used to identify TF isoforms annotated in RefSeq that comprised >25% of the TF gene transcripts. These criteria selected 90 TF isoforms covering 70 TF genes (Table 1). TF ORF isoforms that were not available from the Broad Genomic Perturbation Platform were synthesized with 24-bp barcodes (Genewiz) and cloned in an arrayed format into pLX_TRC317 (MORF; Broad Genetic Perturbation Platform) or pLX_TRC209 (targeted NP library; Broad Genetic Perturbation Platform) for expression under the EF1a promoter. Barcodes for each TF were selected to have a Hamming distance of at least 3 compared to all other barcodes.

[0652] To assess TF distribution, TF barcodes were amplified and deep-sequenced on the Illumina MiSeq or NextSeq platforms as previously described (6). For the pooled lentiviral library, lentiviral RNA was harvested using the QIAmp Viral RNA Mini Kit (Qiagen 52906) and reverse transcribed using the qScript Flex cDNA Kit (VWR 95049-100) with gene-specific priming before barcode amplification. NGS reads that perfectly matched each barcode were counted and normalized to the total number of perfectly matched NGS reads for each condition. Skew ratio was calculated as the normalized count for the 10th percentile divided by the 90th percentile.

[0653] Reporter cell line NP screen. To generate reporter cell lines, EGFP from pLX_TRC209 (Broad Genetic Perturbation Platform) followed by a T2A (GGCAGTGGAGAGGGCAGAGGAAGTCTGCTAACATGCGGTGACGT CGAGGAGAATCCTGGCCCA (SEQ ID NO: 10809)) self-cleaving peptide was inserted at the N-terminus of endogenous SLC1A3 and VIM genomic sequences. SLC1A3 and VIM were selected as NP marker genes based on convergence across published RNA-seq datasets and high expression levels (11-18). Clonal reporter cell lines were generated using CRISPR-Cas9 mediated HDR. To construct the HDR plasmids for each gene, the HDR templates that consisted of the 850-1,000 bp genomic regions flanking the sgRNA cleavage sites were PCR amplified from HUES66 genomic DNA using KAPA HiFi HotStart Readymix (KAPA Biosystems KK2602). Then EGFP-T2A flanked by HDR templates were cloned into pUC19 (Addgene 50005). HUES66 hESCs were nucleofected with 10 μg of sgRNA and Cas9 plasmid (Addgene 52961) and 6 μg of HDR plasmid using the P3 Primary Cell 4D-Nucleofector X Kit (Lonza V4XP-3024) according to the manufacturer's instructions. Cells were then seeded sparsely (2 electroporation reactions per 10-cm cell culture dish) to form single-cell clones. After 18 h, cells were selected for Cas9 expression with 0.5 μg/mL Puromycin for 2 days and expanded until colonies can be picked (˜1 week).

[0654] Cell colonies were detached by replacing the media with PBS and incubating at room temperature for 15 mins. Each cell colony was removed from the Petri dish using a 200 μL pipette tip and transferred a well in a 96-well plate for expansion. Clones with EGFP insertions were identified by 2-round PCR amplification, first with primers amplifying outside of the HDR template (HDR Fwd 1 and HDR Rev, 15 cycles) and then with primers amplifying the region of insertion (HDR Fwd 2 and HDR Rev, 15 cycles) to avoid detecting the HDR template plasmid as a false positive. Products were run on a gel to identify clones with insertions and Sanger sequencing confirmed that EGFP had been inserted at the intended site without mutations. For each reporter cell line, 3 clones with EGFP inserted into one of the two alleles were selected for further expansion and characterization.

[0655] For TF screening, SLCIA3 or VIM reporter HUES66 hESC lines were transduced with the pooled TF ORF library at MOI <0.3 and differentiated into iNPs as described above. After 7 days, 5-10×10⁶ cells were sorted for EGFP expression using the Sony SH800S Cell Sorter. For each clonal line, the percentage of cells sorted for the control condition was matched to those expressing EGFP (˜15-20%). After sorting, TF barcodes from each population were deep sequenced. Enrichment of each TF was calculated as the normalized barcode count in the high population divided by the count in the low population.

[0656] Flow-FISH NP screen. HUES66 hESCs were transduced with the pooled TF ORF library at MOI <0.3 and differentiated into iNPs as described above. After 7 days, cells were labeled with the appropriate FISH probes (Table 11-14) using the PrimeFlow RNA assay kit (Thermo Fisher Scientific 88-18005-204) with 20 million cells per biological replicate. FISH probes targeting transcripts with similar expression levels were pooled together. Once the cells were labeled, the entire cell population was sorted for high or low fluorescence (15% of cells per bin), indicating an aggregate expression level of the transcripts labeled with the pooled FISH probes for the particular wavelength. After sorting, TF barcodes from each population were amplified using a modified ChIP reverse cross-linking protocol as described previously (19). Enrichment of each TF was determined as described above for the reporter cell line screen.

[0657] 10× single-cell RNA sequencing (scRNA-seq) library preparation and analysis. Cells were dissociated with Accutase (STEMCELL Technologies 07920) for 10 mins (NP) or 50 mins (spontaneously differentiated cells) at 37° C. and filtered using a 70 μm cell strainer (MilliporeSigma CLS431751) to obtain single cells. Cells were loaded in the 10x Genomics Chromium Controller with 10,000 cells per channel. For cells from the scRNA-seq pooled screen and spontaneous differentiation of four candidate TFs, scRNA-seq libraries were prepared using the Chromium Single Cell 3′ Library & Gel Bead Kit v2 (10× Genomics 120237) according to the manufacturer's instructions. Libraries were sequenced on the NextSeq platform, aiming for a minimum coverage of 20,000 reads per single cell (paired-end; read 1: 26 cycles; i7 index: 8 cycles, i5 index: 0 cycles; read 2: 55 cycles). For cells from the NP method comparison and spontaneous differentiation of RFX4-DS-iNPs, scRNA-seq libraries were prepared using the Chromium Single Cell 3′ Library & Gel Bead Kit v3 (10x Genomics 1000075) and sequenced on the HiSeq X platform (paired-end; read 1: 28 cycles; i7 index: 8 cycles, i5 index: 0 cycles; read 2: 96 cycles).

[0658] Sequencing data were aligned and quantified using the Cell Ranger Single-Cell Software Suite v3.1.0 (10× Genomics) (20) against the GRCh38 human reference genome provided by Cell Ranger. Scanpy v1.4.4 (21) was used to cluster and visualize cells. Cells with 400-7,000 detected genes and less than 10% total mitochondrial gene expression were retained for analysis. Genes that were detected in fewer than 3 cells were removed. Scanpy was used to log normalize, scale, and center the data and unwanted variation was removed by regressing out the number of UMIs and percent mitochondrial reads. Next, highly variable genes were identified and used as input for dimensionality reduction via principal component analysis (PCA). The resulting principal components were then used to cluster the cells, which were visualized using Uniform manifold approximation and projection (UMAP). Clusters were identified using Louvain by fitting the top 50 principal components to compute a neighborhood graph of observations with local neighborhood number of 20 using the scanpy.pp.neighbors function. Cells were then clustered into subgroups using the Louvain algorithm implemented as the scanpy.tl.louvain function. Cluster marker genes and associated p-values were identified using the scanpy.tl.rank_gene_groups function. To compare iNP differentiation methods, the cluster of spontaneously differentiated neurons was excluded. Intra- and inter-batch distances were calculated on the 2,305 variable genes using the spatial.distance.pdist and spatial.distance.cdist functions, respectively, from SciPy.

[0659] ScRNA-seq NP screen. HUES66 hESCs were transduced with the pooled TF ORF library at MOI <0.3 and differentiated into iNPs. Then, iNPs were dissociated for scRNA-seq analysis as described above. To pair TF barcodes with cell barcodes, TF and cell barcodes were PCR amplified from cDNA retained following the whole transcriptome amplification step of the 10× Genomics scRNA-seq library preparation protocol. The resulting amplicon was sequenced on the Illumina NextSeq platform, aiming for a minimum coverage of 20,000 reads per single cell (paired-end; read 1: 16 cycles; read 2: 72 cycles). For each cell, the TF whose corresponding barcode had the highest number of perfectly matching NGS reads was paired with the cell if the TF barcode had at least 2 reads and >25% more reads than the second highest TF. Otherwise, the cell was excluded from the scRNA-seq analysis. To identify TFs that produced similar expression profiles to radial glia, TF scRNA-seq signatures were correlated to available human fetal cortex or brain organoid scRNA-seq datasets (14, 22-25). The 1,121 most variable genes identified using the scanpy.pp.highly_variable genes function with the parameters “min_mean=0.0125, max_mean=3 and min_disp=0.5” were used. Candidate TFs were ranked based on Pearson correlations between mean expression profiles of each TF ORF and radial glia from reference datasets.

[0660] Arrayed NP screen. TF ORFs were packaged individually into lentivirus for delivery into HUES66 hESCs at MOI <0.5. After 7 days, cells were differentiated into NP and harvested for qPCR as described above to measure expression of SLC1A3 and VIM.

[0661] Bulk MORF library screen. H1 hESCs were transduced with the pooled MORF library at MOI <0.3 and differentiated for 7 days in different culture media as described above. Cells were stained for pluripotency markers, SSEA4 and TRA-1-60, and sorted for high or low fluorescence (10% of cells per bin). After sorting, TF barcodes from each population were deep sequenced. Enrichment of each TF was calculated as the normalized barcode count in the low population divided by the count in the high population.

[0662] Bulk RNA sequencing (RNA-seq) and analysis. RNA from cells plated in 24-well plates and grown to 60-90% confluency was harvested using the RNeasy Plus Mini Kit (Qiagen 74134). RNA-seq libraries were prepared using NEBNext Ultra RNA Library Prep Kit for Illumina (NEB E7530S) and deep sequenced on the Illumina NextSeq platform (>9 million reads per biological replicate). Bowtie (26) index was created based on the hg38 genome and RefSeq transcriptome. Next, RSEM v1.3.1(27) was run with command line options “--estimate-rspd --bowtie-chunkmbs 512 --paired-end” to align paired-end reads directly to this index using Bowtie and estimate expression levels in transcripts per million (TPM) based on the alignments.

[0663] TFs with similar RNA-seq signatures to reference cell types from human fetal cortex or brain organoid (14, 23, 24) were identified using Pearson correlation between expression profiles. For each TF ORF, the expression signature was defined as the top 2,000 genes with the highest fold change relative to the GFP control condition. For each cell type, the average expression profile in TPM was used. To identify genes that were differentially expressed, TPM values were log-transformed (log₂(TPM+1)) and filtered for genes that were detectable (above or equal to 1) in either condition. TF overexpression conditions were compared to control conditions using the Student's t-test. Only genes that were significant (FDR<0.05) were reported.

[0664] Chromatin immunoprecipitation with sequencing (ChIP-seq). Cells were plated in 10-cm cell culture dishes and grown to 60-80% confluency. For each condition, two biological replicates were harvested for ChIP-seq. Formaldehyde (MilliporeSigma 252549) was added directly to the growth media for a final concentration of 1% and cells were incubated at 37° C. for 10 mins to initiate chromatin fixation. Fixation was quenched by adding 2.5 M glycine (MilliporeSigma G7126) in PBS for a final concentration of 125 mM glycine and incubated at room temperature for 5 mins. Cells were then washed with ice-cold PBS, scraped, and pelleted at 1,000×g for 5 mins.

[0665] Cell pellets were prepared for ChIP-seq using the Epigenomics Alternative Mag Bead ChIP Protocol v2.0(28). Briefly, cell pellets were resuspended in 100 μL of lysis buffer (1% SDS, 10 mM EDTA, 50 mM Tris-HCL pH 8.1) containing protease inhibitor cocktail (MilliporeSigma 05892791001) and incubated for 10 mins at 4° C. Then 400 μL of dilution buffer (0.01% SDS, 1.1% Triton X-100, 1.2 mM EDTA, 16.7 mM Tris-HCl pH 8.1, and 167 mM NaCl) containing protease inhibitor cocktail (MilliporeSigma 05892791001) was added. Samples were pulse sonicated with 2 rounds of 10 mins (30s on-off cycles, high frequency) in a rotating water bath sonicator (Diagenode Bioruptor) with 5 mins on ice between each round. 10 μL of sonicated sample was set aside as input control. Then 500 μL of dilution buffer (0.01% SDS, 1.1% Triton X-100, 1.2 mM EDTA, 16.7 mM Tris-HCl pH 8.1, and 167 mM NaCl) containing protease inhibitor cocktail (MilliporeSigma 05892791001) and 1 μL of anti-V5 was added to the sonicated sample. ChIP samples were rotated end over end overnight at 4° C.

[0666] For each ChIP, 50 μL of Protein A/G Magnetic Beads (Thermo Fisher Scientific 88802) was washed with 1 mL of blocking buffer (0.5% TWEEN and 0.5% BSA in PBS) containing protease inhibitor cocktail (MilliporeSigma 05892791001) twice before resuspending in 100 μL of blocking buffer. ChIP samples were transferred to the beads and rotated end over end for 1 h at 4° C. ChIP supernatant was then removed and the beads were washed twice with 200 μL of RIPA low salt buffer (0.1% SDS, 1% Triton x-100, 1 mM EDTA, 20 mM Tris-HCl pH 8.1, 140 mM NaCl, 0.1% DOC), twice with 200 μL of RIPA high salt buffer (0.1% SDS, 1% Triton x-100, 1 mM EDTA, 20 mM Tris-HCl pH 8.1, 500 mM NaCl, 0.1% DOC), twice with 200 μL of LiCl wash buffer (250 mM LiCl, 1% NP40, 1% DOC, 1 mM EDTA, 10 mM Tris-HCl pH 8.1), and twice with 200 μL of TE (10 mM Tris-HCl pH8.0, 1 mM EDTA pH 8.0). ChIP samples were eluted with 50 μL of elution buffer (10 mM Tris-HCl pH 8.0, 5 mM EDTA, 300 mM NaCl, 0.1% SDS). 40 μL of water was added to the input control samples. 8 μL of reverse cross-linking buffer (250 mM Tris-HCl pH 6.5, 62.5 mM EDTA pH 8.0, 1.25 M NaCl, 5 mg/ml Proteinase K, 62.5 μg/ml RNAse A) was added to the ChIP and input control samples and then incubated at 65° C. for 5 h. After reverse crosslinking, samples were purified using 116 μL of SPRIselect Reagent (Beckman Coulter B23318).

[0667] ChIP-seq libraries were prepared with NEBNext Ultra II DNA Library Prep Kit for Illumina (NEB E7645S) and deep-sequenced on the Illumina NextSeq platform (>60 million reads per condition). Bowtie (26) was used to align paired-end reads to the hg38 genome with command line options q -X 300 --sam --chunkmbs 512″. Next, biological replicates were merged and Model-based Analysis of ChIP-seq (MACS) (29) was run with command line options “-g hs -B -S --mfold 6,30” to identify TF peaks. HOMER (30) was used to discover motifs in the TF peak regions identified by MACS. The findMotifsGenome.pl program from HOMER was run with the command line options “-size 200-mask” and the top 3 known and de novo motifs were presented. TFs were considered potential regulators of a candidate gene if the TF peak region identified by MACS overlapped with the 20 kb region centered around the transcriptional start site of the candidate gene RefSeq annotations.

[0668] Indel analysis. Cells plated in 96-well plates were grown to 60-80% confluency and assessed for indel rates as previously described (6). Genomic DNA was harvested from cells using QuickExtract DNA Extraction kit (Lucigen QE09050). The genomic region flanking the site of interest was amplified using NEBNext High Fidelity 2x PCR Master Mix (New England BioLabs M0541L), first with region-specific primers for 15 cycles and then with barcoded primers for 15 cycles as previously described. PCR products were sequenced on the Illumina MiSeq platform (>10,000 reads per condition), and indel analysis was performed as previously described (6).

[0669] Flow cytometry assays. To measure the proportion of cells that expressed TNNT2, cells were stained for TNNT2 (Thermo Fisher Scientific MS-295-P1; 1:200 dilution) as described previously (31). For the EdU assay, cells plated in 24-well plates were differentiated and EdU incorporation was measured using the Click-iT EdU Alexa Fluor 488 Flow Cytometry Assay Kit (Thermo Fisher Scientific C10420) according to a modified version of the manufacturer's instructions. EdU was added to the culture medium to a final concentration of 10 μM for 2 h before cells were dissociated with Accutase (STEMCELL Technologies 07920) for 15-45 mins at 37° C. Cells were transferred to a 96-well plate, pelleted at 200×g for 5 mins, and washed once with 200 μL of 1% BSA (MilliporeSigma A9418) in PBS. Cells were resuspended in 100 μL of Click-iT fixative and incubated for 15 mins at room temperature in the dark. After fixing, cells were washed with 200 μL of 1% BSA (MilliporeSigma A9418) in PBS twice, resuspended in 100 μL of Click-iT saponin-based permeabilization and wash reagent, and incubated for 15 mins in the dark. To each sample, 500 μL of Click-iT reaction cocktail was added and the reaction mixture was incubated for 30 mins at room temperature in the dark. Cells were washed with 200 μL of Click-iT saponin-based permeabilization and wash reagent twice and resuspended in 200 μL of 1% BSA (MilliporeSigma A9418) in PBS. For each sample, 10,000 cells were analyzed on a CytoFLEX Flow Cytometer (Beckman Coulter) and quantified with FlowJo (FlowJo).

[0670] Electrophysiology. Whole-cell patch-clamp recordings were performed as described (doi: 10.1016/j.celrep.2018.04.066). Recording pipettes were pulled from thin-walled borosilicate glass capillary tubing (KG33, King Precision Glass, CA, USA) on a P-97 puller (Sutter Instrument, CA, USA) and had resistances of 3-5 MΩ when filled with internal solution (in mM: 128 K-gluconate, 10 HEPES, 10 phosphocreatine sodium salt, 1.1 EGTA, 5 ATP magnesium salt and 0.4 GTP sodium salt, pH=7.3, 300-305 mOsm). The cultured cells were constantly perfused at a speed of 3 ml/min with the extracellular solution (119 mM NaCl, 2.3 mM KCl, 2 mM CaCl2, 1 mM MgCl2, 15 mM HEPES, 5 mM glucose, pH=7.3-7.4, Osmolarity was adjusted to 325 mOsm with sucrose). All the experiments were performed at room temperature unless otherwise specified.

[0671] Cells were visualized with a 40X water-immersion objective on an upright microscope (Olympus, Japan) equipped with IR-DIC. Recordings were made using a Multiclamp 700B amplifier (Molecular Devices, CA, USA) and Clampex 10.7 software (Molecular Devices, CA, USA). In current clamp mode, membrane potential was held at −65 mV with a Multiclamp 700B amplifier, and step currents were then injected to elicit action potentials. Subsequent analysis was performed using Clampfit 10.7 software (Molecular Devices, CA, USA). The spontaneous AMPA receptor mediated excitatory postsynaptic currents (sEPSCs) were recorded after entering whole-cell patch clamp recording mode for at least 3 min. The data were stored in a computer for subsequent offline analysis. Cells in which the series resistance (Rs) changed by >20% were excluded from data analysis. In addition, cells with Rs more than 20 MS2 at any time during the recordings were discarded.

[0672] TF Atlas SHARE-seq library preparation. For single TF overexpression, H1 hESCs were transduced with the pooled MORF library at MOI <0.3. For combinatorial TF overexpression, H1 hESCs were transduced with combinations of 2 or 3 TFs at MOI <1 in an arrayed format and selected with multiple antibiotics. Cells were pooled during passaging at day 4. Cells were differentiated for 7 days in STEMdiff APEL 2 (STEMCELL Technologies 05275) as described above. Cells were dissociated with Accutase (STEMCELL Technologies 07920) for 10 mins at 37° C. and filtered using a 70 μm cell strainer (MilliporeSigma CLS431751) to obtain single cells.

[0673] SHARE-seq libraries were prepared as previously described (32). Briefly, cells were fixed and permeabilized. For joint measurements of single-cell chromatin accessibility and expression (scATAC- and scRNA-seq), cells were first transposed by Tn5 transposase to mark regions of open chromatin. The mRNA was reverse transcribed using a poly(T) primer containing a unique molecular identifier (UMI) and a biotin tag. Permeabilized cells were distributed in a 96-well plate to hybridize well-specific barcoded oligonucleotides to transposed chromatin fragments and poly(T) cDNA. Hybridization was repeated three times to expand the barcoding space and ligate cell barcodes to cDNA and chromatin fragments. Reverse crosslinking was performed to release barcoded molecules. cDNA was separated from chromatin using streptavidin beads, and each library was prepared separately for sequencing. Libraries were sequenced on the Illumina NovaSeq platform, aiming for a minimum coverage of 20,000 reads per single cell (for scRNA-seq only, read 1: 100 cycles, read 2: 10 cycles, index 1: 99 cycles, index 2: 8 cycles; for scATAC- and RNA-seq, read 1: 50 cycles, read 2: 50 cycles, index 1: 99 cycles, index 2: 8 cycles). To pair TF barcodes with cell barcodes, TF and cell barcodes were PCR amplified from cDNA retained following the whole transcriptome amplification step and before tagmentation. The resulting amplicon was sequenced on the Illumina NovaSeq platform, aiming for a minimum coverage of 10,000 reads per single cell (read 1: 65 cycles; index 1: 99 cycles).

[0674] SHARE-seq data preprocessing. SHARE-seq libraries were aligned as previously described (32). Briefly, SHARE-ATAC-seq reads were trimmed and aligned to the hg38 genome using bowtie2. Reads were demultiplexed using four sets of 8-bp barcodes in the index reads, tolerating one mismatched base per barcode. Reads mapping to the mitochondria and chrY were discarded. Duplicates were removed using Picard tools (http://broadinstitute.github.io/picard/). Open chromatin region peaks were called on individual samples using MACS2 peak caller (29). Peaks from all samples were merged and peaks overlapping with ENCODE blacklisted regions (https://sites.google.com/site/anshulkundaje/projects/blacklists) were filtered out. Peak summits were extended by 150 bp on each side and defined as accessible regions. The fragment counts in peaks and TF scores were calculated using chromVAR (33).

[0675] SHARE-RNA-seq reads were trimmed and filtered for reads that contain TTTTTT at the 11-16 bases of read 2 allowing for one mismatch. Reads were aligned to hg38 genome using STAR (34). Reads were demultiplexed as described above for SHARE-ATAC-seq. Aligned reads were annotated to both exons and introns using featurecounts (35). UMI-Tools (36) was used to collapse UMIs that were within one mismatch of another UMI. UMIs with only one read were removed as potential ambient RNA contamination. A matrix of gene counts by cell was created with UMI-Tools. Cells that expressed <7,000 genes and <5% mitochondrial reads were retained. The minimum number of genes per cell was selected based on the distribution for each dataset (TF Atlas, >700 genes; joint scRNA- and ATAC-seq, >400 genes; combinatorial TF screen, >500 genes) Scanpy v1.7.2 (21) was used to preprocess the count matrix and cluster cells as described above for 10X scRNA-seq libraries. Harmony (37) (max_iter_harmony=30, max_iter_kmeans=50) was used for batch correction. To map TF ORFs to single cells, TF barcodes were ranked by number of perfectly matching NGS reads and filtered for >10 reads. For single TF overexpression, the TF barcode with the highest number of NGS reads and >50% more reads than the second highest TF were mapped. For combinatorial TF overexpression, the top two or three TF barcodes were mapped. Cells without mapped TF ORFs were excluded from downstream analyses. Scanpy's sc.pp.subsample was used to subsample datasets by TF ORF.

[0676] Pseudotime analysis. Three approaches were used to order cells along pseudotime: diffusion, RNA velocity, and Monocle3. Diffusion pseudotime was determined using Scanpy's sc.tl.diffmap (n_comps=15) and sc.tl.dpt functions. RNA velocity pseudotime was determined using scVelo (38). The top 5,000 most dispersed genes were used to estimate velocity (mode=‘stochastic’) and the velocity pseudotime function was used to determine pseudotime. Monocle3 (39) pseudotime was determined by clustering cells into the same partition and applying the order_cells function. For each approach, pseudotimes were computed using each cell expressing GFP or mCherry controls as the root cells and averaged. Genes that were differentially expressed over pseudotime were identified by fitting a linear regression on the raw counts against pseudotime using scipy.stats.linregress. Genes with slopes that were significantly different than 0 (FDR<0.05) were considered differentially expressed.

[0677] Pathway enrichment analysis. Pathway enrichment analysis was performed using g:Profiler (40). The top 100 differentially expressed genes over diffusion pseudotime or genes with the highest NMF gene program weights were provided as a ranked list for input. GO:BP pathways with between 5 and 500 genes that were significantly enriched (FDR<0.05) were included. To identify non-overlapping pathways, the enriched pathways were sorted by FDR and any pathway that had more than 50% genes overlapping was excluded. For the subset of differentiated cells in FIG. 56C, Enrichr (41) implemented by GSEApy was used to evaluate the enrichment of each pathway in the set of differentially expressed genes for each cluster.

[0678] Non-negative matrix factorization. To identify gene programs in the scRNA-seq data, non-negative matrix factorization (NMF) was performed using scikit-learn (http://scikit-learn.sourceforge.net; tol=1e-5, max_iter=10000). The analysis was performed on log-normalized, centered expression data for the set of variable genes. Negative values were converted to zero to identify enriched gene programs. Positive values were converted to zero and the data multiplied by −1 to identify depleted gene programs. The optimal number of NMF programs for enriched and depleted gene programs was determined by performing NMF analysis over a range of K values (20, 30, 50, 100, 200). The average NMF program weights for each TF ORF were ordered by hierarchical clustering using 1-correlation coefficient as the distance and Ward's linkage. Clustering results were examined for groups of TFs with known similarities to select the best value of K. Applicants chose 50 NMF programs each for enriched and depleted gene programs.

[0679] Cell type mapping. Expression profiles of differentiated cells were mapped to those of reference cell types from the human fetal cell transcriptome atlas (42) using Seurat v4 (43). The set of common variable genes between the differentiated cells and reference dataset were used for mapping. The FindTransferAnchors function from Seurat was run with parameters: dims=1:50, k.anchor=15, k.filter=100, k.score=50, and max.features=300. Cells with a maximum prediction score >0.3 were mapped to the respective cell type.

[0680] Joint chromatin accessibility and gene expression analysis. Seurat v4 (44) was used for the joint chromatin accessibility and gene expression (scATAC- and scRNA-seq) multimodal analysis. Dimensionality reduction was performed on each dataset separately. The scRNA-seq data was normalized and variable features were retained for scaling and principle component analysis (PCA). The scATAC-seq data was normalized using term-frequency inverse-document-frequency and the top 250,000 most accessible regions were retained for latent semantic indexing (LSI). Weighted nearest neighbor analysis from Seurat (dims.list=list(1:50, 2:50), prune.SNN=1/40) was performed using the scRNA-seq PCA and scATAC-seq LSI to simultaneously cluster scATAC- and scRNA-seq data. Marker genes for each cluster were identified using Presto (45).

[0681] Two approaches were used to identify top regulators in each cluster. First, chromVAR (33) computed accessibility scores for known motifs at the single cell level. Presto (45) identified TFs whose expression and motif accessibility were both significantly enriched (FDR<0.05) in each cluster. These TFs were ranked by the average of the Presto AUC statistic to identify top regulators. Second, the ATAC peaks were filtered for those whose accessibility was significantly correlated with neighboring genes (41,376 peaks with FDR<0.25) with background correction, as described previously (32). Presto identified ATAC peaks that were significantly enriched (FDR<0.05) in each cluster. Enrichment of known TF motifs was determined by a Kolmogorov-Smimov test of the position weight matrix (PWM) scores in the cluster compared to PWM scores in GC- and accessibility-matched peaks.

[0682] Combinatorial TF prediction. The average expression profiles of TF combinations were used for prediction. All possible combinations of single TF expression profiles were fitted against each measured double or triple TF profile to select the TF combination with the best fit. Linear regression (fit_intercept=False, positive=True), kernel ridge regression (alpha=1), and random forest regression (max_depth=4, n_estimators=200) from scikit-learn (http://scikit-learn.sourceforge.net) were evaluated and scored based on the coefficient of determination. Average expression profiles were scored based on Pearson correlation. To predict double and triple TF profiles using single TF profiles from the TF Atlas, the two datasets were integrated using Harmony (37). The average expression profiles from the TF Atlas differentiated cells were fitted against each double or triple TF profile. As TFs from the TF Atlas can share similar expression profiles, average expression profiles were grouped by hierarchical clustering using 1−correlation coefficient as the distance and Ward's linkage where indicated.

[0683] To predict TF combinations for reference cell types, expression profiles of double or triple TFs were estimated using the mean expression profiles from the TF Atlas differentiated cells. Individual TF profiles were grouped by hierarchical clustering as described above into 365 clusters for double TF profiles and 151 clusters for triple TF profiles to reduce the number of combinations. Group gene signatures for reference cell types from the human fetal cell atlas (42) were extracted using CelliD (46) with default parameters. Cell type-specific gene signature scores were computed on all possible estimated expression profiles for multiple TFs. Predicted TF combinations were ranked by cell type-specific gene signature scores. Combinations that did not include any cell type-specific TFs (approximately 10-50% of combinations depending on the cell type) were eliminated. For each cell type, up to 100 TFs that were significantly enriched (FDR<0.05) based on the human fetal cell atlas (42) analysis were considered specific for that cell type. In cases with more than 100 significantly enriched TFs, the top 100 TFs with the highest expression relative to other cell types were included.

[0684] Statistics. Statistical tests were applied with the sample size listed in the text and figure legends. Sample size represents the number of independent biological replicates. Data supporting main conclusions represents results from at least two independent experiments. All graphs with error bars report mean±s.e.m. values. Two-tailed t-tests were performed unless otherwise indicated. PRISM was used for basic statistical analysis and plotting (www.graphpad.com), and the R language and programming environment (www.r-project.org) was used for the remainder of the statistical analysis. Multiple hypothesis testing correction was applied where indicated.

### REFERENCES FOR EXAMPLES 22 AND 23

[0685] 1. S. A. Lambert et al., The Human Transcription Factors. Cell 172, 650-665 (2018).
[0686] 2. I. Amit et al., Unbiased reconstruction of a mammalian transcriptional network mediating pathogen responses. Science 326, 257-263 (2009).
[0687] 3. R. Sandberg, Entering the era of single-cell transcriptomics in biology and medicine. Nat Methods 11, 22-24 (2014).
[0688] 4. S. A. Dalla Torre di Sanguinetto, J. S. Dasen, S. Arber, Transcriptional mechanisms controlling motor neuron diversity and connectivity. Curr Opin Neurobiol 18, 36-43 (2008).
[0689] 5. T. Ravasi et al., An atlas of combinatorial transcriptional regulation in mouse and man. Cell 140, 744-752 (2010).
[0690] 6. D. E. Cohen, D. Melton, Turning straw into gold: directing cell fate for regenerative medicine. Nat Rev Genet 12, 243-252 (2011).
[0691] 7. S. T. Schafer et al., Pathological priming causes developmental gene network heterochronicity in autistic subject-derived neurons. Nat Neurosci 22, 243-255 (2019).
[0692] 8. A. Colman, O. Dreesen, Pluripotent stem cells and disease modeling. Cell Stem Cell 5, 244-247 (2009).
[0693] 9. G. Keller, Embryonic stem cell differentiation: emergence of a new era in biology and medicine. Genes Dev 19, 1129-1155 (2005).
[0694] 10. E. Kiskinis, K. Eggan, Progress toward the clinical application of patient-specific pluripotent stem cells. J Clin Invest 120, 51-59 (2010).
[0695] 11. D. A. Robinton, G. Q. Daley, The promise of induced pluripotent stem cells in research and therapy. Nature 481, 295-305 (2012).
[0696] 12. S. A. Morris, G. Q. Daley, A blueprint for engineering cell fate: current technologies to reprogram cell identity. Cell Res 23, 33-48 (2013).
[0697] 13. H. Okano, S. Yamanaka, iPS cell technologies: significance and applications to CNS regeneration and disease. Mol Brain 7, 22 (2014).
[0698] 14. K. Saha, R. Jaenisch, Technical challenges in using human induced pluripotent stem cells to model disease. Cell Stem Cell 5, 584-595 (2009).
[0699] 15. S. M. Wu, K. Hochedlinger, Harnessing the potential of induced pluripotent stem cells for regenerative medicine. Nat Cell Biol 13, 497-505 (2011).
[0700] 16. S. Chen et al., A small molecule that directs differentiation of human ESCs into the pancreatic lineage. Nat Chem Biol 5, 258-265 (2009).
[0701] 17. K. Hochedlinger, K. Plath, Epigenetic reprogramming and induced pluripotency. Development 136, 509-523 (2009).
[0702] 18. S. C. Zhang, M. Wernig, I. D. Duncan, O. Brustle, J. A. Thomson, In vitro differentiation of transplantable neural precursors from human embryonic stem cells. Nat Biotechnol 19, 1129-1133 (2001).
[0703] 19. S. M. Chambers et al., Highly efficient neural conversion of human ES and iPS cells by dual inhibition of SMAD signaling. Nat Biotechnol 27, 275-280 (2009).
[0704] 20. Y. Shi, P. Kirwan, J. Smith, H. P. Robinson, F. J. Livesey, Human cerebral cortex development from pluripotent stem cells to functional excitatory synapses. Nat Neurosci 15, 477-486, S471 (2012).
[0705] 21. A. H. M. Ng et al., A comprehensive library of human transcription factors for cell fate engineering. Nat Biotechnol 39, 510-519 (2021).
[0706] 22. Z. P. Pang et al., Induction of human neuronal cells by defined transcription factors. Nature 476, 220-223 (2011).
[0707] 23. U. Parekh et al., Mapping Cellular Reprogramming via Pooled Overexpression Screens with Paired Fitness and Single-Cell RNA-Sequencing Readout. Cell Syst 7, 548-555 e548 (2018).
[0708] 24. A. L. Perrier et al., Derivation of midbrain dopamine neurons from human embryonic stem cells. Proc Natl Acad Sci USA 101, 12543-12548 (2004).
[0709] 25. K. Takahashi et al., Induction of pluripotent stem cells from adult human fibroblasts by defined factors. Cell 131, 861-872 (2007).
[0710] 26. H. Weintraub et al., Activation of muscle-specific genes in pigment, nerve, fat, liver, and fibroblast cell lines by forced expression of MyoD. Proc Natl Acad Sci USA 86, 5434-5438 (1989).
[0711] 27. J. Yu et al., Induced pluripotent stem cell lines derived from human somatic cells. Science 318, 1917-1920 (2007).
[0712] 28. Y. Zhang et al., Rapid single-step induction of functional neurons from human pluripotent stem cells. Neuron 78, 785-798 (2013).
[0713] 29. J. M. Pedraza, A. van Oudenaarden, Noise propagation in gene networks. Science 307, 1965-1969 (2005).
[0714] 30. S. Konermann et al., Genome-scale transcriptional activation by an engineered CRISPR-Cas9 complex. Nature 517, 583-588 (2015).
[0715] 31. J. Dabney, M. Meyer, Length and GC-biases during sequencing library amplification: a comparison of various polymerase-buffer systems with ancient and modern DNA sequencing libraries. Biotechniques 52, 87-94 (2012).
[0716] 32. R. Sugimura et al., Haematopoietic stem and progenitor cells from human pluripotent stem cells. Nature 545, 432-438 (2017).
[0717] 33. Y. Shi, P. Kirwan, F. J. Livesey, Directed differentiation of human pluripotent stem cells to cerebral cortex neurons and neural networks. Nat Protoc 7, 1836-1846 (2012).
[0718] 34. X. Lian et al., Directed cardiomyocyte differentiation from human pluripotent stem cells by modulating Wnt/beta-catenin signaling under fully defined conditions. Nat Protoc 8, 162-175 (2013).
[0719] 35. Y. Hayashi et al., BMP-SMAD-ID promotes reprogramming to pluripotency by inhibiting p16/INK4A-dependent senescence. Proc Natl Acad Sci USA 113, 13057-13062 (2016).
[0720] 36. W. Zhao et al., The polycomb group protein Yaf2 regulates the pluripotency of embryonic stem cells in a phosphorylation-dependent manner. J Biol Chem 293, 12793-12804 (2018).
[0721] 37. J. Jiang et al., A core Klf circuitry regulates self-renewal of embryonic stem cells. Nat Cell Biol 10, 353-360 (2008).
[0722] 38. J. M. Daley, P. Sung, 53BP1, BRCA1, and the choice between recombination and end joining at DNA double-strand breaks. Mol Cell Biol 34, 1380-1388 (2014).
[0723] 39. S. Ma et al., Chromatin Potential Identified by Shared Single-Cell Profiling of RNA and Chromatin. Cell 183, 1103-1116 e1120 (2020).
[0724] 40. S. T. Crews, J. C. Pearson, Transcriptional autoregulation in development. Curr Biol 19, R241-246 (2009).
[0725] 41. J. A. Saba, K. Liakath-Ali, R. Green, F. M. Watt, Translational control of stem cell function. Nat Rev Mol Cell Biol 22, 671-690 (2021).
[0726] 42. C. Mayer, I. Grummt, Ribosome biogenesis and cell growth: mTOR coordinates transcription by all three classes of nuclear RNA polymerases. Oncogene 25, 6384-6391 (2006).
[0727] 43. A. Gaspar-Maia, A. Alajem, E. Meshorer, M. Ramalho-Santos, Open chromatin in pluripotency and reprogramming. Nat Rev Mol Cell Biol 12, 36-47 (2011).
[0728] 44. C. Halluin et al., Habenular Neurogenesis in Zebrafish Is Regulated by a Hedgehog, Pax6 Proneural Gene Cascade. PLOS One 11, e0158210 (2016).
[0729] 45. M. Bouchard, P. Pfeffer, M. Busslinger, Functional equivalence of the transcription factors Pax2 and Pax5 in mouse development. Development 127, 3703-3713 (2000).
[0730] 46. N. Festuccia et al., Esrb is a direct Nanog target gene that can substitute for Nanog function in pluripotent cells. Cell Stem Cell 11, 477-490 (2012).
[0731] 47. B. B. McConnell, V. W. Yang, Mammalian Kruppel-like factors in health and diseases. Physiol Rev 90, 1337-1381 (2010).
[0732] 48. J. Cao et al., A human cell atlas of fetal gene expression. Science 370, (2020).
[0733] 49. Y. Ono, T. Nakatani, Y. Minaki, M. Kumai, The basic helix-loop-helix transcription factor Nato3 controls neurogenic activity in mesencephalic floor plate cells. Development 137, 1897-1906 (2010).
[0734] 50. Y. Li, H. Luo, T. Liu, E. Zacksenhaus, Y. Ben-David, The ets transcription factor Fli-1 in development, cancer and disease. Oncogene 34, 2022-2031 (2015).
[0735] 51. A. M. Ghaleb, B. B. McConnell, K. H. Kaestner, V. W. Yang, Altered intestinal epithelial homeostasis in mice with intestine-specific deletion of the Kruppel-like factor 4 gene. Dev Biol 349, 310-320 (2011).
[0736] 52. L. G. van der Flier, H. Clevers, Stem cells, self-renewal, and differentiation in the intestinal epithelium. Annu Rev Physiol 71, 241-260 (2009).
[0737] 53. J. G. Camp et al., Human cerebral organoids recapitulate gene expression programs of fetal neocortex development. Proc Natl Acad Sci USA 112, 15672-15677 (2015).
[0738] 54. M. B. Johnson et al., Single-cell analysis reveals transcriptional heterogeneity of neural progenitors in human cortex. Nat Neurosci 18, 637-646 (2015).
[0739] 55. E. Llorens-Bobadilla et al., Single-Cell Transcriptomics Reveals a Population of Dormant Neural Stem Cells that Become Activated upon Brain Injury. Cell Stem Cell 17, 329-340 (2015).
[0740] 56. A. A. Pollen et al., Molecular identity of human outer radial glia during cortical development. Cell 163, 55-67 (2015).
[0741] 57. J. Shin et al., Single-Cell RNA-Seq with Waterfall Reveals Molecular Cascades underlying Adult Neurogenesis. Cell Stem Cell 17, 360-372 (2015).
[0742] 58. E. R. Thomsen et al., Fixed single-cell transcriptomic characterization of human radial glial diversity. Nat Methods 13, 87-93 (2016).
[0743] 59. J. Q. Wu et al., Dynamic transcriptomes during neural differentiation of human embryonic stem cells revealed by short, long, and paired-end sequencing. Proc Natl Acad Sci USA 107, 5254-5259 (2010).
[0744] 60. Y. Zhang et al., Purification and Characterization of Progenitor and Mature Human Astrocytes Reveals Transcriptional and Functional Differences with Mouse. Neuron 89, 37-53 (2016).
[0745] 61. B. Y. Hu et al., Neural differentiation of human induced pluripotent stem cells follows developmental principles but with variable potency. Proc Natl Acad Sci USA 107, 4335-4340 (2010).
[0746] 62. C. P. Fulco et al., Activity-by-contact model of enhancer-promoter regulation from thousands of CRISPR perturbations. Nat Genet 51, 1664-1669 (2019).
[0747] 63. G. Steele-Perkins et al., The transcription factor gene Nfib is essential for both lung maturation and brain development. Mol Cell Biol 25, 685-698 (2005).
[0748] 64. G. D. Frantz, J. M. Weimann, M. E. Levin, S. K. McConnell, Otx1 and Otx2 define layers and regions in developing cerebral cortex and cerebellum. J Neurosci 14, 5725-5740 (1994).
[0749] 65. M. Gotz, A. Stoykova, P. Gruss, Pax6 controls radial glia differentiation in the cerebral cortex. Neuron 21, 1031-1044 (1998).
[0750] 66. C. Englund et al., Pax6, Tbr2, and Tbr1 are expressed sequentially by radial glia, intermediate progenitor cells, and postmitotic neurons in developing neocortex. J Neurosci 25, 247-251 (2005).
[0751] 67. A. Bulfone et al., Expression pattern of the Tbr2 (Eomesodermin) gene during mouse and chick brain development. Mech Dev 84, 133-138 (1999).
[0752] 68. S. Casarosa, C. Fode, F. Guillemot, Mash1 regulates neurogenesis in the ventral telencephalon. Development 126, 525-534 (1999).
[0753] 69. G. Quadrato et al., Cell diversity and network dynamics in photosensitive human brain organoids. Nature 545, 48-53 (2017).
[0754] 70. T. J. Nowakowski et al., Spatiotemporal gene expression trajectories reveal developmental hierarchies of the human cortex. Science 358, 1318-1323 (2017).
[0755] 71. P. Fuentealba et al., Expression of COUP-TFII nuclear receptor in restricted GABAergic neuronal populations in the adult rat hippocampus. J Neurosci 30, 1595-1609 (2010).
[0756] 72. G. Reinchisi, K. Ijichi, N. Glidden, I. Jakovcevski, N. Zecevic, COUP-TFII expressing interneurons in human fetal forebrain. Cereb Cortex 22, 2820-2830 (2012).
[0757] 73. C. Mayer et al., Developmental diversification of cortical inhibitory interneurons. Nature 555, 457-462 (2018).
[0758] 74. S. De Rubeis et al., Synaptic, transcriptional and chromatin genes disrupted in autism. Nature 515, 209-215 (2014).
[0759] 75. I. Iossifov et al., The contribution of de novo coding mutations to autism spectrum disorder. Nature 515, 216-221 (2014).
[0760] 76. D. J. Smith et al., Functional screening of 2 Mb of human chromosome 21q22.2 in transgenic mice implicates minibrain in learning defects associated with Down syndrome. Nat Genet 16, 28-36 (1997).
[0761] 77. V. Fotaki et al., Dyrk1A haploinsufficiency affects viability and causes developmental delay and abnormal brain morphology in mice. Mol Cell Biol 22, 6636-6647 (2002).
[0762] 78. X. Jin et al., In vivo Perturb-Seq reveals neuronal and glial abnormalities associated with autism risk genes. Science 370, (2020).
[0763] 79. B. Hammerle et al., Transient expression of Mnb/Dyrkla couples cell cycle exit and differentiation of neuronal precursors by inducing p27KIP1 expression and suppressing NOTCH signaling. Development 138, 2543-2554 (2011).
[0764] 80. J. Park et al., Dyrk1A phosphorylates p53 and inhibits proliferation of embryonic neuronal cells. J Biol Chem 285, 31895-31906 (2010).
[0765] 81. O. Yabut, J. Domogauer, G. D'Arcangelo, Dyrk1A overexpression inhibits proliferation and induces premature neuronal differentiation of neural progenitor cells. J Neurosci 30, 4004-4014 (2010).
[0766] 82. U. Soppa et al., The Down syndrome-related protein kinase DYRK1A phosphorylates p27(Kip1) and Cyclin D1 and induces cell cycle exit and neuronal differentiation. Cell Cycle 13, 2084-2100 (2014).
[0767] 83. M. A. Lalli, D. Avey, J. D. Dougherty, J. Milbrandt, R. D. Mitra, High-throughput single-cell functional elucidation of neurodevelopmental disease-associated genes reveals convergent mechanisms altering neuronal differentiation. Genome Res 30, 1317-1331 (2020).
[0768] 84. J. D. Buenrostro, P. G. Giresi, L. C. Zaba, H. Y. Chang, W. J. Greenleaf, Transposition of native chromatin for fast and sensitive epigenomic profiling of open chromatin, DNA-binding proteins and nucleosome position. Nat Methods 10, 1213-1218 (2013).
[0769] 85. Y. Hao et al., Integrated analysis of multimodal single-cell data. Cell 184, 3573-3587 e3529 (2021).
[0770] 86. C. Krendl et al., GATA2/3-TFAP2A/C transcription factor network couples human pluripotent stem cell differentiation to trophectoderm with repression of pluripotency. Proc Natl Acad Sci USA 114, E9579-E9588 (2017).
[0771] 87. E. Dejana, A. Taddei, A. M. Randi, Foxs and Ets in the transcriptional regulation of endothelial cell differentiation and angiogenesis. Biochim Biophys Acta 1775, 298-312 (2007).
[0772] 88. R. Neijts, S. Amin, C. van Rooijen, J. Deschamps, Cdx is crucial for the timing mechanism driving colinear Hox activation and defines a trunk segment in the Hox cluster topology. Dev Biol 422, 146-154 (2017).
[0773] 89. A. Dixit et al., Perturb-Seq: Dissecting Molecular Circuits with Scalable Single-Cell RNA Profiling of Pooled Genetic Screens. Cell 167, 1853-1866 e1817 (2016).
[0774] 90. A. P. Capaldi et al., Structure and function of a transcriptional network activated by the MAPK Hog1. Nat Genet 40, 1300-1306 (2008).
[0775] 91. S. Sekiya, A. Suzuki, Direct conversion of mouse fibroblasts to hepatocyte-like cells by defined factors. Nature 475, 390-393 (2011).
[0776] 92. I. Canals et al., Rapid and efficient induction of functional astrocytes from human pluripotent stem cells. Nat Methods 15, 693-696 (2018).
[0777] 93. N. Yang et al., Generation of pure GABAergic neurons by transcription factor programming. Nat Methods 14, 621-628 (2017).
[0778] 94. X. Zhao et al., Klf6/copeb is required for hepatic outgrowth in zebrafish and for hepatocyte specification in mouse ES cells. Dev Biol 344, 79-93 (2010).
[0779] 95. G. M. Birdsey et al., The endothelial transcription factor ERG promotes vascular stability and growth through Wnt/beta-catenin signaling. Dev Cell 32, 82-96 (2015).
[0780] 96. K. Song et al., Heart repair by reprogramming non-myocytes with cardiac transcription factors. Nature 485, 599-604 (2012).
[0781] 97. A. Ocampo et al., In Vivo Amelioration of Age-Associated Hallmarks by Partial Reprogramming. Cell 167, 1719-1733 e1712 (2016).
[0782] 98. J. E. Darnell, Jr., Transcription factors as targets for cancer therapy. Nat Rev Cancer 2, 740-749 (2002).

TABLE 16
Differentially expressed genes over pseudotime for TF Atlas. Linear regression was applied to identify genes
that were significantly differentially expressed (FDR < 0.05) over pseudotime. Genes were ranked by the
estimated slope of the linear regression fit. The top 1,000 most upregulated and downregulated genes are listed.

| | Diffusion | Diffusion | RNA Velocity | RNA Velocity | Monocle3 | Monocle3 |
|---|---|---|---|---|---|---|
| Rank | Upregulated | Downregulated | Upregulated | Downregulated | Upregulated | Downregulated |
| 1 | FBN2 | CD24 | GPC6 | PTMA | EXT1 | RPS8 |
| 2 | SLIT2 | LIN28A | IMMP2L | CD24 | PVT1 | CD24 |
| 3 | PRTG | RPS6 | EXT1 | RPS8 | PTPRK | RPL13 |
| 4 | TTN | RPL13A | SMYD3 | RPS6 | UBE2E2 | RPS6 |
| 5 | MAML2 | RPS12 | FAM155A | GAPDH | GPC6 | RPL13A |
| 6 | FN1 | SFRP1 | NLGN1 | RPL13A | KCNT2 | RPS12 |
| 7 | GPC6 | RPS8 | FBXL7 | RPLP1 | KHDRBS2 | GAPDH |
| 8 | LPP | GAPDH | UBE2E2 | EEF1A1 | PRKG1 | RPLP1 |
| 9 | CHODL | NPM1 | PRKG1 | HIST1H4C | BBS9 | RPL19 |
| 10 | EXT1 | PTMA | ST6GALNAC3 | RPL13 | GULP1 | RPS18 |
| 11 | CALD1 | EEF1A1 | SOX5 | NPM1 | TENM3 | EEF1A1 |
| 12 | NEAT1 | RPLP1 | ROBO2 | RPS18 | LSAMP | PTMA |
| 13 | FGF13 | POU5F1 | PTPRD | RPL11 | FNDC3B | RPL11 |
| 14 | SOX5 | RPL13 | LPP | RPS12 | PTPRD | RPL23 |
| 15 | PTPRM | RPS18 | DIAPH3 | LIN28A | CRIM1 | NPM1 |
| 16 | CDK14 | L1TD1 | KCNT2 | HSP90AB1 | ST6GALNAC3 | RPS27A |
| 17 | LSAMP | USP9X | WWOX | HSP90AA1 | TLE4 | RPL15 |
| 18 | MAML3 | HSP90AB1 | GRIP1 | ACTB | IMMP2L | RPL5 |
| 19 | FLRT2 | RPL11 | TENM3 | RPL19 | GPHN | RPL10A |
| 20 | TENM3 | RPL23 | KHDRBS2 | HMGA1 | TRIO | RPL3 |
| 21 | AHNAK | PODXL | SYT1 | RPL4 | KLF12 | RPS23 |
| 22 | SAMD4A | RPL3 | ZC3H12B | RPL31 | NRXN3 | TPT1 |
| 23 | RBMS3 | ESRG | DLG2 | RPL23 | SPATA5 | RPL4 |
| 24 | PALLD | RPL12 | FAT3 | RPL12 | NLGN4Y | RPL6 |
| 25 | CNTNAP2 | RPL19 | VPS13B | RPL3 | TCF4 | ACTG1 |
| 26 | PTPRD | TERF1 | LSAMP | RPL10A | PRIM2 | RPL8 |
| 27 | HAPLN1 | RPL10A | TRIO | RPS27A | KIAA1217 | RPL12 |
| 28 | NLGN1 | RPS27A | MAML2 | RPL34 | KAZN | RPL31 |
| 29 | LOC101927668 | RPSA | MBD5 | SET | FBXL7 | LIN28A |
| 30 | FNDC3B | HSPA8 | LINGO2 | HNRNPA1 | ADCY2 | HNRNPA1 |
| 31 | PDE4D | SET | PTPRK | HSPA8 | ADGRL3 | RPS3 |
| 32 | ST6GALNAC3 | HNRNPA1 | BCKDHB | RPL6 | CASC15 | HSP90AB1 |
| 33 | SSBP2 | DNMT3B | RORA | RPL15 | MBD5 | RPLPO |
| 34 | KIAA1217 | EEF2 | SPATA5 | HSPD1 | GRIP1 | RPSA |
| 35 | CCDC141 | HSPD1 | GPHN | RPS23 | COMMD10 | RACK1 |
| 36 | ADCY2 | RPLPO | NRXN3 | RPL5 | NLGN1 | RPL14 |
| 37 | ZSWIM6 | RPL5 | ARL15 | RPL8 | DIAPH3 | HSPA8 |
| 38 | TRIO | RPL15 | KAZN | RPL14 | RIMS2 | HSPD1 |
| 39 | CDH2 | RPL31 | CDK14 | RPL35A | FAF1 | RPL34 |
| 40 | 11-Sep | RPS2 | CTNNA2 | RPS24 | USP25 | RPS2 |
| 41 | P3H2 | HSP90AA1 | RAD51B | TPT1 | SMYD3 | RPL18 |
| 42 | APP | RPL34 | EFNA5 | NCL | FAM155A | HSP90AA1 |
| 43 | SMYD3 | RACK1 | FNDC3B | RPS14 | EFNA5 | RPS24 |
| 44 | AKT3 | RPL4 | SSBP2 | FTH1 | PHLPP1 | RPS14 |
| 45 | SHROOM3 | PARP1 | SPIDR | RPS19 | CACNA2D3 | RPS19 |
| 46 | VPS13B | RPL8 | FAF1 | RPL32 | TCF12 | FTL |
| 47 | GREB1L | HIST1H4C | COMMD10 | RPS3 | DLG2 | RPS3A |
| 48 | COL11A1 | HMGA1 | ADCY2 | RACK1 | KCND2 | RPS5 |
| 49 | ASAP1 | RPS23 | NRG3 | TMSB4X | B3GALT1 | RPL35A |
| 50 | COL5A2 | SERBP1 | CTNND2 | TUBB | TMTC2 | RPS15 |
| 51 | ROBO2 | RPS15 | KCND2 | RPL18 | ASAP1 | ACTB |
| 52 | TNS3 | RPS24 | EXOC4 | POU5F1 | SYT1 | RPL21 |
| 53 | DOCK4 | UGP2 | RIMS2 | EEF2 | MMP16 | RPL10 |
| 54 | NRIP1 | RPS5 | LOC100420587 | RPS15 | VPS13B | RPS15A |
| 55 | LOC100505817 | NASP | PRIM2 | RPLPO | GMDS | RPL30 |
| 56 | SPP1 | NCL | EGFEM1P | RPS15A | FMNL2 | RPS17 |
| 57 | CAMK2D | APELA | TBC1D5 | RPL7 | ARL15 | FTH1 |
| 58 | MAPK10 | RPS3 | TTC28 | RPL21 | TMEM132D | RPL7A |
| 59 | FBXL7 | RPS16 | CDKAL1 | RPL35 | RANBP17 | EEF2 |
| 60 | DIAPH3 | LDHB | PVT1 | ACTG1 | RFX3 | RPS7 |
| 61 | TMTC2 | RPS14 | NLGN4Y | RPL24 | KIAA0825 | TUBB |
| 62 | ARL15 | USP44 | FBN2 | LDHB | DOCK4 | POU5F1 |
| 63 | SYT1 | RPL21 | TTN | RPL30 | CTNND2 | RPL7 |
| 64 | TTC28 | RPS4X | SUPT3H | RPS16 | SLIT2 | RPS16 |
| 65 | MID1 | RPL35A | ASAP1 | RPSA | FOXP1 | LDHB |
| 66 | IL1RAPL1 | DPYSL3 | KLF12 | RPS7 | AUTS2 | RPS4X |
| 67 | TMTC1 | RPL18 | RANBP17 | RPL28 | FOCAD | RPS11 |
| 68 | MIR4435-2HG | RPS27 | MID1 | RPS2 | ZC3H12B | RPL28 |
| 69 | LOC644919 | RPL14 | TCF12 | RPS3A | PLXDC2 | SET |
| 70 | FER | RPS17 | PLXDC2 | PFN1 | TBC1D5 | SERBP1 |
| 71 | ADAMTS12 | SOX2 | TCF4 | FTL | LOC100420587 | RPL24 |
| 72 | PTPRG | RPS15A | GULP1 | RPS5 | PKIB | RPL32 |
| 73 | CDH11 | RPL28 | GALNT13 | RPS27 | UST | RPL27A |
| 74 | MBD5 | RPS3A | CASC15 | SERBP1 | RYR2 | TMSB4X |
| 75 | FAF1 | RPS11 | UGGT2 | RPS17 | CHD2 | RPS13 |
| 76 | PPP3CA | RPL30 | NBEA | RPL10 | OPCML | HMGA1 |
| 77 | TLE4 | TARS | RYR2 | RPL7A | FAT3 | NCL |
| 78 | TRPS1 | TPT1 | OPCML | PABPC1 | BCKDHB | PARP1 |
| 79 | TUSC3 | RPL6 | PARD3 | RPS11 | CDK14 | NUCKS1 |
| 80 | TTC3 | MFGE8 | TENM4 | RPL36 | TMEM132B | H2AFZ |
| 81 | CRIM1 | PABPC1 | ERC2 | RPS4X | LPP | EIF4G2 |
| 82 | SORBS2 | RPL7A | TMTC2 | H2AFZ | TUSC3 | RPL26 |
| 83 | KLF12 | TUBB | AKT3 | RPLP2 | RASAL2 | PABPC1 |
| 84 | CDK6 | RPS19 | TMEM132D | ENO1 | GALNT13 | RPLP2 |
| 85 | IMMP2L | PLS3 | FHIT | NUCKS1 | ROBO2 | RPS9 |
| 86 | FHIT | RPL27A | CEP128 | PARP1 | PTPRG | RPS27 |
| 87 | SPIDR | RPS7 | METTL15 | RPS13 | FAM13A | EEF1G |
| 88 | UBE2E2 | RPL10 | SLIT2 | RPL26 | PPP3CA | ENO1 |
| 89 | PRKG1 | DPPA4 | LOC644919 | RPL37 | MAML2 | TUBA1B |
| 90 | SERPINE2 | RPL7 | VTI1A | RPL27A | SETBP1 | RAN |
| 91 | DSP | RPL24 | SDK1 | L1TD1 | CDKAL1 | GSTP1 |
| 92 | ITGB1 | HNRNPA2B1 | ANK2 | SFRP1 | PARP8 | PFN1 |
| 93 | RBMS1 | RPS9 | LINC01572 | CANX | RFX7 | CANX |
| 94 | MED13L | NUCKS1 | ROBO1 | EIF4G2 | NRG3 | RPL9 |
| 95 | ANKRD1 | RPS13 | PPP3CA | HNRNPA2B1 | ANK2 | RPL29 |
| 96 | SVIL | PSIP1 | RFX3 | RAN | COG5 | MYL6 |
| 97 | COL2A1 | IPO5 | LRBA | RPS29 | LCORL | HNRNPA2B1 |
| 98 | ELMO1 | LECT1 | AGAP1 | ESRG | RERE | FAU |
| 99 | ATP2B1 | RPLP2 | DPP10 | UBB | PCNX2 | SFRP1 |
| 100 | ZEB2 | RPS20 | PTPRG | NACA | PARD3 | RPL35 |
| 101 | LAMB1 | RPL32 | TUSC3 | CALM1 | TEAD1 | H3F3B |
| 102 | APBB2 | RPL18A | GMDS | GSTP1 | LOC644919 | RPL18A |
| 103 | SETBP1 | COX3 | PKIB | RPS9 | ZMAT4 | NACA |
| 104 | DMD | CLDN6 | UST | RPL29 | UGGT2 | CBX5 |
| 105 | ZC3H12B | H2AFZ | MED13L | CBX5 | AGAP1 | CALM1 |
| 106 | RN7SK | RPL37A | ADAMTS19 | RPL37A | DENND1A | RPS20 |
| 107 | TCF12 | ACTB | MAGI2 | EEF1G | LINGO2 | UBB |
| 108 | PARP8 | PGRMC1 | EXOC6B | RPS20 | ZFAND3 | RPL37A |
| 109 | DACH1 | COX7C | AUTS2 | NASP | LDLRAD3 | SCD |
| 110 | CADM1 | FAU | PLCB4 | FAU | METTL15 | HSPA5 |
| 111 | TBC1D5 | CBX5 | FOCAD | HIST1H1B | SUPT3H | RPL36 |
| 112 | FBXL17 | HSPA4 | LOC101929378 | ND5 | PSD3 | PRDX1 |
| 113 | PTPRK | CEBPZ | BBS9 | H3F3B | NEDD4L | YWHAZ |
| 114 | EPB41L2 | CANX | ARID1B | SCD | LARGE | ESRG |
| 115 | SEMA6A | RPL9 | PLEKHA5 | COX3 | MAGI1 | YWHAE |
| 116 | FTO | EEF1G | PARD3B | RPL18A | TOX | HIST1H4C |
| 117 | EFNA5 | RPL29 | MIPOL1 | PRDX1 | PCSK5 | ATP5B |
| 118 | FIGN | RPL35 | TRPM3 | COX1 | ADGRV1 | MDH1 |
| 119 | SIPA1L2 | RAN | PTK2 | YWHAE | NSMCE2 | GJA1 |
| 120 | GLI3 | USO1 | ANKS1B | TUBA1B | MED13L | CALM2 |
| 121 | KIF26B | RPL26 | SETBP1 | MYL6 | PPM1L | RPL37 |
| 122 | UGGT2 | LITAF | LDB2 | YBX1 | UNC5D | ATP5A1 |
| 123 | RHOBTB3 | RPL36 | TBCK | RPL9 | SDK1 | L1TD1 |
| 124 | NTS | ATP6 | RASAL2 | ATP5B | LOC102467213 | HNRNPA3 |
| 125 | CBLB | SLC16A1 | DOCK4 | SOX2 | SOX5 | PPIA |
| 126 | GTDC1 | HNRNPU | ZFAND3 | HSPA5 | ERC2 | HSPA4 |
| 127 | ROR2 | RPL37 | CACNA2D1 | HSP90B1 | HS2ST1 | TARS |
| 128 | TANC1 | CALM1 | ASCC3 | HMGB1 | RBPMS | TOP2A |
| 129 | KAZN | RPS29 | KIAA1217 | GJA1 | DLGAP1 | HSP90B1 |
| 130 | GPHN | H3F3B | MIR924HG | PODXL | PLEKHA5 | NASP |
| 131 | TAGLN | ATP5B | CRIM1 | TPI1 | IGF1R | RPS29 |
| 132 | ZFAND3 | FTL | PSD3 | CALM2 | PCCA | TPI1 |
| 133 | PTK2 | MDH1 | MACROD2 | RPL38 | FRMD4A | CCT3 |
| 134 | COMMD10 | ACTG1 | ATRNL1 | CYTB | ANKS1B | SSB |
| 135 | NRXN3 | AASS | FBXL17 | TPM3 | UTY | HNRNPK |
| 136 | FAM13A | G3BP2 | FER | SSB | FBXW7 | PGRMC1 |
| 137 | ITGAV | NACA | CADM2 | HNRNPK | MID1 | UBA52 |
| 138 | MAGI3 | TRIM71 | ADGRL3 | ATP6 | TTC28 | HMGB1 |
| 139 | PLCB1 | EPCAM | DLGAP1 | PGRMC1 | PTK2 | RPS28 |
| 140 | TEAD1 | ND5 | RSRC1 | TARS | TTN | EEF1B2 |
| 141 | TBCK | ND4L | RFWD2 | ATP5A1 | LOC101929378 | HMGB2 |
| 142 | METTL15 | CCT3 | IGF1R | COX7C | ROBO1 | KPNA2 |
| 143 | FRYL | SSB | ADGRV1 | HMGB2 | RAPGEF2 | RPL27 |
| 144 | ASCC3 | AP1S2 | RFX7 | ND4 | LRRC4C | YWHAB |
| 145 | ZNF804A | TDGF1 | CNTN4 | PPIA | RORA | IPO5 |
| 146 | PLXNA2 | CYTB | LDLRAD3 | ND2 | ZSWIM6 | YBX1 |
| 147 | LTBP1 | LRRN1 | FTO | ATP8 | RAB28 | CALR |
| 148 | IGF2BP2 | ITGA6 | DOCK3 | YWHAZ | TENM4 | PTGES3 |
| 149 | EXOC4 | TPI1 | NRXN1 | EEF1B2 | ADAMTS19 | CCT6A |
| 150 | ANK2 | ATP5A1 | FARS2 | HSPA4 | MEF2A | TPM3 |
| 151 | ANXA2 | RPS21 | KLF8 | COX2 | EXOC4 | PSMA4 |
| 152 | PICALM | TUBA1B | LCORL | CCT3 | TCF7L2 | PDIA3 |
| 153 | LRP1B | GJA1 | FMNL2 | CALR | SIK3 | SRSF3 |
| 154 | AGAP1 | PAICS | PAM | HNRNPU | LINC01572 | CCT5 |
| 155 | SPATS2L | PPIA | MGAT5 | ND6 | TASP1 | CFL1 |
| 156 | RAPGEF2 | SRSF3 | PCCA | DPPA4 | RPS6KA2 | SMARCA5 |
| 157 | INPP4B | RPS28 | MAGI1 | YWHAB | TBC1D22A | PLS3 |
| 158 | ERBB4 | PRDX1 | STK3 | HIST1H1D | PTPRT | XRCC6 |
| 159 | NEK7 | ND2 | CHODL | RPL27 | NEAT1 | TMSB10 |
| 160 | PCAT14 | SUPT16H | ARHGAP42 | ND1 | CAMKMT | PSMA7 |
| 161 | AUTS2 | ND6 | COG5 | CFL1 | FARS2 | ND6 |
| 162 | SGCD | TOP2A | KIAA0825 | PDIA3 | MPPED2 | PAICS |
| 163 | PARD3 | ENO1 | ADK | TOP2A | ASCC3 | HNRNPU |
| 164 | LOC105377862 | G3BP1 | ULK4 | XRCC6 | STK3 | SOX2 |
| 165 | PKIB | SMARCA5 | CERS6 | RPS21 | UBE3D | CEBPZ |
| 166 | FAM155A | HIST1H1D | CAMKMT | RPS28 | MAPK10 | CSDE1 |
| 167 | PKNOX2 | MATR3 | PARP8 | ND4L | NRXN1 | DYNLL1 |
| 168 | COL4A2 | PTGES3 | LARGE | PTGES3 | GRID2 | DDX5 |
| 169 | SERINC5 | COX1 | PRTG | PAICS | CTNNA2 | COX7C |
| 170 | MEF2A | HIST1H1B | PLCB1 | HNRNPA3 | ATRNL1 | TCP1 |
| 171 | DIP2C | GSTP1 | GRID2 | TMSB10 | CDK8 | PEBP1 |
| 172 | RFWD2 | CLU | TMEM132B | IPO5 | PSPC1 | HMGB3 |
| 173 | ROBO1 | PWARSN | TRPS1 | UBA52 | MGAT5 | UCHL1 |
| 174 | LOC102467213 | HMGB1 | HS3ST4 | USP9X | FRAS1 | NORAD |
| 175 | CDKAL1 | ND1 | SBF2 | CEBPZ | ARID1B | DPPA4 |
| 176 | PRIM2 | EEF1B2 | ADAMTS12 | MDH1 | ARHGAP26 | CCT8 |
| 177 | BMPR2 | YBX1 | MAML3 | CCT6A | TMTC1 | RPS21 |
| 178 | ITPR2 | PFN1 | TLE4 | CCT5 | WWOX | RPL38 |
| 179 | GSK3B | DEK | UBE3D | SRSF3 | TRPS1 | CLDN6 |
| 180 | SCAPER | UCHL1 | FIGN | SUPT16H | JAZF1 | SUPT16H |
| 181 | SUPT3H | PDIA3 | PCNX2 | EPCAM | CADM2 | CHD4 |
| 182 | SPATA5 | FGFR1 | PKP4 | CLDN6 | NLK | BEX3 |
| 183 | LHFP | COX2 | NSMCE2 | DNMT3B | AKT3 | BTF3 |
| 184 | CASK | HNRNPK | DTNA | HMGB3 | SPIDR | CENPF |
| 185 | UTRN | HNRNPA3 | CACNA2D3 | DYNLL1 | ADGRA3 | SUMO2 |
| 186 | STK3 | ND4 | GNAQ | UCHL1 | CEP128 | EPCAM |
| 187 | TMEM135 | RPL38 | FOXP1 | PLS3 | COBL | MDK |
| 188 | MALAT1 | RPL27 | B3GALT1 | SLC16A1 | LMCD1-AS1 | DEK |
| 189 | KLF8 | ATP8 | UTY | BEX3 | CHODL | TDGF1 |
| 190 | GNAQ | MCM4 | LRRC4C | DEK | NBEA | MATR3 |
| 191 | ST6GALNAC5 | XRCC6 | TMEM135 | MFGE8 | EPC2 | G3BP1 |
| 192 | RORA | TMSB4X | STK33 | KPNA2 | PAN3 | ATP8 |
| 193 | DNAH14 | EIF4B | DNAH14 | SMARCA5 | ERBIN | LECT1 |
| 194 | BBS9 | KPNA2 | PCDH7 | UGP2 | FRYL | RSL1D1 |
| 195 | LCORL | FTH1 | AKAP13 | DDX5 | LINC01021 | KPNB1 |
| 196 | WWOX | PPP1CC | ARHGAP32 | CHD4 | LRBA | TKT |
| 197 | RNF217 | CALM2 | PPM1L | TDGF1 | CERS6 | CLTC |
| 198 | PTPN14 | YWHAE | COL4A5 | MCM4 | KANSL1 | RHOA |
| 199 | RSRC1 | CCT6A | MMP16 | STMN1 | DIAPH2 | COX3 |
| 200 | ANO6 | CDH1 | FRYL | NONO | MAML3 | ND2 |
| 201 | LOC339862 | UBB | RBMS1 | HNRNPM | PAM | ND4L |
| 202 | ITFG1 | HSPA5 | ZSWIM6 | BTF3 | EGFEM1P | UGP2 |
| 203 | NBAS | MSH6 | EDA | SRP14 | FBN2 | NDUFS5 |
| 204 | TENM4 | AKIRIN1 | DAB1 | TKT | AKAP13 | HSPA9 |
| 205 | LOC728755 | PEBP1 | MEF2A | NDUFS5 | ADK | PSIP1 |
| 206 | INVS | YWHAB | ASTN2 | PEBP1 | GNAQ | CBX3 |
| 207 | VTI1A | TMX1 | TEAD1 | PSIP1 | PDE4D | NONO |
| 208 | WLS | CALR | DPH6 | CSDE1 | FBXL17 | UBC |
| 209 | CEP128 | SEPHS1 | ITFG1 | CBX3 | MNAT1 | ND5 |
| 210 | AKAP13 | EIF3A | RAPGEF2 | CLU | CCNY | CCT2 |
| 211 | CERS6 | RCC2 | ELP4 | G3BP1 | MAGI2 | PODXL |
| 212 | FARS2 | LARP7 | CBLB | HSPA9 | PKP4 | HSPH1 |
| 213 | SH3RF1 | TPM3 | SLC25A21 | SUMO2 | SSBP2 | PDIA6 |
| 214 | GRIP1 | HSPA9 | PHLPP1 | MATR3 | CACNA2D1 | CCT4 |
| 215 | AFAP1 | XRCC5 | RBFOX1 | EIF5A | ZNF827 | ARL6IP1 |
| 216 | FOCAD | QSER1 | RAB28 | MORF4L1 | INTS6 | USP9X |
| 217 | ALCAM | KCNG3 | PHACTR1 | HMGN1 | TRPM3 | FKBP3 |
| 218 | FAT3 | SUMO2 | TASP1 | TERF1 | LDB2 | MFGE8 |
| 219 | SEMA3A | UBA52 | KDM4C | PSMA4 | TMEM108 | VCP |
| 220 | NSMCE2 | NONO | PDE4D | RPS26 | FGF13 | CNBP |
| 221 | CAP2 | HMGB2 | HS2ST1 | CCT4 | RALGAPA2 | MORF4L1 |
| 222 | RAD51B | ADAR | RBPMS | RSL1D1 | HS3ST4 | CYP51A1 |
| 223 | BCKDHB | HMGB3 | GTDC1 | USP44 | SLC25A21 | SLC16A1 |
| 224 | TULP4 | HELLS | TTC17 | TCP1 | FRMD5 | SRP14 |
| 225 | DPH6 | HSP90B1 | APP | PDIA6 | NHSL1 | PKM |
| 226 | FMNL2 | KPNB1 | NBAS | PSMA7 | TDRP | COX411 |
| 227 | ARHGAP10 | TKT | TBC1D22A | EIF4B | ZCCHC7 | EIF4B |
| 228 | TENM2 | NAP1L1 | FGF13 | KPNB1 | PTBP2 | CYTB |
| 229 | LOC101929378 | SALL2 | PTPRM | MDK | TRMT11 | SF3B1 |
| 230 | PCDH11Y | PWAR5 | SEMA3A | CCT2 | RFWD2 | COX1 |
| 231 | HMCN1 | CCT5 | TOX | IDH1 | TTC17 | HNRNPM |
| 232 | ZNF407 | SCD | FRAS1 | PKM | ELAVL2 | C11orf58 |
| 233 | ATRNL1 | C21orf59 | DENND1A | UBC | DIP2C | NAP1L1 |
| 234 | PDE10A | BPTF | SEMA6A | NORAD | XYLT1 | DNMT3B |
| 235 | TIAM1 | NDUFS5 | LOC107986770 | LRRN1 | SLC2A13 | USP44 |
| 236 | HS6ST2 | CSE1L | JAZF1 | ANP32E | CMIP | XRCC5 |
| 237 | SDC2 | CNBP | LOC107985675 | NOLC1 | ULK4 | IGF2BP1 |
| 238 | ANXA1 | SNHG5 | TMTC1 | MSH6 | UBE2E1 | ND1 |
| 239 | KALRN | SYN3 | ANK3 | RPS25 | SBF2 | PA2G4 |
| 240 | ARHGAP28 | MYL6 | PPARGC1A | HIST1H1E | TLAM1 | EIF3A |
| 241 | ZNF423 | CCT4 | RPS6KA2 | CNBP | RFC3 | ATP6 |
| 242 | LDLRAD3 | IDO1 | SGMS1 | IGF2BP1 | LOC107986777 | C14orf166 |
| 243 | PSD3 | RTN3 | LOC339862 | VCP | LOC105377134 | AZIN1 |
| 244 | RFX3 | ZNF770 | DIAPH2 | NAP1L1 | CDH4 | CCNG1 |
| 245 | NT5C2 | TRIM28 | CCDC91 | SLIRP | SEMA3A | STMN1 |
| 246 | WDFY3 | POLR3G | MNAT1 | ARL6IP1 | CNTN4 | NARS |
| 247 | FRMD4A | RPS26 | VWA8 | DHCR24 | DAPK1 | HMGCS1 |
| 248 | CDH13 | EIF4G2 | UNC5D | UQCRH | SEMA5A | RAD21 |
| 249 | PARD3B | CLIC4 | LOC100288637 | PA2G4 | ARHGAP32 | PARK7 |
| 250 | ARHGAP42 | SALL4 | EDIL3 | LECT1 | SPRED1 | ANP32E |
| 251 | COL4A5 | RSL1D1 | PTBP2 | HIST1H1C | RSRC1 | SKP1 |
| 252 | PIBF1 | CHD4 | USP25 | G3BP2 | PARD3B | NOLC1 |
| 253 | PAM | ANP32E | RNGTT | EIF3A | PRDM5 | COX2 |
| 254 | LOC105377901 | CENPF | PRKD1 | FKBP3 | ADAMTS12 | HNRNPDL |
| 255 | EXOC6B | PRR14L | MMS22L | LITAF | RGS7 | IDH1 |
| 256 | ZNF521 | DDX5 | FAM13A | RPL22 | PTPRM | PPP1CC |
| 257 | TMCC1 | YWHAZ | APBB2 | PARK7 | UTRN | MCM4 |
| 258 | ALPK2 | ZFP42 | DOCK1 | CLTC | BMPR1A | IQGAP1 |
| 259 | VWA8 | SPTBN1 | BCAS3 | AKIRIN1 | DYRK1A | STIP1 |
| 260 | RAB28 | NOLC1 | EHBP1 | CCT8 | WWC2 | ADH5 |
| 261 | CCSER2 | FKBP3 | WDR70 | DPYSL3 | KCTD8 | SPTBN1 |
| 262 | DANT2 | SRRM2 | LOC105377862 | CENPF | KLF8 | LITAF |
| 263 | RFX7 | PSMA4 | PTCHD1-AS | CYCS | MAPK8 | CBX1 |
| 264 | DDAH1 | PTPRZ1 | NCOA2 | SF3B1 | KCNQ1OT1 | MKI67 |
| 265 | ADAMTS6 | CCT2 | NTM | DBI | SGMS1 | DPYSL3 |
| 266 | NFAT5 | CKB | TLAM1 | C11orf58 | TMEM135 | RPS25 |
| 267 | COG5 | RIF1 | ADGRL2 | AZIN1 | APBB2 | RPL22 |
| 268 | KIRREL | UQCRH | TMEM108 | PPP1CC | TNS3 | YWHAQ |
| 269 | TASP1 | IGF2BP1 | MAPK8 | RHOA | UBE2E3 | EID1 |
| 270 | SPAG16 | CCNG1 | CLASP1 | XRCC5 | CHST9 | NDUFA4 |
| 271 | MYOF | RPS25 | RBMS3 | RCC2 | MACROD2 | G3BP2 |
| 272 | NLGN4Y | SF3B1 | TBL1XR1 | HSPH1 | FGF12 | RPS26 |
| 273 | LRFN5 | ILF3 | UTRN | HNRNPAB | CBLB | EPRS |
| 274 | CDC42BPA | ND3 | MAPK10 | OAZ1 | SH3RF1 | DLGAP5 |
| 275 | LINC01572 | HSPH1 | CCNY | SKP1 | PRKD1 | SSRP1 |
| 276 | COL4A1 | NORAD | TRAPPC9 | HNRNPDL | TBCK | PRDX6 |
| 277 | ABHD12B | HNRNPM | WDFY3 | EID1 | KDM4C | TERF1 |
| 278 | WDR70 | EPRS | NKAIN3 | ADAR | NCOA2 | CSE1L |
| 279 | STXBP5 | BEX3 | FBXW7 | APELA | NFIB | TPM4 |
| 280 | UST | AZIN1 | DANT2 | ALDOA | FOXN3 | UQCRH |
| 281 | CLASP1 | SSRP1 | WDR27 | COX411 | AGPAT4 | SRSF1 |
| 282 | HS6ST3 | MCM3 | MCC | SRRM2 | FER | MSH6 |
| 283 | SLC4A7 | TMEM167A | LTBP1 | DNAJA1 | EDA | CYCS |
| 284 | KCNT2 | BUB1 | BBX | MKI67 | CLASP1 | CLU |
| 285 | SFMBT2 | MORF4L1 | RFC3 | DDX6 | FANCL | ALDOA |
| 286 | LIMS1 | SRSF1 | NEDD4L | UQCRB | FAM160A1 | DDX21 |
| 287 | PTCHD1-AS | DDX21 | FARP1 | RAD21 | RMST | ATP50 |
| 288 | RANBP17 | RPL22 | ARHGAP26 | BSG | RAD51B | GNAS |
| 289 | SOX6 | ZFAND5 | PTPRT | SPTBN1 | KCNH8 | ZNF770 |
| 290 | FARP1 | LARS | ADGRA3 | YWHAQ | MIPOL1 | EIF5 |
| 291 | ERBIN | MED14 | MAGI3 | SNHG5 | PKN2 | LRRN1 |
| 292 | ROCK2 | RAD21 | LRRTM4 | NARS | XKR6 | CD63 |
| 293 | SRPK2 | ATP5H | GSK3B | CSE1L | PHACTR1 | RPL23A |
| 294 | TCF4 | MLEC | RGS7 | SON | GLCCI1 | GDI2 |
| 295 | IGF1R | HNRNPDL | DIP2C | RPL23A | DANT2 | CCNB1 |
| 296 | ZNF704 | SNTG2 | GLI3 | IQGAP1 | CADM1 | HDAC2 |
| 297 | LINC00458 | IDH1 | ZNF423 | DDX21 | ZNF423 | CLIC4 |
| 298 | PPFIBP1 | TRIM24 | PTPRN2 | HMGCS1 | ATXN7L1 | PTBP1 |
| 299 | MCC | CSDE1 | RALGAPA2 | TMBIM6 | STAG1 | OAZ1 |
| 300 | CHST9 | BTF3 | ST6GALNAC5 | NDUFA4 | PTEN | ADAR |
| 301 | PRKD1 | ARL6IP1 | SND1 | EPRS | SEMA6A | DDX6 |
| 302 | CNTN4 | PA2G4 | FTX | STIP1 | ETV6 | ACTR2 |
| 303 | PRICKLE2 | SMC3 | FRMD4A | ILF3 | MARK1 | EIF5A |
| 304 | CCNY | RPL23A | RERE | SSRP1 | EXOC6B | ZFP42 |
| 305 | DST | DDX6 | AIG1 | CBX1 | APP | DBI |
| 306 | AFF3 | PRDM14 | SCLT1 | CLIC4 | RNGTT | TOMM20 |
| 307 | NEBL | CCT8 | FANCL | HIST2H2AC | DPP6 | DNAJA1 |
| 308 | MNAT1 | CXADR | ZNF521 | SRSF1 | SLC4A7 | TMBIM6 |
| 309 | CTDSPL | HNRNPH3 | C15orf41 | ATP5H | DNAH14 | EIF5B |
| 310 | SYNE1 | HNRNPD | ATP9B | C14orf166 | PRICKLE2 | HMGN1 |
| 311 | PDE3B | TCP1 | NHSL1 | APEX1 | MED12L | C21orf59 |
| 312 | AMOTL1 | DYNLL1 | PAN3 | ITGA6 | SND1 | HNRNPH3 |
| 313 | KDM4C | HIST1H1E | TBC1D32 | HMGN2 | RBMS1 | BSG |
| 314 | NF1 | GDI2 | ALCAM | LARP7 | LRRTM4 | APELA |
| 315 | RIC1 | TARDBP | PALLD | ATP50 | PLCB1 | MRFAP1 |
| 316 | CEP112 | HNRNPAB | MED12L | SNRPD2 | TRAPPC9 | RCC2 |
| 317 | DOCK1 | MTHFD2 | PKN2 | MARCKSL1 | AIG1 | EDF1 |
| 318 | LRCH1 | XPO1 | PPP1R9A | FBL | C15orf41 | SRRM2 |
| 319 | RNGTT | TOMM20 | CDH4 | TRIM28 | MIR924HG | HIST1H1B |
| 320 | HSD17B12 | NUDT21 | STAG1 | EIF5B | FYN | ACLY |
| 321 | MIPOL1 | PRKDC | PCSK5 | PTBP1 | ATP9B | SLC25A3 |
| 322 | ATXN1 | DLGAP5 | PLD5 | HNRNPH3 | GTDC1 | ST13 |
| 323 | MB21D2 | OTX2 | BMPR1A | CD63 | DMTF1 | ILF3 |
| 324 | HPGD | IQGAP1 | SRPK2 | HIST1H2AM | LARP4B | EIF4G1 |
| 325 | TANC2 | CBX3 | ZNF407 | CYP51A1 | KDM6A | HINT1 |
| 326 | SCLT1 | PSMA7 | ERBIN | CCNG1 | BACH2 | ND4 |
| 327 | FOXO3 | HDAC2 | R3HDM1 | ZNF770 | UBAC2 | DHCR24 |
| 328 | LOC102724419 | COX411 | SHISA9 | ZFP42 | PLCB4 | FLNA |
| 329 | MACROD2 | YWHAG | ITPR2 | ND3 | DLG1 | SNRNP200 |
| 330 | PDLIM5 | VCAN | LMCD1-AS1 | ANP32A | RBM47 | RPL36AL |
| 331 | UBE2E3 | NDUFA4 | LOC105377134 | TARDBP | MAP2K4 | DDX3X |
| 332 | UNC5C | FAM60A | LOC102467213 | YWHAG | STK33 | TMX1 |
| 333 | LRRC4C | NARS | HS6ST3 | EIF5 | BBX | PRRC2C |
| 334 | MAPK8 | C14orf166 | TNS3 | AP2M1 | FARP1 | IGF2R |
| 335 | CUX1 | BSG | XKR6 | PSAP | ADGRL2 | APEX1 |
| 336 | EGFEM1P | OAZ1 | DLG1 | SLC25A3 | ITFG1 | PDIA4 |
| 337 | LOC105377134 | SLC25A3 | DPP6 | SERF2 | SPATS2L | SF3B2 |
| 338 | CHST11 | IMPDH2 | GPC3 | CCNB1 | ZNRF3 | ANP32A |
| 339 | PDZD2 | SYNCRIP | PIBF1 | C21orf59 | THSD4 | TRIM28 |
| 340 | MBNL1 | VCP | SAMD4A | ACLY | EHBP1 | UQCRB |
| 341 | TBC1D32 | PTBP1 | NEAT1 | EIF1 | HS6ST3 | PSMA2 |
| 342 | BCAS3 | CYCS | CDC42BPA | MRFAP1 | WDFY3 | PSAP |
| 343 | SPRED1 | CLTC | PRICKLE2 | RPL36AL | LOC101927668 | FAM136A |
| 344 | LOC100420587 | PARK7 | DST | GDI2 | C9orf3 | CCT7 |
| 345 | PKN2 | MARCKSL1 | CHST9 | MLEC | PTPRN2 | EIF1 |
| 346 | FBXW7 | PMAIP1 | UBE2E3 | HDAC2 | ELMO1 | SMC3 |
| 347 | IL17RD | EIF4A2 | ATXN7L1 | DDX3X | CHST11 | TMED2 |
| 348 | RAP1GDS1 | STIP1 | FAAH2 | EDF1 | LRRC8D | TAF7 |
| 349 | DCC | DUT | ELMO1 | COX5B | ATG10 | TPR |
| 350 | ADGRL2 | C1orf21 | PHF14 | EIF4G1 | MCC | MORF4L2 |
| 351 | LAMA2 | FAM136A | CLASP2 | APOE | DTNA | DDX18 |
| 352 | MACF1 | MCM6 | KCNQ1OT1 | TPM4 | MSI2 | FBL |
| 353 | LOC107986770 | ZNF217 | SIPA1L1 | TOMM20 | GSK3B | EIF4A2 |
| 354 | SCFD2 | CENPU | GREB1L | SEPHS1 | FTO | ATP5H |
| 355 | SNX9 | NOL11 | MAP4K3 | ATPIF1 | R3HDM1 | AKIRIN1 |
| 356 | ZNF827 | EID1 | KCTD8 | PRDX6 | CDYL | DSTN |
| 357 | EDIL3 | THRAP3 | WDPCP | ADH5 | FTX | HNRNPD |
| 358 | UTY | PPM1G | ZNF827 | GNAS | UVRAG | THRAP3 |
| 359 | LOC100288637 | NIPSNAP1 | STXBP5 | HIST1H3B | LOC100133091 | GLO1 |
| 360 | DOK6 | C11orf58 | TRMT11 | TMED2 | VTI1A | SON |
| 361 | SBF2 | IGF2BP3 | ZRANB3 | ILF2 | PRTG | TXN |
| 362 | PARVA | EIF5A | CADPS | ST13 | GLI3 | BZW1 |
| 363 | ZNF385D | APEX1 | MARK1 | CKB | INVS | AP2M1 |
| 364 | DLG1 | FKBP4 | TMCC1 | SF3B2 | ARHGAP42 | CNN3 |
| 365 | GRIK2 | DNAJA1 | MARCH1 | MORF4L2 | FIRRE | IMPDH2 |
| 366 | MAN1A2 | FBL | MLLT10 | CDH1 | MEMO1 | HN1L |
| 367 | ZEB1 | PDPN | TCF7L2 | IMPDH2 | PLD5 | RANBP2 |
| 368 | C15orf41 | ALDOA | STXBP5L | NFE2L1 | MMS22L | USO1 |
| 369 | HDAC8 | SNRPD2 | ASIC2 | ATF4 | ANAPC10 | SYNCRIP |
| 370 | TMEFF2 | PDIA6 | AGPAT4 | THRAP3 | HDAC9 | HNRNPR |
| 371 | CTNNA3 | NUFIP2 | C9orf3 | FLNA | NEK7 | ILF2 |
| 372 | BMPER | FUS | DDX10 | TMEM167A | LOC100288637 | TARDBP |
| 373 | MGAT5 | APOE | CDH2 | PRRC2C | RAPGEF6 | TPX2 |
| 374 | PCSK5 | PRRC2C | PRDM5 | HNRNPD | DPP10 | ZNF217 |
| 375 | TMEM232 | EIF2S3 | LOC729732 | USO1 | FAM135A | YWHAG |
| 376 | MLLT3 | ACVR2B | ZCCHC7 | SMC3 | SHISA9 | CACYBP |
| 377 | TBL1XR1 | SRP14 | CUX1 | FAM136A | VPS54 | PCBP1 |
| 378 | KLF7 | EIF5 | EPC2 | HINT1 | TBL1XR1 | PRKDC |
| 379 | RPS6KA2 | ATP50 | MSI2 | NUDT21 | ASTN2 | HNRNPH1 |
| 380 | LRRTM4 | DDX3Y | OSBPL10 | ZNF217 | WDR27 | PRPF8 |
| 381 | SLIT3 | MRFAP1 | WWC2 | ZFAND5 | TLE1 | SLIRP |
| 382 | RFC3 | RHOA | CHST11 | SALLA | MYO1D | DBN1 |
| 383 | HS3ST3A1 | SLIRP | SHROOM3 | MCM3 | FOXJ3 | STRAP |
| 384 | TBC1D22A | CCNB1 | CADM1 | CACYBP | CADPS | CKB |
| 385 | ATP9B | UQCRB | CMIP | NDUFA13 | NKAIN3 | CAPRIN1 |
| 386 | SPATA6 | SERF2 | ZBTB20 | HN1L | EDIL3 | PSMA3 |
| 387 | OSBPL8 | TUG1 | CSMD2 | EIF4A2 | LOC101929194 | SNRPD2 |
| 388 | ARHGAP32 | NAA50 | RMST | PSMA2 | STXBP5 | ITGA6 |
| 389 | KMT2C | YWHAQ | MPPED2 | KHSRP | ASIC2 | SERF2 |
| 390 | GLS | CTSC | BAZ2B | ATP5G3 | VWA8 | COX5B |
| 391 | ZNF608 | ADH5 | BICD1 | RPL41 | LOC105378031 | FADS1 |
| 392 | LOC107985962 | SF3B2 | ZMAT4 | PCBP1 | CACHD1 | CCND1 |
| 393 | PTCHD4 | SNRNP200 | HCN1 | CCT7 | MB21D2 | CTNNB1 |
| 394 | LOC102724210 | DHCR24 | DAPK1 | ACTR2 | PRR16 | RBMX |
| 395 | ZNF516 | EIF5B | CASK | DDX18 | ZNF385D | MLEC |
| 396 | FYN | NFYB | ZC4H2 | PPM1G | FBXO11 | TMEM167A |
| 397 | DOCK7 | SON | DYRK1A | PSMD2 | ST6GALNAC5 | FUS |
| 398 | GLIS3 | PCNA | MGAT4C | SNRNP200 | OSBPL10 | HDLBP |
| 399 | COPG2 | RPL36AL | JMJD1C | PDIA4 | E2F3 | EIF3L |
| 400 | ASTN2 | RAB13 | LOC100133091 | TMX1 | PDSS2 | METAP2 |
| 401 | DLC1 | MGEA5 | INVS | DSTN | ADGRB3 | SEPHS1 |
| 402 | PLEKHA5 | ZNF483 | CADPS2 | SNRPD3 | LINC01619 | LARS |
| 403 | COL1A2 | LRRC75A-AS1 | MTHFD1L | PRMT1 | KCNQ3 | SKIL |
| 404 | YAP1 | FLT1 | SCAPER | SKIL | RBM33 | DDX17 |
| 405 | LRIG3 | ZIC3 | PRKCA | DBN1 | WDR70 | TOP2B |
| 406 | PCNX4 | SLC6A8 | CDK8 | GLO1 | UBE3C | HNRNPAB |
| 407 | NEDD9 | ATF4 | UBAC2 | FKBP4 | HDAC4 | MAPRE1 |
| 408 | ZNF385B | HIST1H3D | SH3RF1 | RBMX | MAST4 | SRP72 |
| 409 | KRT8 | NDUFA13 | KIAA1328 | DUT | GABRB3 | PRMT1 |
| 410 | LOC105377860 | STRAP | CAMK2D | SERPINB9 | STXBP5L | ATP5G3 |
| 411 | DLG2 | CFL1 | PEAK1 | STRAP | ABHD17B | NUDC |
| 412 | AGPAT4 | PCBP1 | ARHGEF10 | TAF7 | LOC100288798 | CAND1 |
| 413 | GRIA1 | PSMA2 | FAM135A | CNN2 | FAM168A | DDX1 |
| 414 | ADK | SEMA3E | CNTLN | LRRC75A-AS1 | PEAK1 | ND3 |
| 415 | ITGB8 | IPW | HDAC8 | TFAM | PCNX1 | NUDT21 |
| 416 | FAM172A | DDX17 | KDM6A | SALL2 | ROR1 | CALU |
| 417 | STAG1 | IPO7 | MBNL1 | ERH | NR2C2 | NIPSNAP1 |
| 418 | ETV6 | TAF7 | SNTG2 | HNRNPR | KIAA1324L | BUB1 |
| 419 | VPS54 | SF3A3 | ATXN1 | HDGF | CCDC91 | NOL11 |
| 420 | ZBTB20 | BNC2 | BRAF | DNTTIP2 | NRF1 | ETF1 |
| 421 | LOC107987087 | TFAM | RTTN | TXN | NOVA1 | IPO7 |
| 422 | RERE | DHX9 | NAV2 | NUDC | USP6NL | SERPINH1 |
| 423 | MMP16 | COX5B | MAN2A1 | SSBP1 | SNTB1 | SF3A3 |
| 424 | LOC105378031 | HNRNPH1 | LRRC8D | METAP2 | PPP2R2B | CAP1 |
| 425 | TRAPPC9 | F11R | GLI2 | EIF2S2 | GPATCH2 | EIF2S2 |
| 426 | ULK4 | CYP2S1 | RAP1GDS1 | PRPF8 | ELP4 | MARCKSL1 |
| 427 | ATG10 | SERPINB9 | RAPGEF6 | DLGAP5 | LOC102723568 | SALL4 |
| 428 | NAALADL2 | HDGF | CHN1 | HNRNPL | PDE3B | ATF4 |
| 429 | GPATCH2 | PHF21B | ERC1 | TXNRD1 | ZNF519 | MARCKS |
| 430 | NKAIN3 | ANP32A | HDAC9 | HDLBP | SHANK2 | EIF3M |
| 431 | DNAJC15 | KHSRP | IGF2BP2 | HIST1H3D | NBAS | PSMD2 |
| 432 | KIAA1328 | USP7 | TTLL5 | PMAIP1 | THSD7A | ZFAND5 |
| 433 | FAAH2 | DDX3X | RPS6KC1 | HIST1H4E | SIPA1L1 | VIM |
| 434 | FGF12 | SNRPD3 | SHANK2 | MARCKS | TAF3 | EIF2S3 |
| 435 | TTC17 | CBX1 | COL11A1 | PRKDC | ANO10 | KDM5B |
| 436 | JAZF1 | METAP2 | ANO10 | DDX1 | MAGI3 | TXNRD1 |
| 437 | UBE2E1 | TMBIM6 | FAM160A1 | PWARSN | ERBB4 | PGK1 |
| 438 | PKP4 | RPL41 | DYM | PSMD7 | HCN1 | CDH1 |
| 439 | RASAL2 | EDF1 | SCFD2 | MTHFD2 | PPARGC1A | XPO1 |
| 440 | LOC107985710 | EIF3L | SYNDIG1 | ETF1 | RIC1 | CNN2 |
| 441 | S100A11 | NFE2L1 | CALD1 | MRPS34 | RNF13 | NDUFA13 |
| 442 | CHD7 | ETF1 | FOXN3 | RANBP2 | BRAF | FKBP4 |
| 443 | GNB4 | CACYBP | SAMD12 | HNRNPAO | PELI2 | KHSRP |
| 444 | KRT18 | SMARCC1 | FGF12 | COX7A2 | TBC1D32 | SMC4 |
| 445 | EVI5 | HN1L | UBE2E1 | EIF3L | JMJD1C | SALL2 |
| 446 | C9orf3 | SIRT1 | NEBL | NIPSNAP1 | SYN2 | SPTAN1 |
| 447 | TSPAN18 | CHD8 | SEMA5A | DNAJC8 | PLPP3 | SNRPD3 |
| 448 | KCNJ3 | RBMX | LOC101927668 | RAB13 | FNDC3A | SNHG5 |
| 449 | NHSL2 | PPM1B | TULP4 | PSMB1 | FIGN | SRP9 |
| 450 | ITPR1 | ST13 | ANKRD17 | LARS | KANK1 | SSR3 |
| 451 | MARCH1 | KDM5B | NLGN4X | PGK1 | PIP4K2A | PCNP |
| 452 | MAP4K3 | GNPTAB | CCSER2 | BZW1 | SAMD4A | HIST1H1D |
| 453 | LYPLAL1 | MRPS34 | NELL2 | SLC26A3 | ANK3 | HMGN2 |
| 454 | TNC | PAIP2 | PTPN4 | SUB1 | TMEM161B-AS1 | LARP7 |
| 455 | PHF14 | SKIL | COBL | MAPRE1 | WDFY2 | SQLE |
| 456 | ARID1B | SSBP1 | CTTNBP2 | PHB | FGD4 | HDGF |
| 457 | LINC01515 | DNTTIP2 | LOC100288798 | SYNCRIP | TMCC1 | MCM6 |
| 458 | FAM171A1 | KNOP1 | GABRB3 | CENPU | SCAF8 | ATP5C1 |
| 459 | LOC100133091 | ATPIF1 | THSD7A | HSBP1 | NELL2 | MTHFD2 |
| 460 | BBX | KIF1A | PDE3B | SSR3 | PIBF1 | HNRNPL |
| 461 | MED12L | ACLY | STAU2 | PAIP2 | ZNF407 | MYH10 |
| 462 | SSH2 | HNRNPC | BTBD9 | SNRPF | PTPN4 | DHX9 |
| 463 | HOOK3 | PRDX6 | FNDC3A | TRIM71 | NOS1AP | MCM3 |
| 464 | MPDZ | CDCA7L | COA1 | SF3A3 | MTHFD1L | DUT |
| 465 | BACH2 | NAP1L3 | DLEU1 | SERPINH1 | ZNF608 | FDFT1 |
| 466 | FLNC | PPAT | LINC01515 | HNRNPH1 | CAMK2D | PSMB1 |
| 467 | VIM | HNRNPL | MKL2 | FUS | GREB1L | HMGCR |
| 468 | ESRRG | PSMB4 | FRMD5 | ATP5J2 | CCSER2 | PPM1G |
| 469 | ACTN4 | ATP5G3 | POLA1 | PSMA3 | SLC44A5 | HYOU1 |
| 470 | PPM1L | DANCR | NLK | IPO7 | SRPK2 | SEC61B |
| 471 | LOC107985675 | CCT7 | PDZRN3 | MRPL51 | ITPR2 | XPOT |
| 472 | RTTN | VRTN | FYN | RANBP1 | COL25A1 | SFPQ |
| 473 | CSRNP3 | ZNF146 | NAV3 | SLC25A5 | FGF2 | DDX3Y |
| 474 | STIM2 | RAD50 | FAM172A | RPL13AP5 | NAV2 | DNTTIP2 |
| 475 | USP25 | HIST1H1C | SUMF1 | NOP56 | SHROOM3 | EIF3E |
| 476 | COLEC12 | PRDX2 | ROR1 | CALU | MLLT10 | DNAJC8 |
| 477 | DNAJC1 | ZFP36L2 | PICALM | HIST1H2AJ | DOCK3 | ACVR2B |
| 478 | TENM1 | PKM | KANSL1 | NOL11 | FAM169A | MRPS34 |
| 479 | NHS | SNRPF | PCNX1 | ABCF1 | BTBD9 | DCP2 |
| 480 | ANKRD6 | RABGAP1L | SPRED1 | HNRNPF | AUH | SLC26A3 |
| 481 | CREB5 | DBI | RBM26 | TMEM97 | DDX10 | CENPU |
| 482 | RBPMS | SRP9 | TMEM178B | MCM6 | KALRN | SLC38A2 |
| 483 | COL25A1 | PSAT1 | ATG10 | SOD1 | CTNNA3 | HNRNPAO |
| 484 | SPRED2 | HMGN1 | FIRRE | NUFIP2 | SCMH1 | CDC42 |
| 485 | C5orf42 | MIAT | BACH2 | SRP9 | ZRANB3 | SMARCE1 |
| 486 | CPNE8 | HNRNPF | SLC2A13 | PRR14L | ATG7 | GARS |
| 487 | HDAC9 | AP2M1 | CTNNA3 | ACVR2B | CALN1 | FXR1 |
| 488 | HS2ST1 | SNHG16 | LINC01122 | TCEB2 | EPC1 | TFAM |
| 489 | BCAT1 | RANBP2 | SIK3 | HYOU1 | CDK19 | PWARSN |
| 490 | MEIS2 | RBM27 | ADGRB3 | CNN3 | SIPA1L3 | RPL41 |
| 491 | MKLN1 | EIF1 | LOC105378031 | COX8A | MKLN1 | ABCF1 |
| 492 | MAP2K4 | TFRC | MIR325HG | EIF4EBP2 | NTM | LAPTM4A |
| 493 | UBE3D | LTA4H | TNKS | CCND1 | SYNDIG1 | PRR14L |
| 494 | AP3B1 | SNRPE | DYNC2H1 | CAP1 | SLC16A10 | CHD8 |
| 495 | CDH6 | PRMT1 | PELI2 | EIF2S3 | PCMTD1 | MRPL51 |
| 496 | DEC1 | MYH10 | GRB10 | SNHG16 | TSPAN5 | CCNI |
| 497 | BTBD9 | JARID2 | P3H2 | ENY2 | CAMTA1 | ID1 |
| 498 | SDK2 | XPOT | PSPC1 | PSMB4 | SNTG2 | ARCN1 |
| 499 | MIR99AHG | AHCY | FN1 | SNRPE | HERC4 | PSMD7 |
| 500 | TNIK | ERBB2 | HIVEP1 | SEMA3E | NR3C2 | LDHA |
| 501 | BMPR1A | EPB41 | NEK7 | TFRC | PHF21A | HADHA |
| 502 | TMEM131 | ANKRD18CP | GLCCI1 | UBTF | TRAF3IP2-AS1 | SLC25A5 |
| 503 | RBM47 | SRSF10 | WDFY2 | UQCR10 | ZNF277 | NAA50 |
| 504 | EPHA7 | SNRPD1 | LDAH | CKS2 | LOC339862 | USP7 |
| 505 | MBNL2 | CPSF2 | GPATCH2 | COX6B1 | RUNX1T1 | SOD1 |
| 506 | FUT8 | SRSF2 | PPP2R2B | LDHA | PALLD | NAE1 |
| 507 | FAM110B | NSD1 | PCMTD1 | IGF2R | KIAA1328 | ANP32B |
| 508 | MDGA2 | PRPF8 | SUCLG2 | CAPRIN1 | RIMS1 | SUB1 |
| 509 | SCMH1 | TCOF1 | THSD4 | ACAA2 | SERINC5 | SRRM1 |
| 510 | SMAD3 | LARS | BRE | OTX2 | ATXN1 | COPB2 |
| 511 | SLC2A13 | PSAP | CHD6 | SMARCE1 | LOC105377329 | ATPIF1 |
| 512 | VAV3 | SKP1 | ACOXL | TPR | BAZ2B | PAPOLA |
| 513 | NEDD4L | DBN1 | SPATS2L | KNOP1 | DAB1 | REST |
| 514 | MBOAT2 | SFPQ | CDH11 | GARS | FAM189A1 | SSBP1 |
| 515 | RPS6KC1 | EIF2S2 | CHD2 | HSPE1 | 1-Mar | ZNF146 |
| 516 | KHDRBS3 | NDUFV2 | SYT14 | SNRPD1 | KANSL1L | MAP1B |
| 517 | SESTD1 | BCLAF1 | DMTF1 | NAA50 | CSTF3 | PRPF40A |
| 518 | LRRFIP1 | HIST1H1A | ST6GAL1 | SOLE | RABGAP1 | SERPINB9 |
| 519 | UBAC2 | RMST | DMD | FDFT1 | NXPH2 | PHB |
| 520 | NPSR1-AS1 | HNRNPAO | LOC102723568 | ATP5F1 | MAP4K3 | HNRNPF |
| 521 | GALNT13 | NOP56 | SLC24A2 | GPX4 | PBX1 | RANBP1 |
| 522 | TLN2 | MAP7 | ANAPC10 | ATP5L | ARHGEF10 | SUMO1 |
| 523 | KIAA1109 | ERH | ANO6 | GNL3 | TTLL5 | PAIP2 |
| 524 | WDR27 | GAS5 | IL1RAPL1 | KARS | STRN3 | RIF1 |
| 525 | FREM1 | NAE1 | ZNF608 | ATXN7L3B | FGFR2 | SEPT2 |
| 526 | NES | RPL13AP5 | XKR4 | PCNA | LINC01515 | BCLAF1 |
| 527 | GMDS | DDX18 | CAMTA1 | ZNF146 | MKL2 | ARPC2 |
| 528 | EFR3A | GNAS | AP3B1 | UBE2I | CSMD2 | COX7A2 |
| 529 | ACSS3 | GPR176 | LOC107983984 | CCNA2 | CDK13 | APLP2 |
| 530 | JMJD1C | EIF3E | SNTB1 | SEPW1 | PDE7A | ERH |
| 531 | SND1 | PSMA3 | MYCBP2 | C1QBP | DYM | ACAA2 |
| 532 | PPARGC1A | MGAT4C | KIAA1324L | EIF3M | ATP8A2 | ATP5F1 |
| 533 | CHD2 | PHB | SMAD2 | NFYB | RTTN | HSBP1 |
| 534 | MEST | AARS | COL25A1 | ID1 | ARHGAP44 | LMAN1 |
| 535 | CCDC91 | CCNA2 | PBX3 | PFDN5 | SCLT1 | DKC1 |
| 536 | RREB1 | HINT1 | ETV6 | SRP72 | RNF38 | CKAP5 |
| 537 | SLC8A1 | ACAA2 | SCMH1 | FADS1 | CHN1 | RPL13AP5 |
| 538 | CCND2 | NOP58 | TBL1X | GOT2 | WDPCP | ZC3H15 |
| 539 | RSU1 | SUMO1 | UVRAG | TCOF1 | COA1 | KIF11 |
| 540 | MIR325HG | ABCF1 | PLCH1 | TUBB2B | DISP1 | PSMD12 |
| 541 | ADAM19 | TPR | CEP83 | PAPOLA | CTBP2 | CLTA |
| 542 | SRGAP1 | ZNF281 | FLRT2 | RSL24D1 | CDC14A | MRPL3 |
| 543 | CACNA2D3 | SLC25A5 | RNF130 | PCNF | BRINP1 | EIF4EBP2 |
| 544 | SHISA6 | SLC26A3 | SPATA6 | PSMC5 | GAB1 | NREP |
| 545 | TRMT11 | GGCT | EIF4G3 | NAE1 | DLEU1 | HIF1A |
| 546 | CBFA2T2 | MAL2 | CSRNP3 | HMGCR | RBFOX1 | SMARCC1 |
| 547 | SDCCAG8 | PSMD7 | PTEN | DKC1 | PRKCA | RAB13 |
| 548 | LRBA | IGF2R | LRRC16A | F11R | CADPS2 | COX8A |
| 549 | DUSP6 | SCG3 | KCNQ3 | TMA7 | RAP1GDS1 | CCND2 |
| 550 | ZFPM2 | UBTF | NRIP1 | SEC61B | KSR1 | PGD |
| 551 | BMPR1B | NUDC | PATJ | CLTA | EPB41L4A | SRSF7 |
| 552 | NCOA2 | PAPOLA | NAALADL2 | YBX3 | TULP4 | ATP5J2 |
| 553 | ANKRD36 | ENAH | TSPAN5 | PSMD12 | CDC42BPA | FASN |
| 554 | TTLL5 | EIF3M | MKLN1 | SRSF7 | LOC107985675 | TRIM71 |
| 555 | BARD1 | CKS2 | CACNB2 | TUG1 | GRB10 | LRRC75A-AS1 |
| 556 | RUFY3 | COX8A | STRN3 | PSME3 | GLI2 | PTPN11 |
| 557 | CMIP | MORF4L2 | CHD9 | ATP5G2 | RRAS2 | SMS |
| 558 | EDNRB | DKC1 | DCAF6 | BCCIP | MGAT4C | PSMB4 |
| 559 | CLASP2 | PSMD2 | HSD17B12 | PGD | ZNF521 | CCNA2 |
| 560 | MYH9 | PCDH18 | MYO1D | TALDO1 | ZBTB20 | AP1S2 |
| 561 | DYRK1A | NRXN1 | HDAC4 | ARCN1 | FAAH2 | NFE2L1 |
| 562 | ANAPC10 | TALDO1 | KMT2C | ATP6V1G1 | DCAF6 | TALDO1 |
| 563 | MAMDC2 | GOT2 | SNX13 | EIF3I | CHRM3 | SRSF10 |
| 564 | ADGRA3 | EIF4G1 | ACBD6 | PDPN | KCNMA1 | TUG1 |
| 565 | USP47 | SLTM | NHSL2 | DDX17 | RBMS3 | TMEM97 |
| 566 | ID3 | MKI67 | MPDZ | HIST1H2AG | GRHL2 | CKAP2 |
| 567 | CDK8 | SRSF7 | XYLT1 | PABPC4 | ADARB2 | KNOP1 |
| 568 | ZNF148 | ATP5G2 | PUM2 | KDM5B | ZNF124 | ATXN7L3B |
| 569 | MYO9A | PSMB1 | HERC4 | SLC38A2 | RIC8B | RBM3 |
| 570 | STAU2 | MDN1 | NF1 | SUMO1 | SCFD2 | SNRPE |
| 571 | REV3L | ROR1 | ANO4 | CDC42 | GPC3 | SUGT1 |
| 572 | PVT1 | PGK1 | KCNMA1 | PRDX2 | CHD6 | UBE21 |
| 573 | STXBP5L | TUBB2B | ZNF385B | COPB2 | LOC100507053 | RAD50 |
| 574 | GAB2 | BCOR | CEP192 | ATP5C1 | PDZD2 | PCBP2 |
| 575 | MKL2 | SMPDL3B | NOVA1 | ZFP36L2 | PTCHD1-AS | ACAT2 |
| 576 | ZC4H2 | GARS | EPB41L2 | FASN | LTBP1 | HSPE1 |
| 577 | LOC105375334 | SLC38A2 | PDLIM5 | SRRM1 | ZC4H2 | SNRPF |
| 578 | PLXDC2 | FEM1B | CHCHD3 | SAP18 | NAV3 | CKS2 |
| 579 | ATG7 | PABPC4 | FUT8 | RIF1 | SORCS1 | TAX1BP1 |
| 580 | LIMCH1 | TSSC2 | PIP4K2A | NDUFS6 | FHIT | ZNF483 |
| 581 | NFIA | NREP | FGD4 | ATP5 | SASH1 | OSTC |
| 582 | CEP192 | WDHD1 | MAP2K4 | GGCT | LOC105374945 | ATP5L |
| 583 | KIAA1324L | UBA2 | SLC35F1 | MGEA5 | SMAD2 | TUBA1A |
| 584 | SIPA1L1 | YBX3 | KALRN | RCN2 | LHFP | SNRPD1 |
| 585 | NEO1 | AIF1L | ZNF385D | NOL7 | FN1 | ABCE1 |
| 586 | DENND1A | CNOT1 | FGGY | GSPT1 | PITPNC1 | PPIG |
| 587 | MMS22L | CAPRIN1 | ANKIB1 | BUB1 | KDM2A | CPSF2 |
| 588 | CASC15 | UBC | RIMS1 | SRSF2 | PARGP1 | GOT2 |
| 589 | ZNF124 | PLPP1 | CDYL | NDUFB10 | ACOXL | SNHG16 |
| 590 | FAM126A | ARFGEF3 | PDZD2 | ZC3H15 | TRABD2B | PPAT |
| 591 | C4orf51 | CHEK1 | LOC105377860 | DSG2 | MBOAT2 | NUFIP2 |
| 592 | SAMD3 | CBL | MEMO1 | PHB2 | ATF7IP2 | MCL1 |
| 593 | PARK2 | HIP1 | ACACA | TXNDC17 | CNTLN | PFDN5 |
| 594 | RUNX1T1 | DNAJC8 | SLC4A7 | APLP2 | LRRC16A | SEMA3E |
| 595 | DLEU1 | RBM12 | FAM168A | PSMB6 | MIR325HG | TCEB2 |
| 596 | PRSS23 | MMADHC | COL4A2 | RTN3 | ATAD2B | SNX6 |
| 597 | SULF1 | ILF2 | KIRREL | SNRPB | STXBP4 | ATP5G2 |
| 598 | LOC100506990 | PSMB6 | SHPRH | HELLS | SLAIN1 | YBX3 |
| 599 | NEXN | DDX1 | THRB | PDAP1 | BMPR2 | MGEA5 |
| 600 | UBE3C | PPIG | LOC107987083 | NDUFB9 | BRIP1 | ATP6V1G1 |
| 601 | DPP6 | FXR1 | GMDS-AS1 | DDX24 | TMEM178B | EIF3] |
| 602 | WWTR1 | ATP5L | ANKRD36 | PSMD4 | PDZRN3 | PRDX2 |
| 603 | LOC107986021 | NAA15 | CNOT2 | CPSF2 | RPS6KC1 | HELLS |
| 604 | ANKIB1 | SUGT1 | BNC2 | VAT1 | RICTOR | LARS |
| 605 | DYM | HIST2H2AC | LOC107986777 | COX5A | ST7 | GGCT |
| 606 | USP53 | RSL24D1 | PITPNC1 | DHX9 | PHF14 | KARS |
| 607 | HECW2 | RBM25 | ATP8A2 | DANCR | CSRNP3 | TMED10 |
| 608 | DDX10 | MRPL3 | RIC1 | CCDC47 | MBNL1 | RPL7L1 |
| 609 | PRDM5 | EIF4EBP2 | MBOAT2 | DDX3Y | SUMF1 | PSME3 |
| 610 | LOC100288798 | LRPPRC | SVIL | WBP11 | PRKY | COX6B1 |
| 611 | COL5A1 | DDX46 | LOC101928570 | PNRC2 | NEBL | PSMB6 |
| 612 | BRE | GPI | HACE1 | XPO1 | FOXO3 | PSMD4 |
| 613 | ARHGAP26 | MRPL51 | SSH2 | ZNF483 | NRIP1 | NUSAP1 |
| 614 | SLC20A2 | PRPF40A | VPS54 | ACP1 | LMBR1 | LAPTM4B |
| 615 | NHSL1 | DSG2 | PBX1 | POLR2L | BCL11A | ZIC3 |
| 616 | SOS1 | RARRES2 | NEO1 | LSM4 | NEO1 | PDPN |
| 617 | MTHFD1L | GLO1 | KIF13A | PAFAH1B2 | SLC20A2 | LSM4 |
| 618 | CNOT2 | PHGDH | FGF2 | TOP2B | SCN8A | RSL24D1 |
| 619 | KDM6A | ID1 | TLN2 | SHFM1 | AHCYL2 | TUBB2B |
| 620 | HHLA1 | MGST1 | LARP4B | CHCHD2 | DPH6 | MMADHC |
| 621 | PCMTD1 | GLUL | RAPGEF5 | PSMC3 | SAMD12 | RTN3 |
| 622 | PCDH10 | PAFAH1B2 | VPS13A | SPTAN1 | IGF2BP2 | UBTF |
| 623 | RIN2 | SOD1 | STK39 | MGST1 | LOC645513 | GFPT1 |
| 624 | RAPGEF6 | PFDN5 | CDK6 | RBM3 | LRCH1 | BCCIP |
| 625 | SASH1 | ATXN7L3B | PPM1H | SFPQ | CHD9 | DDX24 |
| 626 | SUCLG2 | TAF15 | RBM47 | PPAT | CBR4 | ATP5J |
| 627 | FNDC3A | WBSCR17 | PCLO | SOX4 | CUX1 | NES |
| 628 | OPCML | BUB3 | KIAA1958 | KDELR1 | HACE1 | PAFAH1B2 |
| 629 | PHLPP1 | EP300 | CDC73 | EIF3K | LRIG1 | GSPT1 |
| 630 | TSPAN5 | CADM2 | ARID2 | OSTC | UBE2W | DDX46 |
| 631 | MGMT | KIF11 | UBE3C | HIST1H2BH | REPS1 | UQCR10 |
| 632 | MEMO1 | EIF1B | TCF7L1 | SRSF10 | LOC729732 | HEATR1 |
| 633 | HERC4 | LINC00371 | MB21D2 | USP7 | CDH8 | NOP56 |
| 634 | RALGAPA2 | OAZ2 | WDR7 | LTA4H | PICALM | GOLGB1 |
| 635 | ADARB2 | BST2 | ERBB4 | NAP1L3 | CLASP2 | GPX4 |
| 636 | PTBP2 | COX6B1 | LMBR1 | USP1 | LINC-PINT | SEPW1 |
| 637 | FRMD6 | HNRNPR | DISP1 | NREP | SPPL3 | F11R |
| 638 | TPM1 | DCP2 | LYPLAL1 | TCEAL4 | DGKH | DENR |
| 639 | NCALD | NDUFB10 | BMPR2 | PPIG | MAP2K5 | MAGED2 |
| 640 | CCSER1 | AMD1 | AGTPBP1 | PRRC2A | SNX13 | ANXA5 |
| 641 | EPHA3 | LSM4 | SOS1 | VCAN | SLC35F3 | NFYB |
| 642 | RBM26 | RBPJ | CHRM3 | CCNI | MTMR3 | EIF4H |
| 643 | LOC105370504 | GNL3 | RICTOR | LSM3 | CDH13 | MGST1 |
| 644 | MAP4K5 | HMMR | QKI | PCBP2 | TCF7L1 | ARPC5 |
| 645 | ANTXR1 | LAPTM4B | AHCYL2 | EIF4H | SLC25A26 | CENPE |
| 646 | HMGA2 | STK26 | DTNB | TMEM14C | COL4A5 | PSMC5 |
| 647 | ITGB5 | RND2 | LOC101928096 | MMADHC | RPTOR | YME1L1 |
| 648 | ATXN7L1 | TFDP2 | BARD1 | PTTG1 | FNIP1 | TAF15 |
| 649 | MIR924HG | APRT | KCNH8 | TOMM6 | SLC24A3 | BPTF |
| 650 | CDH10 | PPT1 | HIBCH | SEPT2 | MRPS28 | TSPAN6 |
| 651 | CACNA1C | PSMD12 | EV15 | ZIC3 | SLX4IP | CHCHD2 |
| 652 | CADPS | GSPT1 | LGR4 | PPDPF | DIP2B | VCAN |
| 653 | RALYL | IRX2 | GALNT7 | HIST1H1A | AHI1 | PNRC2 |
| 654 | NPAS3 | TMEM97 | CALN1 | GMFB | TPST1 | PABPC4 |
| 655 | TAF3 | GPRC5B | CDK19 | XPOT | KIAA1468 | PEG10 |
| 656 | FAT4 | EIF3I | ATP2B1 | TIMM13 | STX18-AS1 | VAT1 |
| 657 | ADAMTS3 | PNRC2 | VAV3 | NDUFV2 | SFMBT2 | DSG2 |
| 658 | TMEM108 | RAB3B | PDSS2 | SOX11 | KCNN2 | NAP1L3 |
| 659 | DISP1 | UBXN7 | SUGCT | SLC6A8 | BCAS3 | SOX11 |
| 660 | PHLDB2 | FZD7 | MLLT3 | BCLAF1 | ZNF254 | KDELR1 |
| 661 | ME1 | THUMPD1 | ACSS3 | TMED10 | KIRREL | PCNA |
| 662 | TFPI | VAT1L | KIAA1109 | RPL7L1 | LOC107986022 | GMFB |
| 663 | LDAH | PGD | SRBD1 | NRBP1 | LOC107987083 | ARPC3 |
| 664 | DENND1B | GPC4 | NFIB | ARPP19 | POLA1 | ARPP19 |
| 665 | VGLL4 | KRAS | TAF3 | SNRPC | GSTCD | TCOF1 |
| 666 | TPST1 | HSPE1 | RABGAP1 | FEM1B | RHBDD1 | BUB3 |
| 667 | ELP4 | C1QBP | E2F3 | CHD8 | DTNB | TMEM14C |
| 668 | TNRC18 | SLC7A3 | CNKSR2 | PPT1 | LGR4 | SRSF2 |
| 669 | ANKRD17 | ACIN1 | ATG7 | LAPTM4A | SCAI | TFRC |
| 670 | WWC2 | BUB1B | ZNRF3 | POLR2A | ZNF385B | SEPT7 |
| 671 | LOC101928570 | PHB2 | TNIK | C11orf31 | EPHA6 | ENY2 |
| 672 | PPM1H | FGFR2 | KANK1 | CLIC1 | CDH2 | FAM60A |
| 673 | LINC00922 | NDUFB9 | CELF2 | THUMPD1 | DCLK1 | SRSF6 |
| 674 | LINC01278 | CDC6 | UBE2W | EIF1B | REV3L | RBM25 |
| 675 | GULP1 | SAMHD1 | ATAD2B | HIST1H2AE | NINL | DNMT1 |
| 676 | GPD2 | COX7A2 | NHS | HADHA | TMEM161B | CAPZA1 |
| 677 | EHBP1 | PPP2R2B | ZDHHC21 | EIF3E | MANBA | PCDH18 |
| 678 | UVRAG | KDM4A | PHF21A | RBM8A | HIVEP1 | RARS |
| 679 | SMAD2 | STMN1 | KCNN2 | BPTF | PPP2R3A | IL6ST |
| 680 | ATAD2B | GNPDA1 | SCN8A | BAZ2A | INPP4A | HNRNPC |
| 681 | EEA1 | BAZ2A | CENPP | COX7B | EVI5 | HMMR |
| 682 | ASAP2 | TCEB2 | SCAF8 | CTSV | CEP83 | EIF3K |
| 683 | SNX13 | ZMYND8 | FHOD3 | DCP2 | ANKS1A | HIST1H1E |
| 684 | QKI | BCCIP | SFMBT2 | MCL1 | FRS2 | UGDH |
| 685 | TNFRSF21 | KIAA0101 | AUH | CTNNB1 | LINC00693 | PSMD11 |
| 686 | NR3C2 | BEND3 | SLX4IP | TSPAN6 | ARIH1 | ANLN |
| 687 | ST5 | POLR2A | PDE3A | DNAJA2 | GRIK4 | NUP50 |
| 688 | PUM2 | FAM98A | POU2F1 | TOMM7 | SCAPER | GNL3 |
| 689 | CLIP1 | GART | LOC105370504 | REST | LYPLAL1 | CDCA7L |
| 690 | TNKS | CSRP2 | PCDH11X | HIST1H3E | TSSC1 | EIF3F |
| 691 | ZFHX3 | VAT1 | IMMP1L | TUBA1A | FAM13B | KHDRBS1 |
| 692 | CYR61 | RPL22L1 | WRN | ICMT | ANO6 | CLIC1 |
| 693 | LOC102723568 | KDELR1 | RUNX1T1 | UGDH | RBM26 | QPRT |
| 694 | CDK13 | ALDH7A1 | GAB1 | ATP1A1 | FUT8 | PHB2 |
| 695 | GAB1 | MSH2 | NEK1 | UBL5 | ARHGEF7 | COX5A |
| 696 | MON2 | COA4 | PARK2 | CDC6 | SLC24A2 | CNOT1 |
| 697 | ASIC2 | FUBP1 | USP34 | MYH10 | AFF1 | NRAS |
| 698 | GPC3 | PCNP | ZZZ3 | FABP5 | MED27 | API5 |
| 699 | LOC284825 | PPP2CA | SORBS2 | AIF1L | ZZZ3 | LTA4H |
| 700 | SENP7 | TCF3 | SPAG16 | AP1S2 | FSD1L | CCDC47 |
| 701 | ST7 | COX5A | TANC2 | SMARCC1 | CECR2 | NOL7 |
| 702 | DTWD2 | UBAP2L | KIF16B | NRAS | ADAM22 | ZFP36L2 |
| 703 | EPC2 | VMA21 | POLQ | ARPC5 | CELF2 | PSAT1 |
| 704 | GALNT10 | SRRM1 | LHFP | GLUL | SSH2 | ASPM |
| 705 | DGKH | YARS | CCDC171 | CKAP2 | IMMP1L | DANCR |
| 706 | DTNA | TMEM261 | FAM189A1 | CDC37 | P3H2 | GLUL |
| 707 | R3HDM1 | ENY2 | ZNF292 | FAM60A | MICAL3 | MAPK6 |
| 708 | BIRC6 | NLN | RAI14 | NHP2 | ZNF148 | FUBP1 |
| 709 | ZRANB3 | TIMM13 | SDK2 | SNRPA1 | THADA | CXADR |
| 710 | PLCB4 | EIF3B | GLS | VDAC1 | BMT2 | WBP11 |
| 711 | DERA | C11orf31 | GPM6B | HIST1H2AC | PPP1R9A | QSER1 |
| 712 | MAP4K4 | LUC7L3 | CACHD1 | YWHAH | HDAC8 | USP1 |
| 713 | PCDH7 | MAD2L2 | SORCS1 | CUTA | SH3GL2 | NDUFV2 |
| 714 | CHN2 | EIF1AX | CDK13 | FAM98A | PPM1H | ZNF106 |
| 715 | LOC105370108 | RCN2 | REPS1 | RPL22L1 | OPHN1 | NRBP1 |
| 716 | HEG1 | GMFB | DGKH | PRPF40A | GRIK2 | THUMPD1 |
| 717 | LRRFIP2 | TXLNG | VWDE | EIF3F | ASH1L | SLC6A8 |
| 718 | RAPGEF1 | HMGN2 | ADAMTS6 | NME4 | BICD1 | PSMC3 |
| 719 | H2AFY2 | HEATR1 | CCDC150 | LSM7 | ITPR1 | APOE |
| 720 | SUGCT | SEPW1 | GRHL2 | ARPC3 | STAU2 | OTX2 |
| 721 | PLOD2 | ICMT | RRAS2 | SMS | SLC36A4 | SPARC |
| 722 | SDK1 | EIF3K | SLC35F3 | APRT | WRN | NDUFB9 |
| 723 | DIAPH2 | TSR1 | AFF2 | PSMD11 | LOC107986770 | RBBP7 |
| 724 | GSE1 | TMED2 | LRCH1 | HIF1A | TENM2 | DNAJC7 |
| 725 | DIS3L2 | PNN | ST7 | CAND1 | FGGY | BAZ2A |
| 726 | DCAF6 | HMGN5 | NXN | HIST1H3I | MAP4K5 | HIST2H2AC |
| 727 | PHKB | DNAJC7 | MAP2K5 | CYP2S1 | SVIL | RCN2 |
| 728 | USH2A | SLC7A8 | LIMS1 | PRDX5 | FHOD3 | NDUFB10 |
| 729 | ZCCHC7 | TPX2 | DEPDC1B | LARS | IKZF2 | GPI |
| 730 | GPC5 | TAOK1 | CDH13 | COA4 | SLC39A11 | DYNC1H1 |
| 731 | FCHSD2 | NDUFS6 | ATP11A | RBM12 | UCK2 | UBAP2L |
| 732 | MAST4 | GPATCH4 | NPSR1-AS1 | CXADR | KCNH7 | TCEAL4 |
| 733 | SLC36A4 | EIF2AK2 | CDH6 | UBAP2L | GLS | VDAC1 |
| 734 | WDR7 | MARCKS | SENP6 | PRDX3 | GRAMD1B | PRDM14 |
| 735 | LARP4B | BEND4 | RPTOR | PSMD8 | PCLO | ACP1 |
| 736 | DENND5B | CCDC47 | PDE7A | GPI | POU2F1 | NDUFS6 |
| 737 | MAP2 | PSME3 | FNIP1 | ARF1 | RAPGEF5 | HN1 |
| 738 | CTNND2 | SHFM1 | CTBP2 | C12orf57 | MLLT3 | RPN1 |
| 739 | ADD3 | SORL1 | THADA | HIST1H2BD | ADAMTS20 | PDAP1 |
| 740 | ARHGAP24 | GPX4 | CNTNAP2 | ENSA | LAMA2 | KIAA1551 |
| 741 | DSCAM | RUVBL1 | ELAVL2 | HSPB1 | WWP1 | GNAI3 |
| 742 | KCNQ1OT1 | HCFC1 | KIAA1468 | GNAI2 | TYW1B | SHFM1 |
| 743 | BCAR3 | RRP1B | SLC36A4 | HCFC1 | LDAH | PRRC2A |
| 744 | MYCBP2 | ALPL | BIRC6 | NUP50 | PIK3C3 | PPDPF |
| 745 | MYO1B | CPSF3 | ZNF148 | COX6A1 | RAD54B | POLR2B |
| 746 | RPTOR | SEC11A | ZNF277 | HNRNPC | TNIK | RPN2 |
| 747 | CCDC102B | BEX1 | MRPS28 | DENR | FUT9 | EZR |
| 748 | TSSC1 | NME4 | SIPA1L2 | ARPC2 | SLCO3A1 | PRDX3 |
| 749 | USP3 | LARP1 | LCLAT1 | PTPN11 | AEBP2 | LSM3 |
| 750 | TRABD2B | PCBP2 | ARHGEF7 | BEX1 | DENND4C | FEM1B |
| 751 | KHDRBS2 | CARHSP1 | GSTCD | ACIN1 | DOCK1 | RBM27 |
| 752 | SEMA5A | FEZ1 | TDRP | CNIH4 | CTTNBP2 | PRDX5 |
| 753 | TDRD3 | C12orf57 | CTDSPL | RAD50 | ARHGEF11 | RBM12 |
| 754 | VRK2 | WNK3 | ZNF519 | VMA21 | LOC101928096 | CUTA |
| 755 | ST3GAL1 | WBP11 | CUL3 | POMP | NUTM2B-AS1 | PSMD8 |
| 756 | KCNH8 | TMEM14C | RAD54B | SRSF6 | ERCC8 | HIST1H1C |
| 757 | PLAS1 | SMS | LOC100506990 | ERP29 | LCOR | SNRPC |
| 758 | MYO3A | NCAPD2 | TTTY14 | TPX2 | STAC | PPP1CB |
| 759 | NEK1 | TXN | LRIG1 | MAD2L2 | PDE10A | LUC7L3 |
| 760 | DLEU2 | ACP1 | SLC39A11 | GNPDA1 | EVL | TIMM13 |
| 761 | TRIM44 | SNRPC | HS6ST2 | BUB3 | NAALADL2 | ACIN1 |
| 762 | KIF16B | ADGRV1 | GRM8 | YME1L1 | NCAM2 | SMC2 |
| 763 | CLEC16A | CLTA | FOXJ3 | VRTN | COL23A1 | COPB1 |
| 764 | LINGO2 | SRP72 | LOC645513 | ABCE1 | PTCHD4 | CDC37 |
| 765 | SEMA3C | ATP5F1 | RBM33 | TMEM261 | SPRED2 | CNIH4 |
| 766 | SMC5 | UBE2K | SLCO3A1 | P4HB | LOC105377860 | TNP01 |
| 767 | MLLT10 | TXNDC17 | TLE1 | IDI1 | THRB | PTP4A2 |
| 768 | THBS1 | ZC3H15 | ADARB2 | RPN1 | 3-Mar | TAOK1 |
| 769 | REEP3 | CNIH4 | PPP2R3A | NCBP2 | RYBP | NCAPD2 |
| 770 | ZNF254 | SNRPB | CNTN1 | SERP1 | ARHGAP10 | GPX1 |
| 771 | NRG1 | CNN2 | MON2 | NDUFB11 | CUX2 | APRT |
| 772 | ATF7IP2 | SRSF6 | RNF217 | TOR1AIP2 | ARMC8 | P4HB |
| 773 | ASXL3 | ARMCX2 | LOC107985962 | QPRT | CDC73 | PNN |
| 774 | NCOA1 | MRPS21 | BRIP1 | TMEM258 | ZNF767P | NAA15 |
| 775 | NTNG1 | EIF4H | DACH1 | KIAA1551 | EPHA7 | TMPO |
| 776 | SRGAP2 | MCM7 | AGFG1 | AHCY | LARP1B | SNRPB |
| 777 | BRAF | KDM1A | RNF38 | NDUFA6 | DMD | CTNNA1 |
| 778 | ENC1 | SBK1 | C1QTNF3-AMACR | HIST1H2BC | KCNIP4 | FAM98A |
| 779 | KTN1 | POLR1D | CWC27 | GPATCH4 | ANKRD36 | KRAS |
| 780 | ADAMTS19 | NUSAP1 | NOS1AP | SUGT1 | AVL9 | POLR2L |
| 781 | STXBP4 | UQCR10 | MAST4 | TSR1 | KIAA1958 | PMAIP1 |
| 782 | NUTM2B-AS1 | SPINT2 | NCOA1 | SCG3 | HS6ST2 | YWHAH |
| 783 | ARHGAP21 | DAB1 | ERCC8 | NUTF2 | XXYLT1 | HACD3 |
| 784 | SGMS1 | HDLBP | RHBDD1 | ROMO1 | FBX025 | NCBP2 |
| 785 | LOC107985037 | CHML | FAM13B | HN1 | ACTR3B | H2AFV |
| 786 | LDLRAD4 | SMC2 | ANKRD28 | MOB1A | HSD17B12 | ARF1 |
| 787 | STRN3 | HMGCS1 | TRABD2B | PEG10 | DACH1 | EEF1D |
| 788 | TBL1X | TXNRD1 | SASH1 | FXR1 | FBXW11 | GNPDA1 |
| 789 | LDB2 | HIST1H2AJ | MAP2 | BST2 | RGL1 | DNAJA2 |
| 790 | ARHGEF12 | LSM7 | KIAA1211 | LMAN1 | KIF16B | PWAR5 |
| 791 | SUCLA2 | ARPP19 | MAP4K5 | SNRPB2 | EMSY | SERP1 |
| 792 | TSHZ2 | FOXO1 | LOC101928437 | EZR | LCLAT1 | ENSA |
| 793 | ISPD | HIST1H2AM | CCDC141 | EIF1AX | SIPA1L2 | TXNDC17 |
| 794 | RCOR1 | EEF1D | EXOC2 | MRPL12 | CHCHD3 | TOMM6 |
| 795 | FRMD4B | SSR3 | PHKB | RARRES2 | TLN2 | TPM1 |
| 796 | MEF2C | SUB1 | DIS3L2 | MRPL3 | LOC105377862 | CTSV |
| 797 | EPB41L4A | ATP6V1G1 | TENM2 | GPX1 | DNAJB4 | UBE2Q2P2 |
| 798 | HIVEP1 | CAND1 | AFF1 | DDX46 | RNF150 | TPM2 |
| 799 | HMBOX1 | SACS | WBSCR17 | PDCD5 | CDH11 | EIF1B |
| 800 | ATP11A | RBBP7 | NUTM2B-AS1 | ARL14EPL | CCDC150 | SMARCA4 |
| 801 | SPARC | USP1 | FOXO1 | PCDH18 | SPATA6 | HSPB1 |
| 802 | PELI2 | DNMT3A | LOC728755 | NOP10 | MCU | HCFC1 |
| 803 | PELI1 | ZNF121 | LUZP2 | MED1 | WWC1 | RBM8A |
| 804 | ANKS1B | SAP18 | LOC107985037 | RBBP7 | PREX2 | PSMB5 |
| 805 | NOVA1 | SMC4 | GRIK2 | NPC2 | CACNB2 | UBA2 |
| 806 | ZAK | CHCHD2 | USP32 | ITM2C | SH3BGRL2 | INPP5F |
| 807 | HACE1 | DDX24 | SIPA1L3 | RBM25 | LOC107986021 | VMA21 |
| 808 | PSPC1 | SLC1A5 | LINC00693 | BIRC5 | GRIA1 | TOR1AIP2 |
| 809 | AGTPBP1 | TOMM7 | STXBP4 | ANAPC11 | FREM1 | BMS1 |
| 810 | PCNX1 | MTHFD1 | CHN2 | TOMM5 | ERC1 | PTTG1 |
| 811 | PAN3 | PSMD4 | SLC24A3 | MAPK6 | LOC107985037 | ZC3H13 |
| 812 | ARHGEF10 | MAPRE1 | FSD1L | PTP4A2 | GPR176 | BIRC5 |
| 813 | CBR4 | HIF1A | OSBPL8 | SMARCD1 | SLC30A7 | ITM2C |
| 814 | FNIP1 | HSBP1 | OPHN1 | PSMB5 | RGS17 | TOMM7 |
| 815 | ITCH | BMS1 | XRCC4 | HMMR | GRM8 | PHGDH |
| 816 | MAP1B | RMND5A | FBXO11 | ATP51 | CBFA2T2 | SAP18 |
| 817 | PDGFD | CALU | MARCH3 | CSRP2 | MAST2 | FSTL1 |
| 818 | PRKD3 | ZNF649 | PREX2 | CNOT1 | CCDC141 | COA4 |
| 819 | CHCHD3 | PGRMC2 | NEGR1 | TUBB4B | ANKRD28 | MSH2 |
| 820 | CCDC171 | PDK3 | MICAL3 | AURKAIP1 | ACBD6 | TMEM261 |
| 821 | TBCA | SOX11 | SSBP3 | LAPTM4B | UBTD2 | C11orf31 |
| 822 | ATXN7 | ERP29 | PTPN14 | RRM2 | HIVEP2 | C12orf57 |
| 823 | CTGF | AKR1A1 | MANBA | EIF2AK1 | LOC105370108 | IDI1 |
| 824 | PRDM2 | KARS | ASH1L | SAR1A | LOC107983984 | SNRPA1 |
| 825 | RASSF8 | HADHA | NFAT5 | PTMS | RAI14 | NUTF2 |
| 826 | PAPPA | KPNA6 | SRGAP1 | EEF1D | NTNG1 | VCL |
| 827 | SUCO | TTF2 | NCK2 | HMGN5 | CMTM8 | PPT1 |
| 828 | C11orf49 | FGFBP3 | RSU1 | BANF1 | IL1RAPL1 | AKAP12 |
| 829 | ARRB1 | GNAI2 | MCU | TPM2 | CRADD | RAB10 |
| 830 | NME7 | POLR2L | GSE1 | NDUFB7 | PLEKHG4B | PPA1 |
| 831 | C20orf194 | ADD2 | ZNF254 | IL6ST | LOC105377700 | GNAI2 |
| 832 | LOC107986324 | ZNF850 | RALGAPA1 | UQCR11 | CAMK1D | HUWE1 |
| 833 | ELK3 | BZW1 | MAN1A2 | RPN2 | NK2 | PCM1 |
| 834 | LOC105378797 | EIF2AK1 | FAM169A | CTR9 | TDRD3 | CTR9 |
| 835 | UBR3 | SNRPA1 | WWP1 | MRPS16 | SOS1 | SMC1A |
| 836 | CHRM3 | RNF20 | IPO11 | PPA1 | SMURF1 | TUBB4B |
| 837 | GREB1 | CRABP1 | LAMA2 | IK | FAM110B | CHEK1 |
| 838 | S100A10 | COX7B | PCNX4 | MRPS21 | EFCAB2 | C1QBP |
| 839 | GSTCD | HIST1H3E | MYO9A | MCM7 | SGK223 | SARAF |
| 840 | PITPNC1 | CDC37 | PRR16 | SLC1A5 | WWTR1 | SAR1A |
| 841 | GLCCI1 | PSMC5 | INTS6 | FZD7 | SYT14 | RRM1 |
| 842 | SEC63 | MARS | TMEM161B | UBXN7 | FOXO1 | NME4 |
| 843 | KSR1 | ZNF589 | MGMT | HIST1H2AL | MAP2 | BUB1B |
| 844 | KIAA1211 | HIST1H2BD | TPST1 | PPP2CA | SDCCAG8 | LSM7 |
| 845 | ACVR1 | RNF168 | ANTXR1 | IFITM1 | ANKRD17 | CCNC |
| 846 | MAP2K5 | MTA3 | ARHGAP10 | MAGED2 | PELI1 | PSMA6 |
| 847 | CENPP | DMKN | JAKMIP2 | HIST1H2AH | AGFG1 | UBE2N |
| 848 | DYNC111 | KIF20B | FUT9 | ANP32B | PUM2 | CDK1 |
| 849 | LINC01356 | FAM111B | PLEKHG4B | AMD1 | NSUN6 | RAB1A |
| 850 | H2AFY | FDFT1 | SDCCAG8 | AARS | VPS13A | RPL22L1 |
| 851 | DENND2A | ESRP1 | TSC22D1 | ARMCX2 | PKNOX2 | ATP1A1 |
| 852 | CHSY3 | DCAF13 | C11orf49 | STARD7 | MAN2A1 | NDUFB11 |
| 853 | RFTN2 | MAPK6 | PARGP1 | PHGDH | SLC35F1 | GART |
| 854 | ABCG2 | UNG | GAB2 | H2AFV | ANO4 | SESN3 |
| 855 | CEP170 | ZNF397 | LOC101929194 | CDCA7L | CNOT4 | EIF2AK2 |
| 856 | RHBDD1 | MED1 | CECR2 | MRPL15 | VAV3 | ICMT |
| 857 | SLC35F3 | ASNS | TTC3 | FKBP2 | ARHGEF9 | MOB1A |
| 858 | CACNA2D1 | SOLE | AHNAK | EIF3B | MOB3B | SOX4 |
| 859 | USP34 | ATP1B3 | PDE10A | TRMT10C | LRP12 | PRKAR1A |
| 860 | SIK3 | PRRC2A | TSSC1 | RARS | XKR4 | UBXN7 |
| 861 | KAT6A | EIF3F | TMEM131 | NGRN | PAT | UBE2V2 |
| 862 | NCK2 | TOP2B | YAP1 | PTP4A1 | ST6GAL1 | CSRP2 |
| 863 | RNF13 | AKR1B1 | LCOR | EBNA1BP2 | COL4A2 | TMA7 |
| 864 | FBXO11 | PCDH1 | FCHSD2 | NDUFB4 | CSPP1 | COX7B |
| 865 | FTX | NACC1 | FBXW11 | ACAT2 | PDLIM5 | DNMT3A |
| 866 | TSC22D2 | CLNS1A | TBCD | TUBA1C | RAP1GAP2 | MAD2L2 |
| 867 | ADGRB3 | ZNF207 | NRF1 | GTF3C4 | LINC01278 | NHP2 |
| 868 | LOC101928437 | COPB2 | GRIA1 | CARHSP1 | SNX25 | KIF20B |
| 869 | NLK | SCNN1A | AHI1 | SMC2 | AGTPBP1 | MDN1 |
| 870 | PIK3R1 | STARD7 | BMT2 | NDUFB8 | ROR2 | GPATCH4 |
| 871 | THSD7A | PTPN11 | SDC2 | SARAF | AP3B1 | CDC6 |
| 872 | NXN | SMC1A | ANKDD1A | FGD5-AS1 | LOC100287497 | ZYG11B |
| 873 | ZZZ3 | TOR1AIP2 | NME7 | MRPL57 | RALGAPA1 | ABRACL |
| 874 | CSPP1 | PRKAR2B | DENND5B | RNF168 | STXBP6 | RAD23B |
| 875 | ERC2 | ABCE1 | PKD2 | RUVBL1 | MICU3 | CCAR1 |
| 876 | LOC645513 | BOD1 | PPP2R5E | SLC39A1 | BARD1 | ADSS |
| 877 | SAMD5 | DNAJA2 | ROR2 | SPCS3 | TNKS | WDR1 |
| 878 | PKD2 | LSM3 | TBC1D4 | DNAJC7 | STK39 | IK |
| 879 | COL4A6 | JADE1 | USP6NL | C9orf78 | LHFPL2 | MED1 |
| 880 | DMTF1 | CUTA | KANSL1L | C19orf53 | AMBRA1 | RRBP1 |
| 881 | CEP83 | ATP1A1 | SORBS1 | GART | PACS1 | COX6A1 |
| 882 | ANTXR2 | MRPS16 | PLAS1 | PSAT1 | ITCH | AURKAIP1 |
| 883 | ERCC8 | ELP2 | CDK5RAP2 | DAZAP1 | CEP192 | RBBP4 |
| 884 | LMBR1 | PRDX5 | CDH8 | CPSF3 | DIS3L2 | SEC11A |
| 885 | ST6GAL1 | HUWE1 | STX18-AS1 | GTF3C6 | ZDHHC17 | CDC20 |
| 886 | FBN1 | CDC123 | PPA2 | MDH2 | SRBD1 | RRP1B |
| 887 | BMP2K | API5 | LINC01619 | NEDD8 | CASK | CPSF3 |
| 888 | SNX14 | TIMELESS | RNF13 | BMS1 | SDC2 | NRDC |
| 889 | SLC44A5 | TRMT10C | WAC | CDC20 | TBC1D4 | SCG3 |
| 890 | FAM135A | TNPO3 | USP9Y | MAP1LC3B | STARD4-AS1 | CYP2S1 |
| 891 | FAM168A | DDX42 | CLOCK | ABRACL | LOC101929709 | EIF1AX |
| 892 | ANO10 | HSPB1 | DOCK7 | NUSAP1 | KHDRBS3 | MYL12B |
| 893 | POU6F2 | SLC39A1 | NINL | ZMAT2 | CNOT2 | ANAPC11 |
| 894 | LOC107983984 | DAZAP1 | LOC107985961 | DCTN1 | CCDC171 | VRTN |
| 895 | CHSY1 | CACHD1 | ADAM22 | RBM27 | C5orf46 | PSMD6 |
| 896 | ZMYND11 | CAMLG | SCAI | MIDN | NAA16 | DCAF13 |
| 897 | HIBCH | GTF3C4 | BCL11A | NDUFAB1 | LOC101929147 | CDC123 |
| 898 | ZDHHC21 | SYT6 | JPX | ATP6VOC | RAP1A | MRPL12 |
| 899 | LOC105378798 | ALDH1B1 | RIC8B | SNX6 | LOC105375334 | POMP |
| 900 | BZW2 | AGO2 | CHM | GNL2 | JAKMIP2 | UBL5 |
| 901 | IMMP1L | DNMT1 | SLC44A5 | AKR1B1 | CENPP | TM9SF2 |
| 902 | EPHA4 | CTSV | NRCAM | GMNN | TAF4B | PTTG1IP |
| 903 | CUL3 | MIS18A | EFR3A | USMG5 | NHS | PDCD5 |
| 904 | TBC1D23 | SLC16A9 | MAP4K4 | PSMA6 | ZDHHC21 | TMEM258 |
| 905 | FAM13B | NDUFB7 | ANKRD18CP | LMNB2 | ALCAM | IPW |
| 906 | SLC7A11 | SPTBN2 | MTAP | NDUFA3 | TMEM131 | U2SURP |
| 907 | ADARB1 | NUP62 | NCAM2 | SMC4 | FLRT2 | EIF3B |
| 908 | ARHGAP6 | MIS18BP1 | CENPK | RRP1B | TRERF1 | ATIC |
| 909 | ADAMTS9 | MCM5 | SERINC5 | ECHS1 | NRG1 | CNDP2 |
| 910 | HIPK2 | ANOS1 | TRERF1 | TIMM8B | SRGAP1 | ARL14EPL |
| 911 | NRF1 | HYOU1 | SLC25A13 | EIF3D | DNM3 | TROVE2 |
| 912 | CAPN2 | MKNK2 | HECW2 | PSMC2 | GRIN2B | KDM1A |
| 913 | NUAK1 | FTSJ3 | CSPP1 | APIS | GPR137C | DLD |
| 914 | LRRC8D | FABP5 | PDE5A | MRPL52 | NHSL2 | AIF1L |
| 915 | CDC14A | LSG1 | FAM19A5 | ZYG11B | BNC2 | NSD1 |
| 916 | MTR | ATP5J2 | STIM2 | RND2 | LOC100506990 | TCEA1 |
| 917 | USP15 | SIN3A | TENM1 | MRPS15 | NXN | UBQLN1 |
| 918 | GPM6B | NGRN | ROCK2 | QSER1 | NME7 | CTSC |
| 919 | MDFIC | TRIM59 | CDC14A | HAUS1 | XRCC4 | NDUFB8 |
| 920 | CDC73 | CCDC6 | PTPR | CCNC | LOC105370504 | YARS |
| 921 | PTPN12 | MTCH1 | NT5C2 | CWC15 | PDE5A | SMARCD1 |
| 922 | NETO2 | ALDH6A1 | RALGPS2 | CNDP2 | RNF130 | FABP5 |
| 923 | DYNC2H1 | ZNF134 | CRADD | HIST1H3F | COL11A1 | ERP29 |
| 924 | EPC1 | QPRT | CHD7 | SPINT2 | DACH2 | GRSF1 |
| 925 | FLNB | NHP2 | CWF19L2 | MAL2 | BRE | ATP1B3 |
| 926 | MRPS28 | RFC1 | LOC105374945 | KIAA0101 | ZC3H12C | EBNA1BP2 |
| 927 | WWP1 | ATP6VOC | ZNF618 | IDO1 | GABBR1 | ARMCX2 |
| 928 | TGFBR3 | TCEAL4 | CEP112 | RAB1A | PPP3R1 | NGRN |
| 929 | MARK1 | IVD | MPP6 | NOP58 | PBX3 | NPC2 |
| 930 | IKZF2 | SEC61B | LINC-PINT | DPY30 | ACVR1 | TRAM1 |
| 931 | SCAF8 | MFAP1 | LYPD6 | CAPZA1 | PDE3A | BEX1 |
| 932 | SNRPN | FKBP8 | CBR4 | FTSJ3 | CSNK1G1 | UBE2K |
| 933 | SLC25A13 | TRMT112 | LARP1B | PHAX | TANC2 | TSR1 |
| 934 | BMT2 | PDIA4 | VPS41 | PSMD6 | LOC107985962 | NDUFAB1 |
| 935 | C9orf84 | RANBP1 | ATF7IP2 | STOML2 | SPAG16 | SPCS3 |
| 936 | MECOM | ADSS | ATXN7 | OIP5-AS1 | GCNT2 | TXNL1 |
| 937 | DENND5A | ANAPC11 | KCNIP4 | RBBP4 | LINC01122 | ARHGAP11A |
| 938 | OSBPL3 | NEDD8 | GPR137C | EI24 | SHB | IMMT |
| 939 | ZFHX4 | ACTR2 | INPP4A | HIST1H4D | SUGCT | DAZAP1 |
| 940 | CHM | FASN | MAST2 | KPNA6 | LOC100505817 | RUVBL1 |
| 941 | ELOVL6 | XPO5 | PLPP3 | CDC123 | PRRG1 | PTMS |
| 942 | TBL1Y | DYNLL2 | ATF2 | UBE2V2 | TANC1 | NDUFA6 |
| 943 | SUMF1 | HAUS1 | ARHGAP44 | NUP62 | CPNE8 | HAUS1 |
| 944 | STARD13 | LINC00665 | CNOT4 | UBA2 | RASSF8 | CTTN |
| 945 | RGL1 | DPY30 | NXPH2 | C14orf2 | KIF13A | DPYSL2 |
| 946 | DAPK1 | SV2A | PPP1R12B | SUMO3 | CDK6 | SEC62 |
| 947 | MAP3K4 | NRBP1 | FRS2 | BRK1 | ATXN7 | STK26 |
| 948 | HIVEP2 | OSTC | SYN3 | KIF11 | NEK1 | GNPTAB |
| 949 | LATS2 | ARCN1 | DLEU2 | CDK2AP1 | CHM | BST2 |
| 950 | LRP12 | HOOK1 | ATE1 | KRAS | EYA1 | ANAPC5 |
| 951 | ZFYVE16 | UPF3B | CTIF | MYL12B | NFIA | LMNB1 |
| 952 | DISC1FP1 | DSTN | ZHX2 | BUB1B | SUCLG2 | HNRNPUL1 |
| 953 | PTEN | CDK2AP1 | ARHGEF12 | BOD1 | CACNA1A | GNL2 |
| 954 | STX8 | SRRT | SLC25A26 | COX6C | NCOA1 | SPINT2 |
| 955 | SLC25A24 | PHC1 | KSR1 | DDB1 | CNTN1 | VDAC2 |
| 956 | NRP2 | TTK | EHMT1 | INPP5F | LOC105379362 | LMNB2 |
| 957 | MAST2 | EI24 | MOB3B | TUFM | GALNT18 | SRSF5 |
| 958 | ASPH | UBL5 | RCOR1 | BCAS2 | TNFAIP8 | TRIM59 |
| 959 | SEC24B | SMARCA4 | LOC105375334 | DCAF13 | VGLL4 | BAZ1B |
| 960 | AHI1 | TGIF1 | RNF220 | DNMT1 | MTCL1 | ARF4 |
| 961 | TBC1D19 | ZNF814 | ZNF124 | RAC1 | GMDS-AS1 | DDB1 |
| 962 | SNCA | LMNB2 | LOC107986215 | DYNLL2 | ADAMTS6 | RRM2 |
| 963 | STK39 | RPN2 | REV3L | RNF7 | CHN2 | WNK3 |
| 964 | STPG2 | CKAP2 | LOC105370108 | TRMT112 | CEP112 | FKBP2 |
| 965 | PACS1 | CTR9 | SLC20A2 | RRM1 | RASGRF2 | USP14 |
| 966 | RBM20 | RFWD3 | PGAP1 | CLNS1A | TSC22D2 | RDX |
| 967 | ZNF91 | WDFY1 | ZNF644 | GHITM | CTIF | FERMT2 |
| 968 | SMG6 | PSMD11 | VRK2 | PBDC1 | LOC105375751 | MAD2L1 |
| 969 | PEAK1 | PSMC3 | TANC1 | SRRT | ACSS3 | SBNO1 |
| 970 | SH3D19 | ADSL | IKZF2 | HIST1H3H | EPB41L5 | EIF2AK1 |
| 971 | LOC101928096 | CNDP2 | ATXN10 | STK26 | LYPD6 | NDUFB7 |
| 972 | ZHX2 | GSPT2 | EMSY | PHPT1 | RCOR1 | KPNA6 |
| 973 | USP24 | HSD17B4 | HIVEP2 | KRT19 | LINC01057 | SNRPB2 |
| 974 | FANCL | SAE1 | KHDRBS3 | EIF2S1 | QKI | RARRES2 |
| 975 | FOXP2 | BRD3 | ITCH | CHML | MON2 | NEDD8 |
| 976 | PPP2R5E | GMNN | UBR3 | ODC1 | TRAK1 | BANF1 |
| 977 | ARHGEF7 | AURKAIP1 | NECTIN3 | MIS18A | XPR1 | PSMC2 |
| 978 | ASH1L | SF3B3 | DCLK1 | MAD2L1 | BTBD11 | SSR1 |
| 979 | RNF24 | YWHAH | PAWR | SSR4 | HIBADH | RAC1 |
| 980 | AFF2 | TUBA1C | SNX9 | KHDRBS1 | SORBS1 | RNF7 |
| 981 | TRAM2 | U2SURP | ASAP2 | ARF4 | SRGAP3 | ACTR3 |
| 982 | GRIN2A | RPL7L1 | PLCL2 | ANXA5 | DENND5B | NOP10 |
| 983 | CNTLN | DAXX | ARFIP1 | HACD3 | RNF217 | OIP5-AS1 |
| 984 | LCLAT1 | CTNNB1 | GAREM1 | PWAR5 | SHPRH | ECHS1 |
| 985 | DAAM1 | CCAR1 | TRPM7 | EIF4A3 | ARFIP1 | MRPL15 |
| 986 | SH3BGRL2 | EZR | LOC102724001 | VBP1 | PCDH11Y | PFN2 |
| 987 | EVL | ZIC5 | CEP170 | NUDCD2 | PARK2 | RNF20 |
| 988 | PIK3CB | PTTG1 | EPC1 | C6orf62 | CLOCK | MRPS16 |
| 989 | TRAK1 | TMEM258 | VGLL4 | SV2A | KCMF1 | RMND5A |
| 990 | MTAP | ARL14EPL | TRAF3IP2-AS1 | GRSF1 | DNAH11 | MRPS15 |
| 991 | KPNA1 | ATP5C1 | ZNF767P | HNRNPUL1 | PIAS2 | UQCR11 |
| 992 | DIP2B | NUP50 | AVL9 | SLC7A3 | GPM6B | TMEM14B |
| 993 | SMAD6 | WDR43 | CSMD1 | UNG | LATS2 | LRPPRC |
| 994 | ZNF277 | NRDC | SLC30A7 | DAXX | HMCN1 | CDK12 |
| 995 | XRN1 | NDUFB11 | TDRD3 | CTSC | POLQ | FGD5-AS1 |
| 996 | FOX]3 | PAIP2B | BRINP1 | PRKAR1A | ANKRD6 | DDX42 |
| 997 | SHPRH | PIM2 | POU6F2 | YARS | SEC24D | SEPT10 |
| 998 | SMURF1 | SALL3 | CUX2 | DDX27 | LOC101929563 | MAP1LC3B |
| 999 | LYPD6 | CD63 | EPHA6 | HEATR1 | POU6F2 | PTP4A1 |
| 1000 | CHD9 | TUFM | FANCC | AP2S1 | C11orf49 | STARD7 |

TABLE 17
Splice isoform annotations and differentiation outcome. Splice isoform annotations for 9 TF genes
indicating differences between isoforms and whether domains that may be important for function
are missing. The diffusion pseudotime P-values are included for each isoform. AA, amino acid.

| | | | | | Missing |
|---|---|---|---|---|---|
| | Pseudotime | Length | Splice isoform difference | | important |
| TF ORF | P-value | (AA) | relative to consensus | Important domains in consensus | domains? |
| TFORF0983-KLF5 | 8.09E−55 | 457 | Consensus | AA 324-328 interaction with | no |
| | | | | WWP1, AA 373-397 zinc finger, | |
| | | | | AA 403-427 zinc finger, AA 433- | |
| | | | | 455 zinc finger | |
| TFORF0984-KLF5 | 9.96E−46 | 366 | AA 1-91 missing | | no |
| TFORF1158- | 4.04E−01 | 705 | AA 460 insertion of 19 AA | | no |
| EOMES | | | | | |
| TFORF1159- | 2.04E−07 | 686 | Consensus | AA 276-456 DNA binding, AA | no |
| EOMES | | | | 571-686 required for | |
| | | | | transcription activation | |
| TFORF1160- | 4.64E−03 | 410 | AA 1-295 missing, AA 460 | | partially |
| EOMES | | | insertion of 19 AA | | |
| TFORF2743-T | 0.05371542 | 377 | AA 244-302 missing | | no |
| | 9 | | | | |
| TFORF2744-T | 5.37E−19 | 435 | Consensus | AA 51-219 DNA binding | no |
| TFORF1447-NR5A2 | 1.07E−07 | 469 | AA 1-72 missing | | no |
| TFORF1448-NR5A2 | 0.07477391 | 541 | Consensus | AA 83-154 DNA binding, 155-184 | no |
| | 1 | | | FTZ-F1 box, 300-539 ligand | |
| | | | | binding | |
| TFORF3131-NR5A2 | 0.00281719 | 495 | AA 22-67 missing | | no |
| | 2 | | | | |
| TFORF1513-NKX3- | 0.29313432 | 234 | Consensus | AA 124-183 DNA binding | no |
| 1 | 9 | | | | |
| TFORF1514-NKX3- | 3.93E−05 | 159 | AA 13-87 missing | | no |
| 1 | | | | | |
| TFORF1169-EBF1 | 0.00014125 | 560 | AA 162-184 missing, AA 252-259 | | partially |
| | 5 | | missing | | |
| TFORF3058-EBF1 | 0.46799205 | 591 | Consensus | AA 63-66 DNA interaction, AA | no |
| | 2 | | | 151-170 zinc finger, AA 197-204 | |
| | | | | DNA interaction, AA 236-239 | |
| | | | | DNA interaction, AA 262-345 | |
| | | | | IPT/TIG, | |
| TFORF0213-FOXP1 | 0.16910964 | 577 | AA 1-100 missing | | no |
| | 5 | | | | |
| TFORF0214-FOXP1 | 0.40157246 | 677 | Consensus | AA 306-331 Zinc finger, 348-369 | no |
| | 8 | | | leucine zipper, 382-386 CTBP1- | |
| | | | | binding, AA 465-555 DNA binding | |
| TFORF0215-FOXP1 | 0.40916766 | 676 | AA 450 missing | | no |
| | 8 | | | | |
| TFORF0216-FOXP1 | 0.46279587 | 601 | AA 95-170 missing | | no |
| TFORF0217-FOXP1 | 0.38858319 | 577 | AA 1-100 missing | | no |
| | 6 | | | | |
| TFORF0218-FOXP1 | 0.36383866 | 693 | AA 511-551 insertion | | domain |
| | 8 | | | | insertion |
| TFORF3063-FOXP1 | 0.00063486 | 114 | AA 61-114 altered, AA 115-677 | | yes |
| | | | missing | | |
| TFORF0207-FOXP2 | 0.10180136 | 432 | AA 423-432 altered, AA 433-715 | | yes |
| | 8 | | missing | | |
| TFORF0208-FOXP2 | 0.01815991 | 715 | Consensus | AA 346-371 zinc finger, AA 388- | no |
| | 5 | | | 409 leucine zipper, AA 422-426 | |
| | | | | CTBP1-binding, AA 504-594 DNA | |
| | | | | binding | |
| TFORF0209-FOXP2 | 0.02004428 | 740 | AA 86 insertion of 25 AA | | no |
| | 1 | | | | |
| TFORF0210-FOXP2 | 0.00047311 | 732 | AA 132 insertion of 17 AA | | no |
| | 3 | | | | |
| TFORF2165-GRHL3 | 2.27E−07 | 602 | AA 566-626 altered | | no |
| TFORF2166-GRHL3 | 0.03001187 | 626 | Consensus | AA 30-95 transcriptional | no |
| | 1 | | | activation, AA 226-460 DNA | |
| | | | | binding | |
| TFORF2167-GRHL3 | 0.08267995 | 607 | AA 1-6 insertion, AA 566-626 | | no |
| | 6 | | altered | | |
| TFORF2168-GRHL3 | 3.71E−05 | 556 | AA 1-46 missing, AA 566-626 | | partially |
| | | | altered | | |

TABLE 18
Cluster marker genes for differentiated cells in the TF Atlas. Cells were ordered by diffusion pseudotime relative to Cluster 0. Linear regression was applied to identify
genes that were significantly differentially expressed (FDR < 0.05) over pseudotime. The estimated slope of the linear regression fit and associated P-values are listed for each marker gene
(Each cluster is shown in the left column. The right column shows Gene 1, Slope, P-value; Gene 2, Slope, P-value; etc.).
Cluster

| | |
|---|---|
| 0 | LOC100505817, −2.4E+01, 7.6E−21; CHODL, −1.9E+01, 3.4E−09; SYT1, −1.8E+01, 1.9E−12; FGF13, −1.8E+01, 1.2E−09; LRRTM4, −1.7E+01, 5.0E−13; |
| | SEMA6A, −1.7E+01, 2.1E−15; LINC01194, −1.7E+01, 2.0E−10; LOC105377901, −1.6E+01, 1.1E−08; ABHD12B, −1.6E+01, 8.4E−11; LSAMP, −1.6E+01, |
| | 1.8E−09; TTN, −1.5E+01, 6.0E−07; SGCD, −1.5E+01, 2.6E−10; GALNT3, −1.5E+01, 3.4E−11; C9orf135, −1.5E+01, 3.4E−11; SPP1, −1.4E+01, 1.2E−08; SLC39A10, |
| | −1.4E+01, 6.0E−08; S100A10, −1.4E+01, 7.9E−10; EZR, −1.4E+01, 2.4E−07; GSTP1, −1.4E+01, 1.7E−08; KRT8, −1.4E+01, 1.0E−07; KRT18, −1.4E+01, 5.4E−07; |
| | LOC101927668, −1.3E+01, 1.4E−05; LOC105375710, −1.3E+01, 1.6E−08; BICD1, −1.3E+01, 8.6E−08; OPCML, −1.3E+01, 3.6E−06; FOXN3, −1.3E+01, 4.7E−12; |
| | JARID2, −1.3E+01, 1.0E−10; POU5F1, −1.3E+01, 3.7E−06; ST6GAL1, −1.3E+01, 1.1E−05; SKIL, −1.2E+01, 1.0E−05; L1TD1, −1.2E+01, 4.4E−12; |
| | LOC105374945, −1.2E+01, 2.0E−05; MRS2, −1.2E+01, 5.9E−06; GRID2, −1.2E+01, 2.7E−33; MDN1, −1.2E+01, 6.1E−05; RIMS2, −1.1E+01, 5.4E−07; PCAT14, |
| | −1.1E+01, 1.5E−04; RAD51B, −1.1E+01, 1.9E−04; RPSA, −1.1E+01, 1.1E−04; CACNA2D3, −1.1E+01, 2.1E−04; FGF2, −1.1E+01, 1.6E−04; PAWR, −1.1E+01, |
| | 2.1E−04; RNF220, −1.1E+01, 3.6E−04; VSIG10, −1.1E+01, 1.8E−05; LOC107987087, −1.1E+01, 1.9E−05; GRIA1, −1.1E+01, 1.1E−05; LOC102467213, |
| | −1.1E+01, 1.2E−03; IQGAP2, −1.0E+01, 2.1E−04; RESF1, −1.0E+01, 8.1E−04; PDLIM1, −1.0E+01, 3.3E−05; USO1, −1.0E+01, 6.9E−04; TMEM132D, −1.0E+01, |
| | 1.3E−03; MPPED2, −1.0E+01, 2.6E−04; ARFGEF1, −9.9E+00, 1.7E−03; TNS3, −9.8E+00, 1.1E−03; CCT3, −9.7E+00, 2.0E−03; HSPA8, −9.7E+00, 6.9E−06; |
| | LARP1, −9.7E+00, 2.6E−03; LOC101929194, −9.6E+00, 2.8E−03; OSBPL10, −9.6E+00, 2.6E−03; DPPA4, −9.6E+00, 3.6E−04; PPP1CC, −9.6E+00, 2.0E−03; |
| | DCLK1, −9.5E+00, 1.1E−03; ANKRD18CP, −9.5E+00, 1.2E−03; EIF4G3, −9.5E+00, 2.2E−03; BNC2, −9.5E+00, 1.2E−03; FLVCR1, −9.4E+00, 2.4E−03; ESRG, |
| | −9.4E+00, 1.9E−03; LOC105372310, −9.4E+00, 3.9E−03; WDHD1, −9.4E+00, 3.7E−03; VASH2, −9.3E+00, 5.3E−03; CCDC141, −9.3E+00, 2.3E−03; CD2AP, |
| | −9.3E+00, 3.3E−03; TBC1D23, −9.3E+00, 5.0E−04; G3BP1, −9.3E+00, 2.8E−03; PTAR1, −9.2E+00, 4.2E−03; LRBA, −9.2E+00, 2.8E−03; ND4L, −9.1E+00, 2.2E−03; |
| | ESRP1, −9.1E+00, 5.3E−03; TARS1, −9.0E+00, 6.5E−03; CDH13, −9.0E+00, 3.9E−04; C12orf60, −8.9E+00, 6.9E−04; RACK1, −8.9E+00, 3.9E−03; TPD52, |
| | −8.9E+00, 1.8E−03; ZNF90, −8.8E+00, 5.9E−03; TET1, −8.8E+00, 6.5E−03; TDGF1, −8.8E+00, 8.8E−03; RPL8, −8.7E+00, 3.3E−03; RYR2, −8.7E+00, 1.7E−02; |
| | JAZF1, −8.6E+00, 1.2E−02; ANXA2, −8.5E+00, 1.2E−02; ITPR2, −8.5E+00, 4.2E−03; GCNT2, −8.5E+00, 4.5E−03; ND6, −8.5E+00, 3.1E−03; TKT, −8.5E+00, |
| | 1.4E−02; PLAAT3, −8.5E+00, 1.2E−03; ZNF217, −8.4E+00, 9.3E−03; CADPS, −8.4E+00, 3.4E−03; SYNE2, −8.3E+00, 1.4E−02; MYSM1, −8.3E+00, 1.0E−02; |
| | TRIM71, −8.2E+00, 9.6E−04; CECR2, −8.2E+00, 5.8E−03; SHANK2, −8.2E+00, 2.2E−02; PCSK9, −8.2E+00, 1.6E−04; AKAP12, −8.1E+00, 2.8E−02; LINC00428, |
| | −8.1E+00, 2.1E−02; EEF1G, −8.1E+00, 2.1E−02; SERINC5, −8.1E+00, 3.6E−02; PKIB, −8.0E+00, 4.1E−02; RPS5, −8.0E+00, 2.4E−02; DNMT3B, −8.0E+00, 2.9E−04; |
| | PPARGC1A, −7.9E+00, 1.9E−02; SEMA3E, −7.9E+00, 3.2E−02; RCC2, −7.9E+00, 2.7E−02; IMMP2L, −7.9E+00, 3.4E−02; LOC107986770, −7.9E+00, 2.9E−02; |
| | STRBP, −7.9E+00, 3.8E−02; CYTB, −7.9E+00, 9.6E−07; RFX3, −7.9E+00, 3.4E−02; PRKG1, −7.9E+00, 3.9E−02; MAGI2, −7.9E+00, 4.4E−02; PPP6R3, |
| | −7.8E+00, 3.7E−02; TCF7L2, −7.8E+00, 3.2E−03; ARHGEF10, −7.8E+00, 4.3E−02; ND1, −7.8E+00, 5.2E−04; EIF4A2, −7.8E+00, 4.0E−02; PTCHD1-AS, |
| | −7.8E+00, 2.2E−02; EXT1, −7.7E+00, 4.6E−02; FOXO1, −7.7E+00, 4.8E−02; GLDC, −7.7E+00, 3.2E−03; AKAP9, −7.6E+00, 3.2E−02; RNF125, −7.6E+00, 7.6E−04; |
| | DDX5, −7.6E+00, 4.2E−02; FAM155A, −7.6E+00, 2.5E−02; IGF2R, −7.6E+00, 4.1E−02; PTMA, −7.5E+00, 5.1E−09; SLC16A1, −7.5E+00, 4.1E−02; DDX21, |
| | −7.5E+00, 4.8E−02; RIF1, −7.5E+00, 3.2E−02; CASC15, −7.4E+00, 2.9E−02; ZNF326, −7.4E+00, 1.4E−02; KIF5B, −7.4E+00, 3.9E−02; CBL, −7.4E+00, 4.4E−02; |
| | TJP2, −7.4E+00, 4.0E−02; FAM160A1, −7.3E+00, 4.4E−02; AASS, −7.2E+00, 5.6E−03; KIF5C, −7.2E+00, 2.4E−02; SLX4IP, −7.2E+00, 1.2E−02; ATP6, −7.2E+00, |
| | 1.7E−06; TPT1, −7.2E+00, 2.8E−02; COX3, −7.2E+00, 3.0E−07; PARD3B, −7.1E+00, 2.9E−02; SPG20, −7.0E+00, 4.8E−02; VRK2, −6.8E+00, 1.9E−02; ASRGL1, |
| | −6.6E+00, 2.8E−03; HSP90AA1, −6.5E+00, 2.2E−04; HNRNPU, −6.5E+00, 3.9E−02; IFITM1, −6.5E+00, 4.7E−02; HHLA1, −6.4E+00, 3.6E−02; IPMK, −6.4E+00, |
| | 4.8E−04; ARMT1, −6.4E+00, 4.7E−02; LOC107985710, −6.3E+00, 3.3E−02; LYPLAL1, −6.2E+00, 2.1E−02; C4orf51, −6.1E+00, 2.5E−02; KLF5, −5.9E+00, |
| | 1.2E−05; CCSAP, −5.8E+00, 1.1E−02; TTC39C, −5.7E+00, 4.3E−02; MT1G, −5.6E+00, 2.4E−02; F3, −5.5E+00, 9.8E−03; ZNF486, −5.5E+00, 2.2E−02; SLC25A16, |
| | −5.4E+00, 2.1E−02; NR3C2, −5.3E+00, 4.1E−02; STOM, −5.2E+00, 9.1E−03; NPM1, −5.1E+00, 1.7E−02; DOCK11, −5.1E+00, 3.5E−02; TUBB3, −5.1E+00, 4.2E−02; |
| | MIR31HG, −5.0E+00, 1.4E−02; COX2, −5.0E+00, 2.7E−02; CAVIN1, −4.8E+00, 3.9E−02; CRIP1, −4.8E+00, 5.4E−04; LOC105374827, −4.5E+00, 7.0E−03; |
| | PHKA1, −4.4E+00, 5.0E−02; BCAM, −4.3E+00, 1.8E−02; MT1H, −4.2E+00, 1.6E−02; LOC107985887, −4.2E+00, 2.1E−02; CAV1, −4.1E+00, 2.5E−03; COX1, |
| | −4.1E+00, 2.6E−03; DLL3, −4.0E+00, 2.8E−02; TRPC6, −3.5E+00, 1.9E−02; C14orf177, 9.5E−02, 1.2E−03; LOC105378566, 1.5E−01, 4.3E−03; LOC105377193, |
| | 1.6E−01, 3.9E−02; LOC107987346, 1.6E−01, 3.9E−02; LOC105377018, 1.7E−01, 2.7E−02; LOC101927606, 1.7E−01, 3.1E−03; PRR29-AS1, 1.7E−01, 3.1E−03; |
| | LOC105377355, 1.8E−01, 2.2E−03; LOC107986607, 1.8E−01, 2.2E−03; LOC100131289, 2.0E−01, 8.0E−05; INKA1, 2.0E−01, 5.0E−02; LINC00452, 2.1E−01, |
| | 4.5E−03; LOC105372169, 2.3E−01, 1.6E−04; LILRB5, 2.4E−01, 2.4E−07; LINC00479, 2.5E−01, 3.7E−02; GATA3-AS1, 2.5E−01, 3.2E−02; TP53AIP1, 2.5E−01, |
| | 3.8E−02; HOXA7, 2.5E−01, 4.6E−02; CTSLP2, 2.6E−01, 3.8E−02; LOC51145, 2.6E−01, 2.0E−02; HOXB-AS3, 2.6E−01, 2.6E−03; LINC00964, 2.7E−01, 5.4E−03; |
| | LOC105371313, 2.7E−01, 8.7E−04; LOC105374837, 2.7E−01, 1.1E−02; LOC105369740, 2.7E−01, 2.3E−03; LOC105377096, 2.7E−01, 2.3E−03; |
| | LOC107985138, 2.7E−01, 2.3E−03; LOC107986657, 2.7E−01, 2.3E−03; HOXC9, 2.7E−01, 4.5E−03; FOXL2, 2.8E−01, 3.3E−02; LINC01603, 2.8E−01, 7.2E−03; |
| | CYP2A7, 2.9E−01, 1.6E−02; LOC102725080, 2.9E−01, 2.4E−03; TH, 2.9E−01, 2.4E−03; OLR1, 2.9E−01, 2.3E−07; LOC105374689, 2.9E−01, 1.4E−02; |
| | LOC105369408, 3.0E−01, 4.3E−03; DSG4, 3.0E−01, 3.4E−03; FMR1NB, 3.0E−01, 1.8E−02; LOC105376351, 3.1E−01, 2.7E−02; LOC107984512, 3.1E−01, |
| | 3.5E−02; PCSK6-AS1, 3.1E−01, 8.6E−05; DRAIC, 3.1E−01, 1.7E−02; C15orf32, 3.2E−01, 4.8E−02; LOC105372763, 3.2E−01, 1.5E−03; FLJ32255, 3.2E−01, |
| | 4.9E−02; LOC105374937, 3.3E−01, 4.7E−02; LINC01216, 3.3E−01, 2.0E−03; PGA3, 3.3E−01, 4.5E−04; ZNF556, 3.4E−01, 4.5E−02; LOC102724900, 3.4E−01, |
| | 3.5E−03; LOC105374496, 3.4E−01, 2.6E−02; LOC105372217, 3.4E−01, 2.9E−03; LOC105372104, 3.4E−01, 5.1E−07; HOTAIRM1, 3.5E−01, 8.3E−09; |
| | LOC107985900, 3.6E−01, 1.8E−03; LOC100996263, 3.8E−01, 4.8E−04; LOC107985355, 3.8E−01, 1.5E−07; CLDND2, 3.8E−01, 2.0E−02; LOC102723763, |
| | 3.8E−01, 6.3E−03; LOC101928230, 3.8E−01, 3.5E−02; LOC105369560, 3.9E−01, 3.7E−02; LINC00331, 4.0E−01, 8.8E−06; HOXC10, 4.0E−01, 2.0E−03; |
| | LOC105379099, 4.0E−01, 4.2E−02; LOC105373426, 4.1E−01, 1.2E−09; DBX1, 4.2E−01, 3.4E−02; H4C14, 4.2E−01, 2.4E−03; HCG4B, 4.3E−01, 2.4E−03; |
| | RNF216-IT1, 4.3E−01, 2.0E−02; RSPO3, 4.3E−01, 3.0E−03; CD2, 4.3E−01, 9.1E−17; FETUB, 4.3E−01, 8.5E−05; LOC107986527, 4.4E−01, 4.7E−02; |
| | LOC101927702, 4.4E−01, 1.9E−03; MIR3140, 4.5E−01, 7.7E−03; C9orf106, 4.5E−01, 1.7E−08; LOC107984762, 4.5E−01, 1.7E−08; NEUROG2, 4.5E−01, |
| | 1.3E−08; NUTM2F, 4.5E−01, 7.6E−04; LOC107985854, 4.6E−01, 1.1E−05; TEN1-CDK3, 4.6E−01, 1.3E−08; LOC107986603, 4.6E−01, 1.0E−02; LOC101928943, |
| | 4.6E−01, 2.0E−02; LOC105375544, 4.8E−01, 9.1E−03; LOC107983949, 4.8E−01, 1.8E−05; LOC107984042, 4.8E−01, 4.7E−02; LOC105372749, 4.8E−01, |
| | 4.7E−14; LOC107985847, 5.0E−01, 4.0E−04; MMRN1, 5.0E−01, 3.9E−02; NXF2, 5.0E−01, 5.1E−07; IL33, 5.1E−01, 7.2E−10; PDCD1LG2, 5.1E−01, 1.4E−02; |
| | ZNF571-AS1, 5.2E−01, 8.7E−03; LOC101927888, 5.2E−01, 1.6E−03; FLJ40194, 5.2E−01, 2.9E−06; LOC105373283, 5.3E−01, 1.0E−03; WHAMMP3, 5.4E−01, |
| | 8.1E−03; LOC107984332, 5.4E−01, 1.8E−02; LOC105373345, 5.4E−01, 8.1E−03; GALNT15, 5.4E−01, 6.5E−04; FGF17, 5.5E−01, 8.8E−03; LOC107985770, |
| | 5.5E−01, 3.0E−02; LOC105378310, 5.6E−01, 2.5E−02; LINC00643, 5.7E−01, 1.6E−04; LOC105375369, 5.7E−01, 4.0E−06; LOC101060498, 5.7E−01, 2.3E−02; |
| | LOC101927100, 5.7E−01, 2.6E−02; LOC105370604, 5.7E−01, 3.1E−03; LOC105373636, 5.9E−01, 2.5E−02; LOC105377188, 5.9E−01, 2.6E−03; |
| | LOC107986923, 6.2E−01, 1.1E−04; LOC105378122, 6.2E−01, 2.3E−08; AMIGO2, 6.4E−01, 2.9E−02; SLC23A3, 6.6E−01, 2.2E−03; FERD3L, 6.8E−01, |
| | 1.0E−10; LOC107985934, 6.8E−01, 2.3E−03; OTX1, 6.8E−01, 2.4E−03; LOC107984339, 6.9E−01, 5.2E−05; LINC00448, 6.9E−01, 4.5E−03; LOC105375154, 6.9E−01, |
| | 2.1E−02; JMJD1C−AS1, 6.9E−01, 1.2E−02; ASIC3, 6.9E−01, 1.4E−03; LOC107984818, 6.9E−01, 2.8E−02; DKK1, 6.9E−01, 2.6E−03; SETSIP, 6.9E−01, 2.9E−03; |
| | LOC102724497, 7.0E−01, 1.9E−04; DCAF12L1, 7.2E−01, 1.7E−02; GCNT4, 7.2E−01, 1.5E−07; LOC105373270, 7.2E−01, 1.9E−02; LOC105370774, 7.5E−01, |
| | 2.1E−04; LINC00951, 7.7E−01, 1.4E−02; CDX2, 7.9E−01, 6.7E−06; CYBB, 7.9E−01, 1.3E−07; LOC105376342, 8.0E−01, 5.6E−04; MSX1, 8.0E−01, 5.6E−05; |
| | LINC01500, 8.0E−01, 2.0E−03; LOC105378358, 8.1E−01, 3.1E−02; GATD3A, 8.1E−01, 6.9E−09; LOC105375240, 8.2E−01, 1.6E−02; LOC105372653, 8.5E−01, |
| | 2.0E−05; FOXA1, 8.5E−01, 1.0E−10; LOC105374016, 8.7E−01, 2.6E−03; LOC105374220, 8.8E−01, 3.4E−03; LPL, 9.2E−01, 2.7E−03; FOXA2, 9.2E−01, |
| | 6.5E−10; SSTR1, 9.4E−01, 7.6E−04; ZFP2, 9.4E−01, 9.0E−03; LOC105370302, 9.4E−01, 7.5E−03; CEACAM1, 9.5E−01, 3.9E−02; LOC102724548, 9.6E−01, |
| | 4.4E−02; LOC102723665, 9.8E−01, 4.5E−05; NXPH3, 1.0E+00, 7.4E−03; SIX1, 1.0E+00, 5.8E−09; SPX, 1.0E+00, 1.1E−21; GPR75, 1.1E+00, 2.4E−03; ACTA2, |
| | 1.1E+00, 2.6E−03; GATA3, 1.1E+00, 6.9E−04; GRIN3B, 1.1E+00, 5.3E−03; APLNR, 1.1E+00, 2.6E−03; CER1, 1.1E+00, 5.9E−03; HAND1, 1.1E+00, 4.7E−14; |
| | ZNF205, 1.2E+00, 4.6E−02; LOC105377633, 1.2E+00, 2.4E−12; KLK10, 1.2E+00, 5.8E−03; LOC102724701, 1.2E+00, 1.8E−03; LOC100133985, 1.3E+00, |
| | 8.7E−03; DLK1, 1.3E+00, 3.1E−03; LINC00472, 1.3E+00, 4.8E−03; EOMES, 1.3E+00, 4.2E−17; SPOCK2, 1.3E+00, 1.5E−05; TNFRSF11B, 1.3E+00, 3.8E−02; |
| | LOC399815, 1.3E+00, 1.8E−03; LOC105375969, 1.4E+00, 2.8E−02; RGS14, 1.4E+00, 2.1E−02; LUM, 1.4E+00, 2.0E−14; CCDC92, 1.4E+00, 6.9E−05; SNAI2, |
| | 1.4E+00, 7.6E−05; KIAA0895, 1.4E+00, 1.1E−02; LOC102724419, 1.4E+00, 7.9E−04; LRRC7, 1.5E+00, 3.0E−02; TBX19, 1.5E+00, 4.0E−02; EGFLAM, |
| | 1.6E+00, 2.8E−02; ALPK2, 1.6E+00, 8.2E−03; LOC648987, 1.7E+00, 1.7E−02; ADAMTS9, 1.7E+00, 1.8E−02; BIVM, 1.7E+00, 9.2E−03; GREM1, 1.7E+00, |
| | 1.4E−03; TMCC2, 1.8E+00, 3.7E−02; LOC101929594, 1.9E+00, 3.0E−03; PYGO1, 1.9E+00, 2.3E−03; LOXL4, 1.9E+00, 2.7E−06; ADGRL4, 1.9E+00, 5.0E−08; |
| | CNTN5, 2.0E+00, 4.9E−02; ACTC1, 2.0E+00, 1.6E−02; RABL2B, 2.0E+00, 1.3E−02; SEMA3C, 2.2E+00, 4.2E−04; LRP2, 2.3E+00, 5.0E−03; ZEB1, 2.3E+00, |
| | 3.7E−04; TBXT, 2.5E+00, 1.0E−10; TBC1D9, 2.5E+00, 2.3E−06; MIR99AHG, 2.5E+00, 2.6E−03; MPV17L2, 2.6E+00, 1.4E−02; BMPER, 2.6E+00, 3.7E−03; |
| | DAZAP2, 2.6E+00, 2.8E−02; EDNRB, 2.7E+00, 8.6E−03; PLK2, 2.8E+00, 3.6E−03; DUSP6, 2.8E+00, 3.7E−07; PREX1, 2.8E+00, 3.4E−02; DCC, 2.9E+00, |
| | 1.8E−02; ARL2BP, 3.0E+00, 2.0E−02; EBF2, 3.0E+00, 8.2E−14; PLXNA2, 3.0E+00, 7.6E−06; AFF3, 3.0E+00, 1.5E−02; MN1, 3.0E+00, 2.1E−02; INPP4B, 3.0E+00, |
| | 2.8E−06; COL2A1, 3.1E+00, 4.6E−06; NEDD9, 3.1E+00, 9.8E−03; IGFBP5, 3.1E+00, 1.9E−06; ANTXR2, 3.1E+00, 2.9E−03; LRIG3, 3.2E+00, 4.9E−02; CDH10, |
| | 3.3E+00, 5.7E−14; DOK6, 3.4E+00, 2.0E−02; MMP2, 3.4E+00, 1.1E−04; FST, 3.4E+00, 3.5E−02; KIF26B, 3.5E+00, 1.4E−02; ITGB8, 3.5E+00, 4.2E−02; |
| | HSPA2, 3.6E+00, 1.5E−03; ZNHIT3, 3.6E+00, 2.6E−02; ACAD8, 3.6E+00, 2.1E−02; H2BC11, 3.7E+00, 4.0E−02; H4C1, 3.8E+00, 3.8E−02; ANKRD1, 3.8E+00, |
| | 4.4E−12; S100A11, 3.8E+00, 3.9E−02; PARVA, 3.9E+00, 3.4E−02; ANXA1, 4.0E+00, 1.0E−07; ZNF197, 4.0E+00, 3.4E−02; LOXL2, 4.0E+00, 7.6E−04; |
| | CRABP2, 4.2E+00, 3.8E−02; SH3BGRL3, 4.3E+00, 4.2E−02; WLS, 4.3E+00, 3.6E−14; RHOBTB3, 4.4E+00, 1.5E−07; NEXN, 4.4E+00, 1.2E−02; ZEB2, 4.5E+00, |
| | 5.7E−13; MACROH2A2, 4.5E+00, 2.4E−04; H2BC21, 4.6E+00, 2.3E−03; FAM32A, 4.7E+00, 1.9E−02; LINC00458, 4.7E+00, 8.3E−09; SLC50A1, 4.9E+00, |
| | 2.2E−05; LHFP, 4.9E+00, 1.6E−02; GPX8, 4.9E+00, 2.1E−02; FAM120B, 5.2E+00, 2.9E−02; PTPRM, 5.3E+00, 2.4E−02; MRPL52, 5.3E+00, 4.1E−02; TAF9B, |
| | 5.4E+00, 2.3E−03; PPFIBP1, 5.5E+00, 3.9E−02; H2BC17, 5.9E+00, 4.1E−05; FLRT2, 5.9E+00, 1.7E−03; SAT1, 6.0E+00, 5.8E−07; CTSV, 6.0E+00, 1.5E−02; |
| | TCEAL4, 6.1E+00, 2.7E−02; COL5A2, 6.2E+00, 3.3E−09; PKNOX2, 6.2E+00, 1.6E−07; NDUFB2, 6.4E+00, 2.4E−03; CDK6, 6.6E+00, 3.9E−02; NNAT, 6.8E+00, |
| | 1.9E−06; CD63, 7.3E+00, 3.3E−02; H3C10, 7.4E+00, 2.3E−03; ACTB, 7.6E+00, 4.3E−05; H2AC20, 8.0E+00, 3.2E−02; FSTL1, 8.4E+00, 7.5E−03; H2AC13, |
| | 8.4E+00, 8.3E−05; SEPTIN11, 8.4E+00, 3.6E−03; H4C12, 8.5E+00, 4.1E−10; VIM, 8.6E+00, 8.1E−06; GREB1L, 8.7E+00, 1.0E−06; H3C8, 8.7E+00, 1.9E−06; |
| | H2BC4, 8.7E+00, 2.0E−03; SERPINE2, 8.8E+00, 2.3E−07; H1-2, 8.8E+00, 3.2E−02; H2BC9, 8.8E+00, 1.6E−03; H2AC12, 9.0E+00, 1.5E−04; H4C3, 9.0E+00, |
| | 1.9E−02; CNTNAP2, 9.1E+00, 2.9E−03; FBN2, 9.2E+00, 4.7E−05; HAPLN1, 9.5E+00, 2.3E−26; H2AC8, 9.6E+00, 4.7E−04; HMGN1, 9.7E+00, 2.3E−03; |
| | EFNA5, 1.0E+01, 1.3E−03; H2AC11, 1.0E+01, 2.3E−04; HMGN2, 1.0E+01, 2.7E−04; NR6A1, 1.0E+01, 6.9E−04; H2AC17, 1.1E+01, 1.2E−03; NTS, 1.1E+01, |
| | 2.5E−16; H3C2, 1.1E+01, 5.6E−04; H2AC14, 1.2E+01, 1.5E−06; ID3, 1.3E+01, 4.3E−14; SLIT2, 1.3E+01, 3.8E−14; H4C5, 1.4E+01, 3.0E−08; RN7SK, 1.8E+01, |
| | 4.4E−12; PRTG, 1.8E+01, 2.7E−49 |
| 2 | LINC00428, −3.9E+01, 8.8E−23; ESRG, −3.3E+01, 2.2E−18; MME, −2.8E+01, 2.1E−09; L1TD1, −2.6E+01, 1.2E−14; GJA1, −2.5E+01, 5.8E−08; PTMA, −2.4E+01, |
| | 2.1E−20; RPSA, −2.4E+01, 2.1E−07; LOC105375710, −2.3E+01, 1.6E−14; GSTP1, −2.3E+01, 7.6E−07; PRDX1, −2.3E+01, 9.0E−07; DNMT3B, −2.1E+01, 7.1E−12; |
| | POU5F1, −2.1E+01, 9.8E−06; UQCRH, −2.1E+01, 2.6E−06; RPL8, −2.1E+01, 6.9E−06; SKIL, −2.0E+01, 2.4E−05; RPS6, −2.0E+01, 3.4E−10; RPL14, |
| | −2.0E+01, 1.3E−05; LRFN5, −2.0E+01, 4.2E−06; LOC101927668, −2.0E+01, 1.1E−03; RPL10A, −2.0E+01, 1.7E−05; RPL34, −2.0E+01, 2.5E−05; HSPD1, |
| | −1.9E+01, 1.0E−06; RPS8, −1.9E+01, 9.0E−08; RPL15, −1.9E+01, 4.0E−05; DPYSL3, −1.9E+01, 5.5E−05; HSP90AB1, −1.9E+01, 2.3E−10; RPL3, −1.9E+01, 2.6E−06; |
| | HSPA9, −1.9E+01, 6.9E−05; RPL13, −1.9E+01, 3.3E−05; RPL13A, −1.9E+01, 1.3E−07; LINC01194, −1.9E+01, 1.0E−03; CSDE1, −1.9E+01, 5.5E−05; RACK1, |
| | −1.8E+01, 2.0E−04; RPS3, −1.8E+01, 1.1E−04; SGCD, −1.8E+01, 4.8E−04; DPPA4, −1.8E+01, 2.2E−05; RPS24, −1.8E+01, 9.4E−05; HSP90AA1, −1.8E+01, 8.8E−09; |
| | RPS27A, −1.8E+01, 1.9E−04; RPL9, −1.7E+01, 6.6E−04; EEF1A1, −1.7E+01, 5.6E−09; H4C3, −1.7E+01, 4.8E−03; SPG20, −1.7E+01, 7.6E−05; RPL29, |
| | −1.7E+01, 9.6E−04; RPL11, −1.7E+01, 9.1E−05; NPM1, −1.7E+01, 5.4E−07; EEF1G, −1.7E+01, 2.4E−03; CCT3, −1.7E+01, 1.1E−03; SERBP1, −1.7E+01, 4.1E−04; |
| | GAPDH, −1.6E+01, 1.7E−05; HSPA8, −1.6E+01, 3.6E−04; RPS5, −1.6E+01, 2.1E−03; RPL23, −1.6E+01, 1.1E−03; RPS2, −1.6E+01, 2.4E−03; RPL5, −1.6E+01, |
| | 1.2E−03; FTH1, −1.6E+01, 3.2E−03; RPLPO, −1.6E+01, 2.6E−03; RPLP1, −1.6E+01, 1.3E−04; RIF1, −1.6E+01, 1.5E−03; H2AZ1, −1.6E+01, 4.4E−03; PKM, |
| | −1.6E+01, 4.6E−03; RPS15A, −1.5E+01, 5.1E−03; PABPC1, −1.5E+01, 3.2E−04; RPL37A, −1.5E+01, 5.4E−03; ADH5, −1.5E+01, 2.4E−03; CBX3, −1.5E+01, 3.9E−03; |
| | C12orf60, −1.5E+01, 1.3E−04; TUBA1B, −1.5E+01, 7.3E−03; RBPJ, −1.5E+01, 5.4E−03; RPS23, −1.5E+01, 6.3E−03; RPL26, −1.5E+01, 8.9E−03; RPS7, |
| | −1.5E+01, 8.5E−03; UBB, −1.5E+01, 9.1E−03; RPL18, −1.5E+01, 9.1E−03; PARP1, −1.5E+01, 4.5E−03; LIN28A, −1.5E+01, 2.6E−04; RPL19, −1.5E+01, 5.5E−03; |
| | TDGF1, −1.5E+01, 4.5E−03; IDO1, −1.4E+01, 2.8E−03; RPS18, −1.4E+01, 2.8E−03; RPS11, −1.4E+01, 1.5E−02; TERF1, −1.4E+01, 6.9E−03; UGP2, −1.4E+01, |
| | 1.4E−03; PA2G4, −1.4E+01, 6.3E−03; HSPA5, −1.4E+01, 2.3E−02; LOC101929194, −1.4E+01, 2.6E−02; POLR3G, −1.4E+01, 1.5E−02; H1-5, −1.4E+01, 4.5E−02; |
| | RPL10, −1.4E+01, 2.5E−02; SRSF3, −1.4E+01, 2.3E−02; LDHB, −1.4E+01, 1.4E−02; SERINC5, −1.4E+01, 2.3E−02; RPL35A, −1.3E+01, 2.6E−02; ACTB, |
| | −1.3E+01, 3.4E−04; RPS20, −1.3E+01, 3.1E−02; XPO1, −1.3E+01, 9.8E−03; RPL12, −1.3E+01, 2.9E−02; HNRNPA2B1, −1.3E+01, 9.7E−05; RPS12, −1.3E+01, |
| | 1.9E−02; EIF5B, −1.3E+01, 3.1E−02; NCL, −1.3E+01, 1.1E−03; PAPOLA, −1.3E+01, 3.1E−02; CEBPZ, −1.3E+01, 3.0E−02; RPS28, −1.3E+01, 2.3E−02; RPL4, |
| | −1.3E+01, 4.7E−03; RPL7, −1.3E+01, 3.9E−02; TPM3, −1.3E+01, 2.9E−02; RPS3A, −1.3E+01, 4.0E−02; RPL6, −1.3E+01, 2.5E−02; PEBP1, −1.3E+01, 2.6E−02; |
| | KRT8, −1.3E+01, 4.4E−03; MLEC, −1.3E+01, 2.6E−02; HNRNPK, −1.3E+01, 3.9E−02; THRAP3, −1.3E+01, 4.5E−02; COX7C, −1.3E+01, 3.2E−02; IFITM1, |
| | −1.3E+01, 5.6E−04; HSPA4, −1.3E+01, 4.6E−02; EIF4B, −1.3E+01, 4.5E−02; CD24, −1.3E+01, 6.6E−03; CANX, −1.3E+01, 2.9E−02; EID1, −1.2E+01, 2.5E−02; |
| | G3BP2, −1.2E+01, 4.5E−02; PCBP1, −1.2E+01, 4.5E−03; RPL31, −1.2E+01, 3.7E−02; ATP5PD, −1.2E+01, 1.5E−02; RPS26, −1.2E+01, 2.7E−02; HELLS, |
| | −1.2E+01, 2.4E−02; SET, −1.2E+01, 3.3E−02; MCM6, −1.2E+01, 4.2E−02; ARMT1, −1.2E+01, 1.2E−02; NEFL, −1.1E+01, 5.5E−05; PSMD12, −1.1E+01, 4.3E−02; |
| | AARS1, −1.1E+01, 4.6E−02; SHFM1, −1.1E+01, 3.9E−02; GALNT3, −1.1E+01, 2.1E−02; H4C5, −1.1E+01, 4.7E−02; TXLNG, −1.1E+01, 2.9E−02; TIMELESS, |
| | −1.0E+01, 2.1E−02; OIP5-AS1, −1.0E+01, 4.2E−02; NOL7, −9.8E+00, 4.2E−02; GAL, −9.7E+00, 4.2E−05; SLC25A5, −9.5E+00, 4.3E−02; TBC1D23, −8.8E+00, |
| | 4.5E−02; HTR2C, −8.6E+00, 2.9E−02; NME1, −7.8E+00, 2.3E−02; NDUFAF4, −6.8E+00, 2.4E−02; H2BC6, −6.7E+00, 3.1E−02; LOC107986623, −6.0E+00, |
| | 1.8E−02; HHLA1, −5.9E+00, 1.6E−03; ABHD12B, −5.4E+00, 2.6E−03; LOC107987087, −4.5E+00, 2.4E−02; LOC105373409, −4.0E+00, 4.3E−02; LINC01508, |
| | −3.4E+00, 4.9E−03; LOC107984606, 3.2E−01, 2.7E−02; MIR5190, 3.2E−01, 2.7E−02; LOC105374201, 3.3E−01, 2.6E−02; LOC107985997, 3.8E−01, 3.0E−02; |
| | R3HDML, 4.7E−01, 5.1E−03; CNGA2, 4.8E−01, 1.6E−03; CSF2RB, 4.8E−01, 1.6E−03; LOC105370739, 4.8E−01, 1.6E−03; BTF3P11, 5.0E−01, 5.8E−08; |
| | LOC101929660, 5.0E−01, 5.8E−08; LOC101930496, 5.0E−01, 5.8E−08; LOC107983993, 5.0E−01, 5.8E−08; LOC105373417, 5.5E−01, 6.2E−05; GBP2, 5.7E−01, |
| | 1.4E−03; H2BP1, 5.7E−01, 1.4E−03; LOC107984590, 5.7E−01, 2.4E−02; AKR1C4, 5.8E−01, 4.1E−04; STRA8, 6.9E−01, 1.0E−03; LOC84214, 7.1E−01, 2.6E−04; |
| | KBTBD11-OT1, 7.2E−01, 5.8E−03; PTGER1, 7.4E−01, 5.6E−03; LOC105373654, 7.5E−01, 2.8E−02; CPB2, 7.5E−01, 6.4E−03; HTN1, 7.8E−01, 1.4E−03; |
| | SLC26A1, 7.8E−01, 2.9E−02; GOS2, 7.9E−01, 4.6E−03; HLA-H, 8.0E−01, 1.3E−05; LCE1A, 8.0E−01, 1.3E−05; LINC00377, 8.0E−01, 1.3E−05; LOC400627, 8.2E−01, |
| | 2.5E−02; LOC105371532, 8.3E−01, 1.0E−03; LOC105372088, 8.4E−01, 3.4E−02; ITGB2, 8.5E−01, 3.0E−03; LOC105369734, 8.7E−01, 1.6E−04; |
| | LOC105374595, 8.8E−01, 3.2E−02; CRTAM, 9.0E−01, 1.0E−02; LOC101929951, 9.1E−01, 1.1E−02; SLC22A8, 9.1E−01, 2.6E−03; LOC107987020, 9.2E−01, |
| | 3.4E−02; LOC107984512, 9.3E−01, 1.1E−02; LOC105377477, 9.8E−01, 1.1E−02; NR2F2, 9.9E−01, 5.0E−02; LOC107984502, 1.0E+00, 1.1E−06; COL3A1, |
| | 1.1E+00, 1.4E−02; LINC01590, 1.1E+00, 1.4E−03; TGM1, 1.1E+00, 2.6E−02; LOC105376345, 1.1E+00, 6.2E−05; LOC107986263, 1.2E+00, 8.8E−09; |
| | LINC01135, 1.2E+00, 8.2E−03; DIAPH3-AS1, 1.2E+00, 4.8E−03; LOC105375130, 1.3E+00, 1.3E−02; LOC102723468, 1.4E+00, 2.1E−02; TFF3, 1.4E+00, |
| | 4.7E−02; LOC105378480, 1.5E+00, 2.3E−05; LOC105374709, 1.5E+00, 1.6E−02; GATA3, 1.6E+00, 1.7E−02; LOC105369745, 1.8E+00, 3.9E−03; MTHFS, |
| | 2.0E+00, 7.9E−03; LOXL4, 2.0E+00, 3.2E−02; CALHM2, 2.0E+00, 1.7E−02; ANKRD19P, 2.1E+00, 4.6E−02; DEFB1, 2.1E+00, 1.4E−10; LOC729603, 2.2E+00, |
| | 4.7E−02; PCDHGB6, 2.2E+00, 3.2E−02; LOC107983979, 2.2E+00, 2.4E−02; LOC105370534, 2.2E+00, 3.8E−23; COL11A2, 2.2E+00, 8.0E−04; MIR186, |
| | 2.3E+00, 1.9E−10; COX7B2, 2.3E+00, 1.8E−06; LOC101929584, 2.3E+00, 1.6E−14; SSC5D, 2.3E+00, 4.3E−02; LOC105371092, 2.4E+00, 1.0E−04; |
| | LOC101928509, 2.4E+00, 8.1E−11; PLA2G15, 2.4E+00, 1.8E−03; PCDH20, 2.4E+00, 1.9E−10; TNMD, 2.4E+00, 1.1E−02; LINC00877, 2.4E+00, 1.5E−03; |
| | BC01, 2.4E+00, 2.1E−14; LOC101927701, 2.5E+00, 1.5E−83; LOC102725227, 2.5E+00, 7.7E−11; UGT2B15, 2.5E+00, 5.3E−82; PHEX, 2.5E+00, 4.8E−03; |
| | HSD17B2, 2.5E+00, 1.1E−02; FGA, 2.5E+00, 5.1E−155; IL17F, 2.5E+00, 5.1E−155; PRADC1, 2.5E+00, 2.4E−05; HNF1B, 2.5E+00, 2.7E−09; LOC102723557, |
| | 2.5E+00, 2.4E−02; NYAP1, 2.5E+00, 1.2E−03; SNORD45B, 2.5E+00, 2.2E−10; LOC107985275, 2.6E+00, 1.8E−02; LINC01600, 2.6E+00, 2.9E−06; MIR579, |
| | 2.6E+00, 1.6E−92; HSD11B2, 2.6E+00, 1.6E−02; HIGD1B, 2.6E+00, 3.6E−15; LOC105377596, 2.7E+00, 5.8E−03; AGAP5, 2.7E+00, 3.1E−02; ANKRD1, |
| | 2.7E+00, 1.3E−02; LOC105378780, 2.7E+00, 1.2E−46; MGAM, 2.7E+00, 2.1E−10; LOC101929007, 2.7E+00, 1.7E−02; CDC37L1-AS1, 2.7E+00, 3.5E−14; |
| | PARP12, 2.8E+00, 4.4E−03; RIMBP2, 2.8E+00, 2.4E−02; SPDYE16, 2.8E+00, 2.0E−47; HOGA1, 2.9E+00, 1.7E−04; LOC105376287, 2.9E+00, 3.6E−03; |
| | LOC105370532, 2.9E+00, 3.9E−03; LOC105377100, 2.9E+00, 4.0E−16; MYLK4, 2.9E+00, 4.5E−09; KRT7, 2.9E+00, 2.6E−02; S100A6, 2.9E+00, 2.0E−03; |
| | ZEB1, 2.9E+00, 2.7E−02; LOC107986431, 2.9E+00, 3.6E−08; LOC107985343, 3.0E+00, 2.5E−02; STEAP1, 3.0E+00, 2.3E−02; CARD10, 3.0E+00, 2.0E−04; |
| | LOC107987122, 3.0E+00, 4.6E−04; OGN, 3.0E+00, 2.0E−02; LOC105375846, 3.1E+00, 2.3E−29; FANK1, 3.2E+00, 4.3E−02; ARHGAP25, 3.2E+00, 3.0E−02; |
| | SHISA2, 3.2E+00, 2.6E−02; SAP30, 3.2E+00, 2.3E−04; NKAPP1, 3.2E+00, 2.4E−02; DNAJC25, 3.2E+00, 1.3E−02; ZNF446, 3.2E+00, 5.1E−04; |
| | LOC105373146, 3.3E+00, 4.6E−03; PCDH19, 3.3E+00, 8.7E−06; LOC105371416, 3.4E+00, 2.7E−08; NELL1, 3.4E+00, 3.6E−02; APOB, 3.5E+00, 2.2E−08; |
| | SOX6, 3.6E+00, 2.9E−03; TMEM175, 3.6E+00, 9.0E−05; C1orf216, 3.7E+00, 8.6E−03; TRIM54, 3.7E+00, 2.4E−03; PWRN1, 3.7E+00, 4.5E−04; FGF17, |
| | 3.8E+00, 2.3E−70; RADIL, 3.8E+00, 2.6E−02; CYB5D2, 3.9E+00, 1.4E−02; LOC105378071, 4.0E+00, 1.2E−04; SLC8B1, 4.0E+00, 4.3E−02; USP51, 4.1E+00, |
| | 4.2E−02; PUS10, 4.3E+00, 4.2E−02; HPSE2, 4.3E+00, 1.9E−02; RFXANK, 4.3E+00, 2.9E−02; LOC102724810, 4.4E+00, 3.5E−02; GALNT16, 4.5E+00, 4.9E−02; |
| | IPP, 4.5E+00, 3.0E−02; ATP1A3, 4.7E+00, 1.2E−02; SYTL5, 4.7E+00, 1.0E−02; PAX7, 4.9E+00, 1.3E−04; LRTOMT, 5.1E+00, 3.9E−03; SULF1, 5.1E+00, |
| | 3.4E−03; GLIS3, 5.2E+00, 1.2E−06; SLC39A8, 5.2E+00, 2.9E−03; ZEB2, 5.6E+00, 7.3E−07; ARNTL, 5.7E+00, 1.1E−02; LINC01089, 5.7E+00, 3.3E−02; |
| | LRP1B, 5.8E+00, 2.4E−02; DENND1B, 5.9E+00, 4.3E−02; SF3A2, 6.0E+00, 2.6E−02; LOC102724623, 6.0E+00, 6.8E−03; UNC5C, 6.1E+00, 1.1E−03; RNPC3, |
| | 6.2E+00, 3.4E−02; PLEKHG1, 6.2E+00, 2.4E−02; KCNIP4-IT1, 6.2E+00, 3.5E−04; DPYD, 6.4E+00, 6.9E−07; MEGF6, 6.6E+00, 8.4E−03; LOC107984805, |
| | 6.6E+00, 3.1E−02; DSCAML1, 6.6E+00, 4.1E−02; BCL7A, 6.6E+00, 1.9E−02; RNLS, 7.2E+00, 2.4E−02; PKNOX2, 7.2E+00, 1.8E−03; CITED2, 7.2E+00, 3.3E−02; |
| | DCC, 7.2E+00, 2.0E−04; ZFHX4, 7.4E+00, 1.7E−05; SAMD4A, 7.6E+00, 2.5E−02; SH3YL1, 7.6E+00, 8.5E−03; TBC1D19, 8.0E+00, 3.3E−02; SIL1, |
| | 8.0E+00, 3.5E−03; BMPER, 8.0E+00, 6.5E−05; TLE3, 8.0E+00, 4.3E−02; ARID5B, 8.0E+00, 3.3E−02; BMPR1B, 8.2E+00, 4.8E−03; OSBPL3, 8.5E+00, 2.5E−02; |
| | LOC105378308, 8.5E+00, 1.4E−05; PCDH15, 8.7E+00, 4.4E−03; GRIK2, 8.9E+00, 1.1E−02; LINC00278, 8.9E+00, 2.0E−10; EFNB2, 9.0E+00, 1.4E−04; |
| | EPHA4, 9.1E+00, 2.5E−02; ID4, 9.3E+00, 4.8E−03; CDH2, 9.3E+00, 2.7E−02; IKZF2, 9.3E+00, 2.5E−02; CDH11, 9.5E+00, 2.1E−03; TANC2, 9.5E+00, |
| | 1.6E−02; STXBP5L, 9.7E+00, 2.5E−02; SRGAP1, 9.7E+00, 1.3E−02; EPHB1, 9.7E+00, 8.9E−04; HDAC9, 9.8E+00, 4.3E−02; FRY, 9.8E+00, 1.8E−02; PLAG1, |
| | 9.9E+00, 2.4E−03; IGSF11, 9.9E+00, 1.9E−02; COL4A6, 1.0E+01, 1.9E−02; CDH6, 1.0E+01, 1.1E−03; TTC3, 1.0E+01, 3.6E−02; CADM2, 1.0E+01, 3.8E−02; |
| | DAAM1, 1.0E+01, 3.6E−02; LOC102723568, 1.0E+01, 4.7E−02; AHNAK, 1.0E+01, 1.8E−03; RIMS2, 1.1E+01, 2.9E−02; WIPF2, 1.1E+01, 2.6E−03; ABCA1, |
| | 1.1E+01, 4.2E−02; SNX25, 1.1E+01, 4.3E−02; MLLT3, 1.1E+01, 1.5E−03; MYOF, 1.1E+01, 5.3E−04; MTCL1, 1.1E+01, 2.3E−02; MEMO1, 1.1E+01, 2.3E−02; |
| | ASPH, 1.1E+01, 2.9E−02; NTRK3, 1.1E+01, 8.1E−03; CDK8, 1.1E+01, 4.7E−02; PTPRM, 1.1E+01, 1.6E−03; CNTN5, 1.1E+01, 9.2E−06; UNC5D, 1.2E+01, |
| | 2.3E−02; SORBS2, 1.2E+01, 2.3E−02; PPP2R3A, 1.2E+01, 4.1E−02; RELCH, 1.2E+01, 1.8E−02; DIP2C, 1.2E+01, 3.0E−02; DST, 1.2E+01, 2.6E−02; CADPS, |
| | 1.2E+01, 2.5E−02; DYNC2H1, 1.2E+01, 4.7E−02; XKR4, 1.2E+01, 6.8E−03; ZNF407, 1.2E+01, 8.8E−03; CTDSPL2, 1.2E+01, 1.4E−02; CDK14, 1.2E+01, |
| | 1.6E−03; HAPLN1, 1.2E+01, 6.9E−05; LMO3, 1.2E+01, 4.0E−07; ARHGAP10, 1.2E+01, 4.1E−04; CHKA, 1.2E+01, 2.8E−02; MAPK8, 1.2E+01, 4.0E−02; GTDC1, |
| | 1.2E+01, 1.2E−02; GLI3, 1.3E+01, 1.8E−03; DENND1A, 1.3E+01, 2.3E−02; PBX1, 1.3E+01, 2.8E−04; GPATCH2, 1.3E+01, 1.1E−02; TBCK, 1.3E+01, 2.2E−02; |
| | ALCAM, 1.3E+01, 2.6E−02; ARID1B, 1.3E+01, 1.6E−02; ANKDD1A, 1.3E+01, 3.4E−03; C8orf34, 1.3E+01, 2.1E−03; LOC100288798, 1.3E+01, 8.3E−03; |
| | MAGI1, 1.3E+01, 8.7E−03; SOX5, 1.3E+01, 2.6E−02; PALLD, 1.3E+01, 2.0E−03; RBM26, 1.3E+01, 3.0E−02; THRB, 1.3E+01, 8.7E−03; BASP1, 1.3E+01, |
| | 1.1E−02; TCF7L2, 1.3E+01, 2.4E−03; TOX, 1.3E+01, 2.1E−02; CDYL, 1.3E+01, 4.7E−02; BCKDHB, 1.3E+01, 3.9E−02; PGAP1, 1.3E+01, 6.8E−03; MNAT1, 1.3E+01, |
| | 2.6E−02; BCAS3, 1.3E+01, 2.7E−02; ZNF521, 1.3E+01, 1.5E−03; NLGN4Y, 1.3E+01, 4.9E−02; ADNP, 1.3E+01, 2.7E−02; PPP1R9A, 1.3E+01, 2.8E−02; PLD5, |
| | 1.3E+01, 6.9E−03; FRAS1, 1.3E+01, 1.0E−02; PTPRJ, 1.3E+01, 5.6E−03; ROBO1, 1.4E+01, 2.9E−02; FIGN, 1.4E+01, 2.5E−02; CHD7, 1.4E+01, 1.2E−02; |
| | KCNQ10T1, 1.4E+01, 3.3E−02; DCBLD2, 1.4E+01, 8.4E−03; KMT2C, 1.4E+01, 2.5E−02; KCNN2, 1.4E+01, 1.9E−03; SIPA1L1, 1.4E+01, 2.3E−02; DPP10, |
| | 1.4E+01, 2.1E−02; KCNT2, 1.4E+01, 2.4E−02; ITGB8, 1.4E+01, 8.0E−04; NEBL, 1.4E+01, 5.5E−04; CTNND2, 1.4E+01, 2.2E−02; CHD9, 1.4E+01, 1.6E−02; |
| | RABGAP1, 1.4E+01, 6.9E−03; AKAP13, 1.4E+01, 1.3E−02; ZNF608, 1.4E+01, 8.4E−03; UBE2E2, 1.4E+01, 1.5E−02; XKR6, 1.4E+01, 4.5E−03; COL4A5, |
| | 1.5E+01, 1.1E−02; CDH12, 1.5E+01, 4.0E−06; NRIP1, 1.5E+01, 6.9E−07; EPB41L4A, 1.5E+01, 1.8E−04; ZFAND3, 1.5E+01, 1.1E−02; MCC, 1.5E+01, |
| | 1.8E−03; TENM4, 1.5E+01, 2.4E−03; LOC107986770, 1.5E+01, 8.4E−03; ADGRB3, 1.5E+01, 2.5E−03; SMYD3, 1.5E+01, 8.1E−03; PRIM2, 1.5E+01, 6.8E−03; |
| | FBN2, 1.5E+01, 3.3E−09; FHIT, 1.5E+01, 8.4E−03; TENM2, 1.5E+01, 4.4E−03; EFNA5, 1.5E+01, 6.3E−03; NCOA1, 1.5E+01, 6.6E−03; NEAT1, 1.5E+01, |
| | 1.2E−02; COBL, 1.6E+01, 3.9E−03; COL11A1, 1.6E+01, 3.9E−03; NFIB, 1.6E+01, 3.0E−03; TRPM3, 1.6E+01, 5.8E−03; MALAT1, 1.6E+01, 3.1E−15; MBD5, |
| | 1.6E+01, 4.0E−03; RBFOX1, 1.6E+01, 3.5E−03; GRIP1, 1.6E+01, 9.6E−04; TBL1X, 1.7E+01, 8.6E−04; CMIP, 1.7E+01, 1.2E−03; CBLB, 1.7E+01, 3.9E−04; |
| | CADPS2, 1.7E+01, 1.0E−03; ST6GALNAC5, 1.7E+01, 3.3E−05; ZC3H12B, 1.7E+01, 1.4E−03; FBXL17, 1.7E+01, 3.8E−05; CACNA2D1, 1.7E+01, 1.2E−03; |
| | NECTIN3, 1.7E+01, 6.3E−04; MAPK10, 1.8E+01, 1.7E−05; RNF130, 1.8E+01, 1.7E−04; MAGI2, 1.8E+01, 2.4E−04; NRCAM, 1.9E+01, 3.2E−06; PRTG, |
| | 1.9E+01, 9.8E−22; LOC102724392, 1.9E+01, 8.2E−11; LOC101928437, 1.9E+01, 4.2E−08; GREB1L, 2.0E+01, 2.7E−11; KLF12, 2.0E+01, 3.8E−05; CNTN4, |
| | 2.0E+01, 2.7E−05; MACROD2, 2.0E+01, 3.0E−05; DACH1, 2.0E+01, 1.3E−09; PCDH7, 2.0E+01, 3.8E−05; WWOX, 2.1E+01, 6.0E−06; PTPRD, 2.1E+01, |
| | 1.2E−05; PRKG1, 2.1E+01, 2.1E−05; ERBB4, 2.2E+01, 7.5E−10; SSBP2, 2.2E+01, 2.1E−06; SOX2-OT, 2.2E+01, 5.0E−06; NRXN3, 2.4E+01, 3.9E−07; CDH9, |
| | 2.4E+01, 1.5E−09; CTNNA2, 3.6E+01, 2.7E−15; IL1RAPL1, 3.7E+01, 1.7E−12; KCNIP4, 5.4E+01, 5.7E−24; |
| 1 | SHISA9, −1.8E+01, 1.9E−24; MAGI2, −1.4E+01, 4.5E−15; GRID2, −1.4E+01, 2.2E−63; CD24, −1.3E+01, 4.3E−21; TOX, −1.3E+01, 5.3E−14; MGAT4C, −1.3E+01, |
| | 2.4E−13; FOXO1, −1.2E+01, 1.2E−11; PLPP1, −1.1E+01, 5.7E−11; ESRG, −1.1E+01, 7.1E−11; ANKRD18CP, −1.1E+01, 3.7E−10; AASS, −1.1E+01, 2.2E−13; |
| | DNMT3B, −1.1E+01, 1.3E−13; BNC2, −1.0E+01, 1.7E−09; SORBS2, −1.0E+01, 2.4E−09; NPFFR2, −1.0E+01, 3.2E−30; FLT1, −1.0E+01, 3.7E−10; AP1S2, |
| | −9.9E+00, 1.4E−08; UGP2, −9.6E+00, 3.3E−09; POU5F1, −9.5E+00, 3.7E−08; USP44, −9.5E+00, 2.6E−08; USP9X, −9.5E+00, 7.9E−14; CDH1, −9.5E+00, 3.9E−08; |
| | LINC01194, −9.4E+00, 2.4E−08; PODXL, −9.2E+00, 1.0E−08; LOC107986777, −9.0E+00, 2.0E−08; KIAA0825, −9.0E+00, 4.5E−06; PLS3, −8.8E+00, |
| | 1.4E−06; JARID2, −8.4E+00, 2.3E−08; SYN3, −8.3E+00, 2.0E−06; POLR3G, −8.1E+00, 8.1E−07; CSMD2, −7.9E+00, 2.4E−05; RABGAP1L, −7.6E+00, 3.4E−06; |
| | GALNT17, −7.6E+00, 4.8E−05; RPS2, −7.5E+00, 1.2E−04; DAB1, −7.4E+00, 7.8E−05; LDB2, −7.4E+00, 1.2E−04; ESRP1, −7.3E+00, 3.9E−05; CNTN1, −7.1E+00, |
| | 9.4E−08; GNPTAB, −7.0E+00, 1.3E−05; OSBPL10, −7.0E+00, 1.8E−04; DPPA4, −7.0E+00, 2.2E−04; LMO3, −6.9E+00, 8.9E−09; GABRB3, −6.7E+00, 6.9E−04; |
| | MFGE8, −6.7E+00, 8.7E−04; LIN28A, −6.7E+00, 2.2E−06; LOC101929194, −6.7E+00, 5.6E−06; FAU, −6.6E+00, 7.4E−04; L1TD1, −6.6E+00, 2.6E−05; RBPJ, |
| | −6.5E+00, 1.3E−03; DPYSL3, −6.3E+00, 2.2E−03; TARS1, −6.3E+00, 2.4E−03; PTMA, −6.2E+00, 3.9E−08; LOC107985661, −6.2E+00, 6.4E−05; EEF1A1, |
| | −6.2E+00, 2.9E−09; APELA, −6.2E+00, 2.6E−03; RPS11, −6.0E+00, 5.3E−03; TERF1, −6.0E+00, 1.7E−03; FGF12, −5.9E+00, 3.6E−04; ND4, −5.9E+00, 3.1E−19; |
| | SERBP1, −5.8E+00, 2.0E−03; NLGN4X, −5.8E+00, 1.2E−02; LOC107986324, −5.8E+00, 1.7E−07; SLC24A2, −5.7E+00, 4.3E−04; EZR, −5.6E+00, 5.5E−03; |
| | USO1, −5.5E+00, 1.1E−02; CTSC, −5.5E+00, 9.2E−03; ND3, −5.5E+00, 9.3E−03; RPL15, −5.5E+00, 9.4E−03; SEPHS1, −5.5E+00, 6.8E−03; CGNL1, −5.4E+00, |
| | 4.7E−03; LOC729732, −5.4E+00, 1.7E−02; RPS8, −5.4E+00, 4.7E−04; SLC16A1, −5.4E+00, 1.8E−02; DIAPH2, −5.4E+00, 2.3E−02; RPL13A, −5.4E+00, 5.7E−04; |
| | TRIM71, −5.4E+00, 2.0E−03; RPL18, −5.3E+00, 1.5E−02; VWDE, −5.3E+00, 5.9E−04; NR3C1, −5.3E+00, 3.4E−06; PHF21B, −5.3E+00, 2.2E−02; LRRTM4, |
| | −5.3E+00, 3.2E−02; NPM1, −5.3E+00, 2.0E−04; IDO1, −5.2E+00, 1.0E−04; RPL12, −5.2E+00, 1.9E−02; TSSC2, −5.2E+00, 7.2E−03; PRKCA, −5.2E+00, 1.3E−02; |
| | GPR176, −5.2E+00, 2.5E−02; TMEM132D, −5.1E+00, 4.9E−02; ND4L, −5.1E+00, 4.1E−02; CDH9, −5.1E+00, 8.4E−03; HSPD1, −5.0E+00, 1.0E−02; RPSA, |
| | −5.0E+00, 4.4E−02; RPS7, −5.0E+00, 3.8E−02; TFRC, −5.0E+00, 5.7E−03; TNRC6A, −5.0E+00, 3.0E−02; COX3, −4.9E+00, 2.3E−06; ADGRV1, −4.9E+00, 4.1E−02; |
| | RRAS2, −4.9E+00, 3.4E−02; RPS27A, −4.9E+00, 3.4E−02; IGF2BP3, −4.8E+00, 2.3E−02; CYTB, −4.8E+00, 1.0E−04; ZNF770, −4.8E+00, 1.2E−02; GRB10, |
| | −4.8E+00, 1.5E−02; PBX1, −4.8E+00, 2.7E−03; RPLP1, −4.7E+00, 8.8E−03; ATP6, −4.7E+00, 4.8E−05; BCL11A, −4.7E+00, 2.6E−02; VASH2, −4.7E+00, 2.6E−02; |
| | BEND3, −4.7E+00, 4.8E−03; HSP90AA1, −4.7E+00, 9.6E−04; RPL3, −4.6E+00, 2.4E−02; ND2, −4.6E+00, 4.3E−03; CNMD, −4.6E+00, 3.8E−02; RPS24, |
| | −4.6E+00, 4.2E−02; RPS18, −4.6E+00, 3.9E−02; TRPS1, −4.5E+00, 1.3E−02; NASP, −4.5E+00, 2.6E−02; SIRT1, −4.5E+00, 1.4E−02; CDKL5, −4.4E+00, 2.7E−02; |
| | TRPC4, −4.4E+00, 1.8E−02; C1GALT1, −4.3E+00, 4.7E−02; MAD2L2, −4.3E+00, 2.7E−03; NCL, −4.2E+00, 1.5E−02; SERPINB9, −4.1E+00, 1.1E−02; SLC1A3, |
| | −3.8E+00, 5.4E−05; CDCA7L, −3.8E+00, 3.9E−02; SLC16A12, −3.8E+00, 8.8E−07; GRTP1, −3.7E+00, 2.4E−02; GLB1L3, −3.7E+00, 3.4E−04; C5orf46, −3.6E+00, |
| | 7.4E−04; COX1, −3.6E+00, 9.2E−06; TMEM64, −3.5E+00, 4.7E−02; LRAT, −3.4E+00, 5.3E−05; VAV3, −3.4E+00, 2.8E−02; S100A10, −3.3E+00, 8.4E−03; TRDN, |
| | −3.2E+00, 3.3E−02; CAPN1, −3.0E+00, 2.4E−02; LOC101926942, −3.0E+00, 7.3E−03; LRMDA, −3.0E+00, 1.5E−02; LINC01098, −3.0E+00, 2.7E−07; SLC25A4, |
| | −2.8E+00, 4.8E−03; NIBAN1, −2.7E+00, 1.1E−02; LOC105369165, −2.6E+00, 4.7E−05; CYP26A1, −2.5E+00, 3.4E−03; HLA-DPB2, −2.4E+00, 2.6E−02; |
| | LOC107985887, −2.4E+00, 7.4E−03; CA8, −2.1E+00, 7.5E−03; LOC105375014, −2.1E+00, 1.9E−02; TMEM220-AS1, −2.1E+00, 1.1E−02; SPINT1, −2.1E+00, |
| | 3.7E−02; TPRA1, −2.1E+00, 1.7E−05; PRLR, −2.0E+00, 2.2E−02; NPY1R, −2.0E+00, 1.3E−02; RIPPLY3, −1.9E+00, 1.5E−04; BHLHE40, −1.8E+00, 4.4E−02; |
| | DPPA3, −1.5E+00, 1.7E−07; ERVH48−1, −1.4E+00, 3.4E−02; LOC107985647, −1.3E+00, 1.9E−02; OSMR, −1.1E+00, 4.9E−02; LOC100505817, −1.1E+00, |
| | 3.6E−02; LOC107985167, −1.1E+00, 4.3E−02; XKR7, −8.4E−01, 4.7E−02; LAT, −6.7E−01, 4.3E−04; LOC105370956, −3.8E−01, 3.7E−02; LINC00898, |
| | −9.9E−02, 2.6E−02; LOC107985849, 1.7E−01, 3.2E−05; LOC105378776, 2.1E−01, 1.0E−02; ZXDA, 2.4E−01, 4.5E−02; LINC01451, 2.9E−01, 2.7E−07; |
| | LOC105379289, 3.1E−01, 2.5E−03; LOC105377978, 3.2E−01, 4.6E−02; LOC105375410, 3.2E−01, 1.5E−02; PANCR, 3.3E−01, 1.6E−02; LOC105374474, |
| | 3.3E−01, 3.6E−03; LOC101929019, 3.7E−01, 7.0E−03; GPR85, 3.9E−01, 5.8E−03; XCL2, 4.1E−01, 1.6E−02; AKR7L, 4.2E−01, 2.4E−02; LOC107986445, 4.5E−01, |
| | 3.7E−02; TBX3, 4.7E−01, 1.7E−02; RSPO3, 5.9E−01, 4.6E−02; RBM24, 6.2E−01, 4.4E−02; GUCA1B, 7.3E−01, 1.9E−02; PITX2, 7.3E−01, 4.5E−02; SKAP1, |
| | 7.5E−01, 2.2E−02; LOC107987271, 7.7E−01, 3.6E−02; LINC00609, 7.7E−01, 1.6E−02; FAS, 8.9E−01, 1.2E−02; ANKRD45, 9.3E−01, 2.1E−02; ATOH8, 9.8E−01, |
| | 2.7E−04; DKK1, 1.0E+00, 1.5E−04; STON1−GTF2A1L, 1.0E+00, 3.4E−02; LOC107984427, 1.0E+00, 3.4E−02; TNNT2, 1.0E+00, 4.0E−02; THNSL2, |
| | 1.1E+00, 3.2E−02; PAX6, 1.1E+00, 2.8E−02; COL28A1, 1.1E+00, 5.3E−03; OSCAR, 1.1E+00, 7.9E−03; POU3F2, 1.1E+00, 4.2E−04; EPHA2, 1.2E+00, |
| | 1.0E−02; GATA2, 1.2E+00, 8.2E−04; GRHL1, 1.2E+00, 3.9E−02; MDGA1, 1.2E+00, 1.3E−03; LOC105374057, 1.2E+00, 9.3E−03; BCHE, 1.3E+00, 1.4E−02; |
| | C4orf22, 1.3E+00, 2.7E−03; APLNR, 1.3E+00, 4.6E−04; TTC6, 1.4E+00, 4.0E−03; LRRC9, 1.4E+00, 4.1E−02; NGFR, 1.4E+00, 4.1E−03; DIO2, 1.4E+00, |
| | 1.8E−05; LOC102724227, 1.5E+00, 3.0E−02; LOC105370302, 1.5E+00, 5.0E−06; LRRN3, 1.5E+00, 3.3E−02; DNAH6, 1.5E+00, 2.3E−02; LOC107984112, |
| | 1.5E+00, 4.1E−02; BMP5, 1.5E+00, 4.5E−03; DLX6, 1.6E+00, 3.8E−06; BICC1, 1.6E+00, 3.0E−02; TNFRSF11B, 1.6E+00, 2.7E−02; DLX6-AS1, 1.6E+00, |
| | 1.3E−06; GATA3, 1.6E+00, 9.2E−04; LOC100130502, 1.6E+00, 5.1E−04; LOC102723436, 1.6E+00, 2.2E−03; LEF1, 1.6E+00, 1.7E−02; CCDC146, 1.6E+00, 2.0E−02; |
| | SCD5, 1.6E+00, 9.4E−03; ZNF664−FAM101A, 1.7E+00, 3.0E−02; LOC107984063, 1.7E+00, 4.5E−02; LINC00869, 1.7E+00, 1.0E−02; TLL1, 1.8E+00, |
| | 8.7E−04; LOC100506885, 1.8E+00, 9.6E−03; MFAP4, 1.8E+00, 8.1E−05; HRK, 1.8E+00, 2.4E−02; LOC105374056, 1.8E+00, 5.1E−04; RGS16, 1.8E+00, |
| | 5.3E−03; CCDC92, 1.9E+00, 2.2E−05; RASGEF1B, 1.9E+00, 3.0E−02; PLPP4, 1.9E+00, 2.0E−04; SYTL5, 1.9E+00, 1.3E−02; GLIS1, 1.9E+00, 8.5E−03; NEK10, |
| | 1.9E+00, 2.1E−02; MANEA, 1.9E+00, 4.1E−02; TCHP, 1.9E+00, 5.5E−03; DLX5, 2.0E+00, 1.6E−05; YPEL4, 2.0E+00, 1.5E−02; BGN, 2.0E+00, 2.2E−05; |
| | GPRIN3, 2.0E+00, 2.4E−02; LOC105378305, 2.0E+00, 1.6E−05; ASXL3, 2.0E+00, 6.9E−04; CPXM1, 2.0E+00, 1.3E−02; NOVA1-AS1, 2.1E+00, 1.3E−02; |
| | HPSE2, 2.1E+00, 4.0E−02; PHC2, 2.1E+00, 9.1E−03; LRRC3B, 2.1E+00, 6.6E−03; DLL3, 2.1E+00, 3.6E−06; FGF14, 2.1E+00, 1.3E−02; LOC107986641, |
| | 2.1E+00, 3.6E−02; LHX5-AS1, 2.1E+00, 3.0E−03; D21S2088E, 2.1E+00, 6.0E−06; LOC101929468, 2.1E+00, 1.8E−02; HIST1H2BM, 2.1E+00, 5.0E−02; |
| | CXXC4, 2.2E+00, 2.7E−03; SMAD7, 2.2E+00, 4.0E−02; SUSD6, 2.2E+00, 1.8E−02; LYRM1, 2.2E+00, 2.5E−03; LRRC34, 2.2E+00, 4.9E−04; MYBL1, 2.2E+00, |
| | 9.2E−03; LINC00290, 2.2E+00, 4.1E−02; PXDNL, 2.3E+00, 9.7E−03; HIST1H4B, 2.3E+00, 6.4E−03; COL5A2, 2.3E+00, 4.9E−02; CFAP44, 2.3E+00, 1.1E−03; |
| | NCKAP5, 2.4E+00, 4.0E−02; IGSF11, 2.4E+00, 2.0E−02; KAT2B, 2.4E+00, 1.4E−03; MMP2, 2.4E+00, 1.2E−02; DGKB, 2.4E+00, 1.9E−03; CCDC102B, |
| | 2.4E+00, 7.4E−03; MAF, 2.4E+00, 1.7E−02; GKAP1, 2.4E+00, 1.9E−02; RNF152, 2.4E+00, 4.0E−02; PLEKHG1, 2.4E+00, 5.7E−03; TFF3, 2.4E+00, 1.8E−02; |
| | HABP4, 2.4E+00, 4.1E−02; PKIG, 2.4E+00, 3.3E−02; NEDD4, 2.5E+00, 4.7E−03; HIST1H2BJ, 2.5E+00, 8.7E−03; SLC6A15, 2.5E+00, 3.2E−04; LRRC37A3, |
| | 2.5E+00, 1.6E−02; ZNF782, 2.5E+00, 2.9E−02; TPBG, 2.5E+00, 6.0E−03; GGH, 2.5E+00, 4.9E−02; STX17, 2.5E+00, 4.9E−02; TSPAN12, 2.5E+00, 1.7E−02; |
| | RBM20, 2.5E+00, 1.9E−04; HIST1H2BO, 2.5E+00, 5.0E−02; JKAMP, 2.5E+00, 2.4E−02; FZD2, 2.5E+00, 1.3E−03; HHAT, 2.6E+00, 5.7E−04; ENC1, 2.6E+00, |
| | 2.3E−03; RGMB, 2.6E+00, 1.9E−02; PCAT14, 2.6E+00, 4.0E−02; TFPI, 2.6E+00, 1.2E−04; PIK3R1, 2.6E+00, 2.1E−02; SRGAP2C, 2.6E+00, 6.8E−04; GATS, |
| | 2.6E+00, 1.9E−02; SULF2, 2.6E+00, 2.6E−02; TUBB6, 2.6E+00, 3.6E−02; SEZ6L, 2.6E+00, 5.2E−07; COL2A1, 2.6E+00, 6.9E−03; POC1B, 2.7E+00, 3.2E−02; |
| | NKD1, 2.7E+00, 2.9E−04; NUCB2, 2.7E+00, 4.4E−02; HIST1H4F, 2.7E+00, 4.0E−02; OTX2-AS1, 2.7E+00, 2.2E−04; TMEM232, 2.7E+00, 2.6E−02; FAM19A1, |
| | 2.7E+00, 1.7E−02; BLCAP, 2.7E+00, 3.1E−04; C3orf70, 2.7E+00, 6.3E−04; SOX6, 2.8E+00, 1.4E−04; EBF2, 2.8E+00, 1.6E−07; COLEC12, 2.8E+00, 5.6E−04; |
| | KLHL2, 2.8E+00, 4.4E−02; FBN1, 2.8E+00, 7.1E−03; ADAMTS17, 2.8E+00, 1.1E−02; SUFU, 2.8E+00, 2.5E−02; GRK5, 2.8E+00, 9.7E−04; RAP2B, 2.9E+00, |
| | 5.9E−03; LOC107984581, 2.9E+00, 4.9E−02; KCNIP1, 2.9E+00, 6.4E−03; FMN2, 2.9E+00, 1.1E−02; PCOLCE2, 2.9E+00, 3.5E−02; CPE, 2.9E+00, 3.1E−03; |
| | WDYHV1, 2.9E+00, 1.6E−02; LOC107983974, 2.9E+00, 5.6E−06; TTLL7, 2.9E+00, 4.6E−02; AHDC1, 2.9E+00, 4.8E−02; TNFRSF19, 3.0E+00, 5.7E−05; |
| | LOC107985879, 3.0E+00, 6.5E−07; RTN1, 3.0E+00, 1.6E−02; GXYLT1, 3.0E+00, 3.7E−02; ZNF518B, 3.0E+00, 9.2E−03; SLC39A8, 3.0E+00, 3.4E−06; |
| | SMAD1, 3.0E+00, 3.2E−02; COL13A1, 3.0E+00, 9.8E−04; PAQR3, 3.0E+00, 5.9E−03; NCALD, 3.0E+00, 2.4E−03; METTL2B, 3.0E+00, 4.0E−02; HECTD2, |
| | 3.1E+00, 3.0E−04; RAI1, 3.1E+00, 1.2E−04; PLXNA2, 3.1E+00, 8.1E−06; MDFIC, 3.1E+00, 5.4E−05; LOC105374693, 3.1E+00, 2.0E−03; CCNG2, 3.1E+00, |
| | 1.5E−05; IGDCC4, 3.1E+00, 1.5E−02; PPME1, 3.1E+00, 4.9E−02; LOC107985783, 3.1E+00, 5.9E−03; TNC, 3.1E+00, 1.9E−04; H3C8, 3.1E+00, 4.0E−02; |
| | B3GLCT, 3.1E+00, 8.2E−03; WIPF1, 3.1E+00, 5.9E−04; LRRN2, 3.1E+00, 9.2E−04; TANC1, 3.1E+00, 1.9E−02; PROS1, 3.2E+00, 5.7E−07; FBLN7, 3.2E+00, |
| | 5.6E−09; DOK6, 3.2E+00, 7.7E−03; ARL13B, 3.2E+00, 4.9E−02; SYT10, 3.2E+00, 1.2E−02; ANKRD6, 3.2E+00, 3.6E−02; PCBP1-AS1, 3.2E+00, 4.7E−02; |
| | FRMD6, 3.2E+00, 3.4E−03; MRC2, 3.2E+00, 1.3E−02; SNRPN, 3.2E+00, 3.5E−03; FHDC1, 3.3E+00, 1.4E−02; RNF165, 3.3E+00, 2.7E−03; PREX1, 3.3E+00, |
| | 2.7E−04; H2AC21, 3.3E+00, 2.5E−03; ATP9A, 3.3E+00, 9.1E−03; TANC2, 3.3E+00, 4.9E−02; NXPH2, 3.3E+00, 3.1E−02; KHDRBS3, 3.3E+00, 2.8E−02; |
| | ANTXR2, 3.4E+00, 3.9E−06; ZBTB18, 3.4E+00, 8.6E−06; C1orf112, 3.4E+00, 4.1E−02; MAP3K20, 3.4E+00, 5.3E−04; HIRA, 3.4E+00, 4.8E−02; TCF21, |
| | 3.4E+00, 4.5E−10; TNFRSF10B, 3.4E+00, 1.1E−02; TSHZ3, 3.4E+00, 3.7E−04; LOC101927947, 3.4E+00, 9.3E−06; SMOC1, 3.4E+00, 2.1E−04; FAM184A, |
| | 3.4E+00, 4.4E−02; EFCAB13, 3.5E+00, 1.7E−02; BAHCC1, 3.5E+00, 5.5E−10; FAM110B, 3.5E+00, 2.4E−03; FAM149B1, 3.5E+00, 7.4E−03; H3C7, 3.5E+00, |
| | 4.4E−02; FBXW8, 3.5E+00, 2.8E−02; IPO5P1, 3.5E+00, 1.0E−02; RGL1, 3.5E+00, 3.1E−03; SATB1, 3.5E+00, 5.5E−03; CEP112, 3.5E+00, 2.3E−02; GEN1, |
| | 3.5E+00, 1.2E−02; MEIS2, 3.6E+00, 3.5E−04; SEC24B, 3.6E+00, 3.5E−02; SHROOM2, 3.6E+00, 1.0E−02; AFAP1, 3.6E+00, 6.9E−03; DLK1, 3.6E+00, |
| | 1.3E−08; MALAT1, 3.6E+00, 8.6E−06; H2BC10, 3.6E+00, 5.5E−04; ANAPC10, 3.6E+00, 4.1E−02; FRMD3, 3.6E+00, 1.7E−04; NFASC, 3.6E+00, 1.0E−02; LRIG3, |
| | 3.6E+00, 2.4E−04; SIL1, 3.6E+00, 5.6E−04; NETO2, 3.7E+00, 2.3E−03; HIST1H2BK, 3.7E+00, 9.5E−03; GAREM1, 3.7E+00, 4.0E−02; FBXL4, 3.7E+00, |
| | 1.6E−02; ARHGAP10, 3.7E+00, 9.3E−03; ST8SIA2, 3.7E+00, 1.4E−05; COL11A1, 3.7E+00, 3.8E−02; FBLN1, 3.7E+00, 9.5E−03; LOC107983984, 3.8E+00, 4.6E−02; |
| | PTPRM, 3.8E+00, 3.3E−02; KIF26B, 3.8E+00, 4.4E−05; TBC1D14, 3.8E+00, 4.5E−03; TRAM2, 3.8E+00, 7.9E−04; COL1A2, 3.8E+00, 3.6E−02; UTP18, |
| | 3.8E+00, 2.9E−02; NTS, 3.8E+00, 4.2E−03; CBFB, 3.8E+00, 9.2E−03; PARK2, 3.8E+00, 2.4E−02; GREM1, 3.9E+00, 7.9E−09; NRCAM, 3.9E+00, 3.1E−02; |
| | YAF2, 3.9E+00, 2.5E−06; AMOTL1, 3.9E+00, 7.8E−03; CSRNP3, 3.9E+00, 4.1E−02; TAF3, 3.9E+00, 4.4E−02; WLS, 3.9E+00, 2.8E−06; HEG1, 3.9E+00, |
| | 1.3E−04; HMG20A, 3.9E+00, 9.2E−03; FZD5, 3.9E+00, 3.8E−02; FRZB, 3.9E+00, 3.9E−06; CYP20A1, 3.9E+00, 1.6E−02; DNAJC3, 4.0E+00, 1.0E−02; PTCH1, |
| | 4.0E+00, 9.5E−03; PAPPA, 4.0E+00, 1.7E−03; VGLL4, 4.0E+00, 2.0E−02; E2F7, 4.0E+00, 1.0E−02; H3C11, 4.0E+00, 3.1E−02; FST, 4.0E+00, 5.4E−04; REV3L, |
| | 4.0E+00, 3.0E−02; TP53I11, 4.0E+00, 5.9E−03; FAM171A1, 4.0E+00, 2.2E−02; CCDC50, 4.0E+00, 1.7E−03; PHLDB2, 4.0E+00, 1.2E−03; ZC3H12C, 4.0E+00, |
| | 7.7E−03; HIST1H2AK, 4.0E+00, 8.1E−05; DGKH, 4.0E+00, 3.1E−02; LRRC8B, 4.1E+00, 8.4E−03; COL4A1, 4.1E+00, 1.0E−02; COL4A2, 4.1E+00, 1.8E−02; |
| | MECOM, 4.1E+00, 5.5E−05; PROM1, 4.1E+00, 4.0E−02; MN1, 4.1E+00, 4.9E−06; ASAP2, 4.1E+00, 2.7E−02; ECHDC1, 4.2E+00, 1.5E−03; WASF3, 4.2E+00, |
| | 5.1E−04; H3C12, 4.2E+00, 1.4E−04; PHTF1, 4.2E+00, 5.7E−03; EMSY, 4.2E+00, 4.2E−02; TTI1, 4.2E+00, 1.0E−02; RGS12, 4.2E+00, 3.2E−03; DEPDC1B, |
| | 4.2E+00, 4.7E−02; H4C12, 4.2E+00, 1.8E−03; ZDHHC21, 4.2E+00, 2.7E−02; TRMT9B, 4.2E+00, 2.0E−10; MBOAT2, 4.2E+00, 3.4E−02; SLF1, 4.2E+00, 4.0E−03; |
| | ADAMTS6, 4.3E+00, 7.9E−04; MCF2L, 4.3E+00, 3.6E−03; CDK17, 4.3E+00, 1.6E−02; LOC105374322, 4.3E+00, 1.5E−03; SHB, 4.3E+00, 2.9E−03; |
| | SCAPER, 4.3E+00, 1.4E−02; CXXC5, 4.3E+00, 2.4E−04; C1QTNF3-AMACR, 4.3E+00, 8.2E−03; ADD1, 4.3E+00, 1.6E−02; DENND2B, 4.4E+00, 7.0E−05; AFF3, |
| | 4.4E+00, 6.1E−09; COCH, 4.4E+00, 1.3E−06; GJC1, 4.4E+00, 1.8E−02; TRIP11, 4.4E+00, 1.4E−02; MAP2K5, 4.4E+00, 1.2E−02; C15orf41, 4.4E+00, |
| | 1.7E−02; EP400, 4.4E+00, 3.8E−02; TTC37, 4.4E+00, 3.1E−02; HDAC4, 4.5E+00, 4.7E−02; NAALAD2, 4.5E+00, 3.4E−05; H2AC13, 4.5E+00, 2.3E−03; |
| | LOC107986007, 4.5E+00, 5.3E−04; LOC285696, 4.5E+00, 1.1E−03; TSPAN18, 4.5E+00, 3.1E−04; C11orf49, 4.5E+00, 3.1E−02; SPRED1, 4.5E+00, 2.2E−02; |
| | SOX2-OT, 4.5E+00, 1.0E−02; ZNF516, 4.5E+00, 8.2E−04; FBXL17, 4.5E+00, 4.6E−02; IVNS1ABP, 4.5E+00, 3.6E−02; CDON, 4.5E+00, 7.9E−03; TRIM44, |
| | 4.5E+00, 1.2E−02; DPH6, 4.5E+00, 4.1E−02; LOC105370982, 4.5E+00, 2.5E−09; ZNF407, 4.6E+00, 1.6E−02; LCORL, 4.6E+00, 4.6E−02; ZBTB20, 4.6E+00, |
| | 2.4E−02; SHISA2, 4.6E+00, 1.5E−06; POU6F2, 4.6E+00, 2.3E−04; LSM14A, 4.6E+00, 4.9E−02; EFNB2, 4.6E+00, 2.9E−04; DLEU2, 4.6E+00, 1.4E−03; DUSP6, |
| | 4.6E+00, 2.5E−10; RSRC1, 4.6E+00, 3.3E−02; SAMD4A, 4.7E+00, 5.6E−05; ARL3, 4.7E+00, 6.3E−04; ELP4, 4.7E+00, 4.9E−02; CLMP, 4.7E+00, 2.0E−03; |
| | WDR70, 4.7E+00, 2.2E−02; CREBBP, 4.7E+00, 3.4E−02; CPD, 4.7E+00, 2.2E−03; USP3, 4.7E+00, 1.7E−05; NSD2, 4.7E+00, 4.4E−02; GTDC1, 4.7E+00, 2.1E−02; |
| | NFAT5, 4.7E+00, 1.9E−02; NCAM1, 4.8E+00, 6.5E−05; SLC44A5, 4.8E+00, 2.0E−03; DANT2, 4.8E+00, 4.6E−02; H2AC16, 4.8E+00, 2.3E−03; PLEKHA5, |
| | 4.8E+00, 2.2E−02; CCBE1, 4.8E+00, 3.0E−06; CEP350, 4.8E+00, 2.5E−02; PDE3B, 4.8E+00, 4.8E−03; HIP1, 4.8E+00, 4.8E−02; UGGT2, 4.8E+00, 4.3E−02; |
| | SMAD6, 4.8E+00, 2.5E−07; EML1, 4.8E+00, 1.0E−03; DENND2A, 4.8E+00, 1.0E−05; MIPOL1, 4.8E+00, 2.6E−02; TULP4, 4.8E+00, 4.0E−02; EYA1, 4.8E+00, |
| | 8.9E−05; SESTD1, 4.9E+00, 5.9E−04; HACD3, 4.9E+00, 3.3E−02; PDE10A, 4.9E+00, 3.1E−04; H2BC7, 4.9E+00, 2.6E−04; ZC4H2, 4.9E+00, 1.8E−02; |
| | COL26A1, 4.9E+00, 1.1E−02; CDK19, 4.9E+00, 1.1E−02; SRRM4, 4.9E+00, 8.7E−06; SLC7A11, 4.9E+00, 3.5E−03; RASA1, 4.9E+00, 7.8E−04; TTC17, |
| | 4.9E+00, 4.2E−02; HS2ST1, 4.9E+00, 4.1E−02; RASSF8, 4.9E+00, 1.2E−03; AP3B1, 5.0E+00, 3.0E−02; INVS, 5.0E+00, 6.5E−03; HDAC8, 5.0E+00, 1.6E−02; |
| | SPIDR, 5.0E+00, 3.7E−02; BMPER, 5.0E+00, 1.3E−11; APP, 5.0E+00, 3.0E−02; LOC105377862, 5.0E+00, 6.5E−03; MYLK, 5.0E+00, 6.9E−04; CALD1, |
| | 5.0E+00, 3.2E−02; GNAS, 5.0E+00, 3.4E−02; DYM, 5.1E+00, 6.8E−03; RANBP1, 5.1E+00, 5.5E−03; PDS5B, 5.1E+00, 1.9E−02; FANCI, 5.1E+00, 1.1E−02; |
| | HIST1H2AC, 5.1E+00, 4.5E−03; PTK2, 5.1E+00, 2.0E−02; LRP2, 5.2E+00, 2.5E−10; BCAS3, 5.2E+00, 2.0E−02; TFAP2A, 5.2E+00, 9.6E−14; NT5C2, 5.2E+00, |
| | 1.5E−03; SNTB1, 5.2E+00, 2.8E−03; MAP2K6, 5.2E+00, 3.8E−03; NEDD9, 5.2E+00, 2.0E−10; MACROH2A1, 5.2E+00, 1.4E−05; R3HDM1, 5.2E+00, 2.7E−02; |
| | ASCC3, 5.2E+00, 3.4E−02; AN06, 5.2E+00, 3.3E−03; STK3, 5.2E+00, 1.0E−02; BTBD9, 5.2E+00, 6.5E−03; ESRRG, 5.3E+00, 4.9E−08; RFX3, 5.3E+00, 2.7E−02; |
| | MAST4, 5.3E+00, 1.2E−04; IMMP2L, 5.3E+00, 2.6E−02; LINC01021, 5.3E+00, 4.8E−03; ASTN1, 5.3E+00, 1.7E−05; P3H2, 5.3E+00, 4.7E−04; ZNF385B, |
| | 5.3E+00, 5.4E−04; UBE2E3, 5.3E+00, 6.1E−03; NF1, 5.3E+00, 1.6E−02; H3C4, 5.3E+00, 3.1E−03; HIBCH, 5.3E+00, 2.6E−03; RAD51B, 5.4E+00, 2.7E−02; |
| | LINC01515, 5.4E+00, 3.5E−03; LOC107986022, 5.4E+00, 1.9E−06; DLEU1, 5.4E+00, 1.9E−03; ASPH, 5.4E+00, 1.2E−02; FLNC, 5.4E+00, 3.8E−11; SSBP3, |
| | 5.4E+00, 1.7E−02; IGDCC3, 5.4E+00, 2.0E−07; DMD, 5.4E+00, 8.1E−04; RBFOX2, 5.4E+00, 1.4E−02; CCND2, 5.4E+00, 8.6E−03; HMCN1, 5.5E+00, 7.8E−08; |
| | H4C8, 5.5E+00, 3.1E−04; RAB28, 5.5E+00, 3.0E−03; STX8, 5.5E+00, 4.5E−04; GREB1, 5.5E+00, 7.1E−06; PCDH11X, 5.5E+00, 3.4E−02; SYNE2, 5.5E+00, |
| | 1.2E−02; CHD1, 5.5E+00, 7.6E−03; SMAD5, 5.5E+00, 5.4E−04; EPB41L2, 5.5E+00, 6.4E−03; HIST1H2AH, 5.5E+00, 1.3E−03; PLCH1, 5.6E+00, 1.3E−02; |
| | POLA1, 5.6E+00, 1.3E−02; H3C10, 5.6E+00, 5.4E−05; TCF12, 5.6E+00, 7.4E−03; NOVA1, 5.6E+00, 1.4E−03; RNGTT, 5.6E+00, 4.8E−03; GSK3B, 5.6E+00, |
| | 7.6E−03; ZFAND3, 5.6E+00, 1.2E−02; TMEM123, 5.7E+00, 9.4E−05; MMS22L, 5.7E+00, 5.9E−03; CEP78, 5.7E+00, 3.2E−04; ZMIZ1, 5.7E+00, 2.0E−03; NES, |
| | 5.7E+00, 4.7E−03; CTNND2, 5.7E+00, 1.3E−02; UBE21, 5.7E+00, 2.0E−03; GNAQ, 5.7E+00, 9.4E−03; SALL1, 5.7E+00, 2.1E−06; CRADD, 5.7E+00, 1.6E−03; |
| | RBMS1, 5.7E+00, 8.8E−03; GRIK3, 5.8E+00, 7.8E−11; ZNF148, 5.8E+00, 9.2E−04; PTPRN2, 5.8E+00, 1.2E−02; ZNF664, 5.8E+00, 1.6E−06; ID1, 5.8E+00, |
| | 7.5E−05; CDK6, 5.8E+00, 2.0E−03; SDC2, 5.8E+00, 5.1E−04; H2AC8, 5.8E+00, 8.5E−04; MED12L, 5.9E+00, 7.3E−04; LIMCH1, 5.9E+00, 1.8E−04; DZIP1, |
| | 5.9E+00, 1.5E−05; TSPAN5, 5.9E+00, 2.5E−04; CRACD, 5.9E+00, 4.5E−04; PTN, 5.9E+00, 2.6E−05; DIAPH3, 6.0E+00, 7.2E−03; SLC5A3, 6.0E+00, 7.0E−06; |
| | SOX11, 6.0E+00, 5.9E−04; FAM13A, 6.1E+00, 9.8E−04; PREX2, 6.1E+00, 5.4E−04; DPY19L3, 6.1E+00, 3.0E−04; SEMASA, 6.1E+00, 1.5E−04; AFF2, |
| | 6.1E+00, 5.0E−05; H4C5, 6.1E+00, 7.7E−03; EXOC4, 6.2E+00, 2.9E−03; NCOA1, 6.2E+00, 3.4E−04; MIR924HG, 6.2E+00, 1.4E−02; PPFIBP1, 6.2E+00, 2.8E−05; |
| | STIM2, 6.2E+00, 1.7E−07; CAMKMT, 6.2E+00, 4.3E−03; DLG1, 6.3E+00, 2.0E−03; MACROD2, 6.3E+00, 1.2E−03; NRG1, 6.3E+00, 1.2E−07; KALRN, |
| | 6.3E+00, 6.9E−05; ZEB1, 6.3E+00, 7.9E−14; EPHA4, 6.3E+00, 7.7E−04; CASK, 6.3E+00, 1.1E−03; LOC100420587, 6.3E+00, 3.1E−03; NRIP1, 6.3E+00, 3.6E−06; |
| | PAMR1, 6.4E+00, 6.5E−09; FZD3, 6.4E+00, 9.1E−05; UBE3D, 6.4E+00, 1.2E−03; ADAM23, 6.5E+00, 1.3E−04; TMEM132C, 6.5E+00, 2.5E−15; GRIP1, |
| | 6.6E+00, 6.3E−04; LIX1, 6.7E+00, 2.1E−25; RNF217, 6.7E+00, 7.7E−09; VPS13B, 6.7E+00, 6.8E−04; TIAM1, 6.7E+00, 3.7E−04; H1-5, 6.7E+00, 9.5E−03; |
| | NOTCH2, 6.7E+00, 6.6E−08; SLC25A13, 6.8E+00, 5.0E−05; H2AFY2, 6.8E+00, 1.2E−11; GRAMD1B, 6.8E+00, 3.0E−05; H1-2, 6.8E+00, 3.1E−03; ROR2, |
| | 6.8E+00, 3.7E−08; DST, 6.8E+00, 4.4E−05; H2AC20, 6.8E+00, 7.9E−04; STON2, 6.9E+00, 5.6E−07; RFC3, 6.9E+00, 4.1E−04; AKAP13, 6.9E+00, 4.2E−04; |
| | TLN2, 6.9E+00, 7.1E−05; KAZN, 7.0E+00, 7.0E−04; DLG5, 7.0E+00, 2.1E−06; HIST1H1E, 7.0E+00, 1.0E−03; SEPTIN9, 7.0E+00, 1.8E−04; ADGRL2, 7.0E+00, |
| | 2.3E−04; SVIL, 7.0E+00, 8.7E−07; CUX1, 7.0E+00, 1.2E−04; ANXA5, 7.0E+00, 2.7E−05; ID4, 7.1E+00, 2.5E−10; ME3, 7.1E+00, 1.4E−14; NLGN1, 7.1E+00, |
| | 7.8E−04; FIGN, 7.1E+00, 2.0E−04; TBL1X, 7.2E+00, 1.2E−04; CADPS, 7.2E+00, 2.0E−05; SLC4A7, 7.2E+00, 5.1E−06; ELMO1, 7.2E+00, 1.0E−07; PRKG1, |
| | 7.3E+00, 7.9E−04; GSE1, 7.3E+00, 1.5E−04; MED13L, 7.3E+00, 1.7E−04; LSAMP, 7.4E+00, 1.2E−04; YAP1, 7.4E+00, 6.0E−05; HIST1H2BC, 7.4E+00, |
| | 1.1E−06; FBXL7, 7.4E+00, 5.8E−05; FOXP2, 7.5E+00, 1.3E−20; BCKDHB, 7.5E+00, 8.8E−05; SMYD3, 7.6E+00, 5.2E−05; MID1, 7.7E+00, 1.8E−05; H2AC17, |
| | 7.8E+00, 1.7E−04; NEO1, 7.8E+00, 4.6E−06; LAMB1, 7.8E+00, 6.5E−07; TCF4, 7.9E+00, 1.0E−05; STOX2, 7.9E+00, 1.7E−07; UNC5C, 7.9E+00, 3.4E−10; |
| | SH3RF1, 7.9E+00, 9.1E−08; SIPA1L2, 7.9E+00, 7.4E−11; PSD3, 7.9E+00, 1.6E−05; AKT3, 8.0E+00, 1.2E−05; PEAK1, 8.0E+00, 3.0E−05; FRMD4A, 8.0E+00, |
| | 4.7E−06; IL17RD, 8.0E+00, 1.5E−12; CHD7, 8.0E+00, 1.4E−05; IL1RAPL1, 8.0E+00, 4.7E−07; MMP16, 8.1E+00, 5.1E−06; CALB1, 8.2E+00, 1.1E−07; GRIK2, |
| | 8.4E+00, 1.4E−05; LPP, 8.4E+00, 5.1E−06; PPP3CA, 8.5E+00, 1.3E−06; ARHGAP28, 8.5E+00, 2.1E−13; ST6GALNAC3, 8.5E+00, 8.5E−06; ZFHX4, 8.5E+00, |
| | 3.1E−11; MIAT, 8.6E+00, 6.6E−07; H2AC11, 8.6E+00, 4.6E−07; KIRREL1, 8.7E+00, 2.9E−09; PRSS23, 8.7E+00, 2.8E−17; CTNNA2, 8.7E+00, 5.5E−06; |
| | SMAD2, 8.8E+00, 6.4E−07; FAM155A, 8.8E+00, 1.5E−07; SIX3, 8.8E+00, 1.7E−29; H3C2, 8.8E+00, 3.8E−05; PTCHD4, 8.9E+00, 4.9E−15; PALLD, 9.0E+00, |
| | 3.2E−09; BCAT1, 9.1E+00, 3.7E−07; CNTNAP2, 9.1E+00, 5.6E−07; SEPTIN11, 9.2E+00, 3.5E−08; TLE4, 9.3E+00, 3.6E−08; ID2, 9.4E+00, 7.5E−14; ATP2B1, |
| | 9.7E+00, 2.3E−09; RASGRF2, 9.7E+00, 1.2E−15; NR6A1, 9.7E+00, 2.0E−09; SETBP1, 9.8E+00, 1.4E−09; ZNF521, 9.8E+00, 2.3E−08; FHOD3, 9.9E+00, 5.5E−11; |
| | MAML3, 9.9E+00, 2.5E−09; TTC28, 9.9E+00, 2.3E−08; HS6ST2, 9.9E+00, 1.7E−11; AUTS2, 1.0E+01, 1.2E−12; LOC105377979, 1.0E+01, 2.3E−43; |
| | PTPRD, 1.0E+01, 1.8E−08; SLIT2, 1.0E+01, 2.8E−10; GLIS3, 1.0E+01, 2.2E−19; EPHA7, 1.0E+01, 1.8E−13; WWOX, 1.0E+01, 8.7E−10; CDH2, 1.0E+01, |
| | 1.5E−09; MIR325HG, 1.0E+01, 1.7E−12; ST6GALNAC5, 1.0E+01, 2.7E−11; SC5D, 1.0E+01, 9.4E−12; TMTC2, 1.0E+01, 1.4E−09; PAM, 1.1E+01, 8.9E−11; LRRC4C, |
| | 1.1E+01, 1.7E−08; PRKD1, 1.1E+01, 3.8E−11; CAMK2D, 1.1E+01, 1.9E−14; NEBL, 1.1E+01, 6.5E−11; PKNOX2, 1.1E+01, 5.8E−16; TEAD1, 1.1E+01, 7.3E−10; |
| | SSBP2, 1.1E+01, 3.9E−10; ZC3H12B, 1.1E+01, 1.1E−09; SEMA6A, 1.1E+01, 1.0E−13; ZNF423, 1.1E+01, 1.2E−11; SLC35F1, 1.2E+01, 3.9E−14; SYNDIG1, |
| | 1.2E+01, 5.2E−14; PGAP1, 1.2E+01, 4.2E−13; ZSWIM6, 1.2E+01, 5.2E−14; DACH1, 1.2E+01, 3.7E−20; PDE4D, 1.2E+01, 3.9E−16; CADM1, 1.2E+01, 9.4E−15; |
| | CNTN4, 1.3E+01, 1.2E−15; LMX1A, 1.3E+01, 2.1E−37; MACF1, 1.4E+01, 1.1E−21; GPC3, 1.4E+01, 1.3E−13; GLI3, 1.4E+01, 1.1E−18; CDH11, 1.4E+01, |
| | 1.1E−24; TENM4, 1.4E+01, 1.7E−14; PTPN13, 1.4E+01, 3.5E−17; DCC, 1.4E+01, 5.3E−30; ZEB2, 1.5E+01, 1.1E−30; NNAT, 1.5E+01, 9.7E−26; SDK2, |
| | 1.5E+01, 1.9E−22; ID3, 1.5E+01, 6.3E−23; NAV3, 1.6E+01, 1.1E−24; TENM3, 1.6E+01, 7.5E−28; PCDH11Y, 1.7E+01, 2.8E−36; GPC6, 1.7E+01, 1.0E−22; |
| | CDK14, 1.8E+01, 6.0E−26; SOX5, 1.8E+01, 1.4E−25; CDH6, 1.9E+01, 1.1E−30; NKAIN3, 2.0E+01, 4.0E−30; MAP2, 2.1E+01, 1.3E−36; FBN2, 2.2E+01, 4.6E−39; |
| | MAPK10, 2.4E+01, 7.8E−44; EFNA5, 2.7E+01, 2.0E−69; GREB1L, 3.3E+01, 4.4E−83; PRTG, 3.4E+01, 5.8E−81; |
| 3 | PTMA, −1.5E+01, 4.9E−109; RPS8, −1.3E+01, 5.2E−59; GSTP1, −1.3E+01, 1.7E−47; RPL8, −1.2E+01, 4.1E−42; HSP90AA1, −1.2E+01, 4.0E−65; RPL6, |
| | −1.2E+01, 2.5E−42; HSP90AB1, −1.2E+01, 8.7E−63; HSPA8, −1.2E+01, 2.3E−45; RPL4, −1.2E+01, 1.5E−45; NPM1, −1.2E+01, 7.9E−54; RPS6, −1.1E+01, |
| | 1.6E−50; TPT1, −1.1E+01, 2.1E−38; ACTG1, −1.1E+01, 5.3E−38; GAPDH, −1.1E+01, 1.6E−47; RPL3, −1.1E+01, 5.1E−39; FTH1, −1.1E+01, 2.1E−34; RPL10A, |
| | −1.1E+01, 7.9E−35; RPL34, −1.1E+01, 1.5E−33; RPL13, −1.1E+01, 7.9E−35; RPLP1, −1.1E+01, 7.4E−39; H4C3, −1.1E+01, 3.8E−29; NCL, −1.1E+01, 1.0E−44; |
| | ACTB, −1.1E+01, 4.3E−47; RPL23, −1.1E+01, 5.8E−34; RPL14, −1.1E+01, 7.2E−33; RPL11, −1.1E+01, 7.9E−35; RPS15A, −1.1E+01, 7.6E−33; PFN1, −1.0E+01, |
| | 4.2E−32; RPL35A, −1.0E+01, 1.7E−32; RPS3, −1.0E+01, 3.3E−32; EIF4G2, −1.0E+01, 3.8E−33; RPL13A, −1.0E+01, 5.9E−38; RPS27A, −1.0E+01, 1.8E−31; |
| | RPS12, −1.0E+01, 1.5E−30; RPS23, −1.0E+01, 5.6E−30; RPL12, −1.0E+01, 1.9E−31; RPS3A, −1.0E+01, 1.6E−30; RPL19, −1.0E+01, 9.5E−31; HSP90B1, |
| | −1.0E+01, 5.2E−35; RPS16, −1.0E+01, 4.0E−30; KRT18, −1.0E+01, 6.2E−34; RPL5, −1.0E+01, 1.6E−30; CALM1, −1.0E+01, 2.8E−29; RPS7, −1.0E+01, 4.6E−30; |
| | RACK1, −1.0E+01, 2.3E−29; EEF1A1, −9.9E+00, 4.3E−55; POU5F1, −9.9E+00, 2.8E−29; RPS13, −9.9E+00, 3.0E−31; RPS14, −9.8E+00, 3.4E−28; RPL21, |
| | −9.8E+00, 1.2E−28; TUBB, −9.8E+00, 3.0E−29; SET, −9.8E+00, 5.1E−30; RPS18, −9.6E+00, 1.4E−29; HSPD1, −9.6E+00, 4.2E−30; RPS15, −9.4E+00, 9.6E−27; |
| | CANX, −9.4E+00, 4.0E−28; FTL, −9.4E+00, 5.8E−27; GJA1, −9.4E+00, 5.4E−26; LIN28A, −9.3E+00, 1.3E−31; RPS24, −9.3E+00, 2.7E−26; RPS11, −9.3E+00, |
| | 2.5E−26; HMGA1, −9.2E+00, 2.1E−25; RPSA, −9.1E+00, 4.9E−24; RPL15, −9.1E+00, 1.8E−24; RPS4X, −9.1E+00, 3.2E−25; RPS19, −9.0E+00, 3.1E−24; CD24, |
| | −9.0E+00, 8.8E−30; YWHAZ, −9.0E+00, 5.8E−24; RPS27, −9.0E+00, 1.2E−23; RPL18, −9.0E+00, 1.5E−23; H2AZ1, −8.9E+00, 6.0E−24; RPL31, −8.9E+00, 3.1E−23; |
| | TMSB4X, −8.8E+00, 1.6E−23; RPL7, −8.8E+00, 5.6E−22; HNRNPA1, −8.7E+00, 7.9E−30; RPL24, −8.7E+00, 2.2E−22; KRT8, −8.7E+00, 2.0E−27; EN01, |
| | −8.7E+00, 2.1E−22; PRDX1, −8.6E+00, 2.4E−22; SSB, −8.5E+00, 4.8E−23; RPL7A, −8.5E+00, 1.4E−21; RPL30, −8.5E+00, 1.1E−21; TMSB10, −8.4E+00, |
| | 1.8E−22; STMN1, −8.4E+00, 3.1E−22; RPS17, −8.4E+00, 7.9E−21; RAN, −8.4E+00, 3.8E−22; SERBP1, −8.3E+00, 2.8E−22; H3F3B, −8.3E+00, 1.5E−22; RPL32, |
| | −8.3E+00, 6.4E−20; CALM2, −8.2E+00, 2.4E−20; RPL28, −8.2E+00, 1.0E−19; RPLP2, −8.1E+00, 8.6E−20; HNRNPU, −8.1E+00, 3.9E−23; PABPC1, −8.1E+00, |
| | 3.9E−23; TPM3, −8.0E+00, 2.9E−19; RPL10, −8.0E+00, 2.9E−19; SCD, −8.0E+00, 5.0E−20; HNRNPA2B1, −8.0E+00, 1.8E−32; HSPA5, −7.9E+00, 4.7E−18; |
| | RPLP0, −7.8E+00, 3.4E−18; CFL1, −7.8E+00, 2.6E−20; TDGF1, −7.7E+00, 8.9E−20; RPL35, −7.7E+00, 7.6E−18; RPS9, −7.7E+00, 4.7E−18; RPL26, −7.7E+00, |
| | 4.4E−18; UBB, −7.6E+00, 8.8E−19; LDHB, −7.6E+00, 7.5E−18; YBX1, −7.6E+00, 5.7E−17; NACA, −7.5E+00, 5.3E−17; FAU, −7.5E+00, 1.7E−17; EPCAM, |
| | −7.4E+00, 5.7E−17; HMGB1, −7.4E+00, 3.1E−16; MYL6, −7.4E+00, 2.0E−16; HNRNPK, −7.3E+00, 2.1E−16; PARP1, −7.3E+00, 9.0E−16; CSDE1, −7.3E+00, 7.7E−16; |
| | EEF2, −7.3E+00, 1.8E−15; YWHAE, −7.2E+00, 1.9E−16; RPS2, −7.2E+00, 2.1E−15; L1TD1, −7.2E+00, 6.9E−23; ESRG, −7.2E+00, 4.7E−16; NUCKS1, |
| | −7.2E+00, 5.7E−17; RPS5, −7.2E+00, 2.7E−15; HSPA4, −7.2E+00, 3.1E−15; EEF1G, −7.1E+00, 4.4E−15; RPL27A, −7.1E+00, 2.1E−15; RPL29, −7.1E+00, 4.2E−16; |
| | RPL36, −7.1E+00, 2.6E−15; PDIA3, −7.1E+00, 1.3E−14; HMGB2, −7.0E+00, 1.6E−16; ATP5F1B, −7.0E+00, 1.9E−15; EEF1B2, −7.0E+00, 1.9E−15; H1-5, |
| | −6.9E+00, 8.5E−13; TUBA1B, −6.9E+00, 4.4E−15; PEBP1, −6.9E+00, 1.2E−17; TKT, −6.8E+00, 3.6E−15; NASP, −6.8E+00, 1.9E−15; CCT4, −6.8E+00, 9.7E−15; |
| | TPI1, −6.8E+00, 1.2E−15; RPS20, −6.8E+00, 6.5E−14; H1-3, −6.8E+00, 2.4E−12; CYP51A1, −6.7E+00, 2.1E−15; SRSF3, −6.7E+00, 5.5E−14; ATP5F1A, |
| | −6.7E+00, 8.9E−14; CBX5, −6.7E+00, 5.3E−14; CCT3, −6.7E+00, 8.8E−14; PPIA, −6.6E+00, 2.2E−13; TARS1, −6.6E+00, 1.4E−13; SPP1, −6.6E+00, 1.1E−15; |
| | RPL27, −6.6E+00, 4.4E−15; CALR, −6.6E+00, 4.7E−13; MDK, −6.5E+00, 2.3E−15; RPS28, −6.5E+00, 1.8E−15; MORF4L1, −6.3E+00, 2.3E−12; SEPHS1, |
| | −6.3E+00, 2.1E−12; SF3B1, −6.3E+00, 1.6E−11; CCT5, −6.2E+00, 8.2E−12; TCP1, −6.2E+00, 1.0E−11; RPL18A, −6.2E+00, 1.5E−12; NORAD, −6.1E+00, 8.6E−13; |
| | PSMA4, −6.1E+00, 7.4E−15; S100A10, −6.1E+00, 1.4E−18; PGRMC1, −6.1E+00, 8.1E−13; RPS21, −6.1E+00, 2.6E−13; NDUFS5, −6.1E+00, 9.0E−16; RPL37, |
| | −6.0E+00, 4.7E−11; CEBPZ, −6.0E+00, 5.1E−11; UBA52, −6.0E+00, 2.6E−13; PSMA7, −5.9E+00, 2.8E−13; CCT6A, −5.9E+00, 9.9E−11; HMGN1, −5.9E+00, 4.3E−12; |
| | DNAJA1, −5.9E+00, 3.3E−12; HNRNPA3, −5.8E+00, 2.2E−10; SSRP1, −5.8E+00, 6.4E−14; VCP, −5.8E+00, 3.8E−11; BTF3, −5.8E+00, 1.9E−13; RPL38, |
| | −5.8E+00, 8.3E−12; SUMO2, −5.7E+00, 1.9E−12; IDH1, −5.7E+00, 2.9E−10; H1-2, −5.7E+00, 3.1E−10; IPO5, −5.7E+00, 8.8E−10; NONO, −5.7E+00, 3.6E−10; |
| | AZIN1, −5.7E+00, 4.0E−12; PTGES3, −5.7E+00, 1.3E−09; CCT2, −5.7E+00, 2.1E−10; NAP1L1, −5.7E+00, 6.0E−12; RPL36AL, −5.6E+00, 1.1E−16; BEX3, |
| | −5.6E+00, 2.9E−13; RPL9, −5.6E+00, 7.5E−10; YWHAQ, −5.6E+00, 1.4E−09; HNRNPH3, −5.6E+00, 1.4E−10; DPPA4, −5.6E+00, 4.2E−10; HNRNPAB, −5.6E+00, |
| | 1.5E−12; RPS29, −5.5E+00, 1.4E−09; PARK7, −5.5E+00, 3.2E−12; SRP14, −5.5E+00, 9.4E−12; UCHL1, −5.5E+00, 2.7E−09; TPM4, −5.5E+00, 3.0E−09; CCT8, |
| | −5.4E+00, 2.7E−10; MSH6, −5.4E+00, 2.2E−09; CBX1, −5.4E+00, 2.2E−11; SOX2, −5.4E+00, 3.0E−10; SKP1, −5.4E+00, 5.2E−11; COX4I1, −5.4E+00, 9.1E−12; |
| | CHD4, −5.4E+00, 1.4E−08; AKIRIN1, −5.4E+00, 5.2E−09; SOX4, −5.4E+00, 9.5E−12; SMC3, −5.3E+00, 3.4E−09; HNRNPM, −5.3E+00, 1.6E−08; TMED2, |
| | −5.3E+00, 6.5E−14; C11orf58, −5.3E+00, 6.2E−10; COX7C, −5.3E+00, 6.7E−10; CENPF, −5.3E+00, 3.8E−09; PDIA6, −5.3E+00, 7.0E−09; IFITM1, −5.3E+00, |
| | 7.7E−15; CNBP, −5.3E+00, 6.6E−10; G3BP1, −5.3E+00, 1.7E−08; PRDX6, −5.2E+00, 1.9E−09; DHCR24, −5.2E+00, 8.7E−09; ADH5, −5.2E+00, 4.8E−10; CYCS, |
| | −5.2E+00, 1.0E−10; DBI, −5.2E+00, 2.8E−13; UQCRH, −5.2E+00, 2.1E−09; MCM4, −5.2E+00, 1.2E−08; PMAIP1, −5.2E+00, 2.6E−12; DDX21, −5.2E+00, 7.2E−09; |
| | HIST1H1E, −5.2E+00, 5.4E−09; YWHAB, −5.2E+00, 1.2E−08; KPNA2, −5.1E+00, 1.7E−08; MTHFD2, −5.1E+00, 3.4E−10; DEK, −5.1E+00, 4.6E−08; |
| | IGF2BP1, −5.1E+00, 1.6E−08; XRCC5, −5.1E+00, 2.9E−09; PDIA4, −5.1E+00, 8.3E−10; PAICS, −5.1E+00, 4.6E−08; CSE1L, −5.1E+00, 1.1E−07; RHOA, −5.1E+00, |
| | 4.0E−09; HMGCS1, −5.1E+00, 1.9E−07; TMEM167A, −5.1E+00, 5.9E−09; DYNLL1, −5.1E+00, 1.3E−09; SLC25A3, −5.1E+00, 5.8E−10; IQGAP1, −5.0E+00, |
| | 1.1E−07; PSIP1, −5.0E+00, 8.3E−08; RPL37A, −5.0E+00, 8.4E−08; FKBP3, −5.0E+00, 1.7E−09; CLDN6, −5.0E+00, 5.6E−10; CD63, −5.0E+00, 9.7E−12; RPS25, |
| | −5.0E+00, 2.2E−10; ZNF770, −5.0E+00, 4.0E−09; PTBP1, −4.9E+00, 3.1E−09; SUPT16H, −4.9E+00, 2.4E−07; H2AC17, −4.9E+00, 1.3E−09; SKIL, −4.9E+00, |
| | 8.9E−07; TPR, −4.9E+00, 2.6E−07; UQCRB, −4.9E+00, 7.7E−11; PKM, −4.8E+00, 1.4E−07; HMGB3, −4.8E+00, 1.1E−08; SERPINB9, −4.8E+00, 2.2E−09; |
| | ARL6IP1, −4.8E+00, 8.9E−09; HNRNPL, −4.8E+00, 6.0E−09; CACYBP, −4.8E+00, 5.0E−12; RPS26, −4.8E+00, 2.9E−09; RBMX, −4.8E+00, 2.9E−07; STIP1, |
| | −4.8E+00, 1.5E−08; RSL1D1, −4.8E+00, 2.1E−08; APEX1, −4.8E+00, 3.7E−10; MDH1, −4.8E+00, 9.3E−09; CBX3, −4.7E+00, 9.2E−08; CAPRIN1, −4.7E+00, 5.8E−07; |
| | SLC16A1, −4.7E+00, 9.5E−07; PA2G4, −4.7E+00, 1.5E−08; EPRS1, −4.7E+00, 3.5E−07; EIF5A, −4.7E+00, 6.5E−09; H3C2, −4.7E+00, 4.4E−09; CNN3, |
| | −4.7E+00, 8.8E−08; DDX5, −4.7E+00, 1.3E−06; SNHG5, −4.7E+00, 1.5E−09; G3BP2, −4.6E+00, 6.3E−07; CCDC47, −4.6E+00, 5.0E−10; HNRNPDL, −4.6E+00, |
| | 1.7E−06; EIF1, −4.6E+00, 2.8E−09; SMARCA5, −4.6E+00, 2.3E−06; CAP1, −4.6E+00, 7.1E−09; PLS3, −4.6E+00, 3.3E−06; CLTC, −4.6E+00, 9.9E−07; H3C4, |
| | −4.6E+00, 1.1E−09; EIF5B, −4.6E+00, 2.5E−06; ANXA2, −4.6E+00, 4.7E−07; RCC2, −4.6E+00, 1.7E−06; TARDBP, −4.6E+00, 4.6E−08; KPNB1, −4.6E+00, 2.3E−06; |
| | RAD21, −4.5E+00, 5.8E−07; H2AC20, −4.5E+00, 1.7E−08; HSPH1, −4.5E+00, 5.0E−07; SLIRP, −4.5E+00, 9.6E−09; DDX1, −4.5E+00, 3.0E−07; MATR3, |
| | −4.5E+00, 1.5E−06; ANP32E, −4.5E+00, 1.9E−07; UBC, −4.4E+00, 1.3E−07; ZFAND5, −4.4E+00, 2.2E−07; HDLBP, −4.4E+00, 4.7E−06; EIF4G1, −4.4E+00, |
| | 1.6E−06; SRSF7, −4.4E+00, 2.5E−07; C14orf166, −4.4E+00, 1.4E−08; NAA50, −4.4E+00, 2.6E−06; EIF3E, −4.4E+00, 6.4E−06; PRPF40A, −4.4E+00, 5.6E−06; DSG2, |
| | −4.4E+00, 1.9E−06; NAE1, −4.4E+00, 2.4E−08; EIF4A2, −4.4E+00, 6.0E−06; METAP2, −4.3E+00, 4.9E−07; YBX3, −4.3E+00, 1.8E−08; ANP32B, −4.3E+00, 6.8E−08; |
| | SERPINH1, −4.3E+00, 2.1E−07; TXNRD1, −4.3E+00, 5.3E−06; SUB1, −4.3E+00, 4.5E−08; EIF3A, −4.3E+00, 9.1E−06; EIF2S2, −4.3E+00, 3.6E−07; ZFP42, |
| | −4.3E+00, 1.7E−06; MRFAP1, −4.3E+00, 1.7E−08; XRCC6, −4.3E+00, 1.5E−05; SEPTIN2, −4.3E+00, 9.3E−06; LDHA, −4.3E+00, 9.6E−10; EIF5, −4.3E+00, 3.5E−06; |
| | NARS1, −4.2E+00, 1.5E−06; HSPA9, −4.2E+00, 1.1E−05; RPL22, −4.2E+00, 3.3E−07; USP44, −4.2E+00, 1.4E−05; FKBP4, −4.2E+00, 3.8E−09; MFGE8, |
| | −4.2E+00, 1.5E−05; ATP5PD, −4.2E+00, 1.9E−09; HINT1, −4.2E+00, 2.0E−08; PPM1G, −4.2E+00, 6.7E−07; SERP1, −4.2E+00, 3.8E−09; OAZ1, −4.2E+00, 8.3E−08; |
| | HNRNPR, −4.2E+00, 1.0E−05; DDX3X, −4.2E+00, 6.5E−06; CCNG1, −4.2E+00, 1.0E−06; ARPC5, −4.2E+00, 6.1E−09; NDUFA4, −4.2E+00, 2.4E−07; DDX6, |
| | −4.1E+00, 2.2E−05; PSMD2, −4.1E+00, 1.1E−08; CLIC1, −4.1E+00, 5.1E−10; MAPRE1, −4.1E+00, 8.8E−08; EID1, −4.1E+00, 2.2E−07; NOL11, −4.1E+00, |
| | 1.0E−07; GDI2, −4.1E+00, 3.1E−05; ATP5PO, −4.1E+00, 1.5E−07; EIF3I, −4.1E+00, 3.0E−10; ST13, −4.0E+00, 3.7E−06; TFAM, −4.0E+00, 8.1E−08; BSG, −4.0E+00, |
| | 7.9E−07; PHB2, −4.0E+00, 2.7E−10; HIF1A, −4.0E+00, 8.9E−06; CCT7, −4.0E+00, 2.1E−07; DSTN, −4.0E+00, 4.4E−06; SRSF1, −4.0E+00, 3.0E−05; PEG10, |
| | −4.0E+00, 2.4E−07; ND5, −4.0E+00, 9.9E−15; MLEC, −4.0E+00, 6.7E−06; TMBIM6, −4.0E+00, 9.1E−06; RPL23A, −4.0E+00, 1.6E−06; EIF3M, −4.0E+00, |
| | 1.2E−06; SNRPD2, −4.0E+00, 1.3E−07; CLIC4, −3.9E+00, 1.2E−04; NFE2L1, −3.9E+00, 1.3E−06; CCNI, −3.9E+00, 2.7E−06; ACLY, −3.9E+00, 6.7E−05; NUDT21, |
| | −3.9E+00, 1.2E−06; PHB, −3.9E+00, 8.6E−09; SON, −3.9E+00, 1.1E−04; H2AC14, −3.9E+00, 1.3E−09; ZC3H15, −3.9E+00, 3.7E−06; HMGCR, −3.9E+00, |
| | 1.0E−04; TOP2A, −3.9E+00, 2.7E−04; MRPL51, −3.9E+00, 2.5E−10; SELENOW, −3.9E+00, 1.6E−08; TFRC, −3.8E+00, 7.9E−06; TXN, −3.8E+00, 1.2E−06; YWHAG, |
| | −3.8E+00, 7.2E−05; ARCN1, −3.8E+00, 1.2E−07; CDC42, −3.8E+00, 2.2E−06; PPP1CC, −3.8E+00, 3.3E−05; LRRC75A-AS1, −3.8E+00, 4.8E−06; SNRPD3, |
| | −3.8E+00, 2.3E−06; HDAC2, −3.8E+00, 1.5E−04; ATP5PB, −3.8E+00, 2.1E−07; ACTR2, −3.8E+00, 3.6E−05; STRAP, −3.8E+00, 5.0E−06; GNPTAB, −3.8E+00, |
| | 1.4E−05; ALDOA, −3.8E+00, 2.3E−06; ADAR, −3.8E+00, 8.2E−05; ZNF217, −3.8E+00, 4.6E−05; COX5B, −3.8E+00, 4.4E−07; SNRPF, −3.8E+00, 4.2E−08; GNL3, |
| | −3.8E+00, 7.0E−06; TERF1, −3.8E+00, 6.8E−05; DNMT3B, −3.7E+00, 1.5E−06; TCOF1, −3.7E+00, 1.2E−05; AP2M1, −3.7E+00, 7.2E−07; MARCKSL1, −3.7E+00, |
| | 8.3E−07; ERH, −3.7E+00, 1.2E−06; CDH1, −3.7E+00, 2.5E−04; ILF2, −3.7E+00, 1.7E−06; ATP6V1G1, −3.7E+00, 1.6E−08; NDUFA13, −3.6E+00, 3.6E−07; |
| | FSCN1, −3.6E+00, 3.6E−07; USP9X, −3.6E+00, 2.8E−07; SPARC, −3.6E+00, 4.7E−07; THRAP3, −3.6E+00, 3.1E−04; SNRNP200, −3.6E+00, 4.3E−05; PGK1, |
| | −3.6E+00, 4.8E−06; CCND1, −3.6E+00, 3.0E−06; SMARCE1, −3.6E+00, 1.2E−05; NREP, −3.6E+00, 4.6E−05; FUS, −3.6E+00, 5.0E−04; LMNB1, −3.6E+00, |
| | 1.7E−04; MORF4L2, −3.6E+00, 9.3E−05; SRSF6, −3.6E+00, 6.3E−06; NOP56, −3.6E+00, 3.7E−05; CALU, −3.6E+00, 1.6E−04; MKI67, −3.6E+00, 8.9E−04; ND4L, |
| | −3.6E+00, 2.4E−04; SRSF10, −3.6E+00, 3.3E−04; H4C5, −3.6E+00, 6.3E−07; SF3B2, −3.6E+00, 3.1E−05; EIF4B, −3.6E+00, 7.6E−04; BZW1, −3.6E+00, 6.8E−06; |
| | SOD1, −3.6E+00, 5.2E−07; ABCF1, −3.5E+00, 8.0E−06; COX1, −3.5E+00, 7.9E−19; PCNP, −3.5E+00, 3.3E−05; SF3A3, −3.5E+00, 5.3E−06; SYNCRIP, −3.5E+00, |
| | 7.8E−04; DDX18, −3.5E+00, 3.8E−05; PODXL, −3.5E+00, 2.1E−04; IDI1, −3.5E+00, 9.2E−06; PAIP2, −3.5E+00, 1.7E−05; ARPC3, −3.5E+00, 1.7E−07; ACAT2, |
| | −3.5E+00, 5.1E−05; HNRNPAO, −3.5E+00, 9.3E−07; REST, −3.5E+00, 8.6E−04; DNTTIP2, −3.4E+00, 6.4E−06; SSR3, −3.4E+00, 3.0E−05; AP1S2, −3.4E+00, |
| | 8.5E−04; PCBP2, −3.4E+00, 7.6E−04; LAPTM4A, −3.4E+00, 6.1E−06; PSMD8, −3.4E+00, 1.4E−07; SRRM1, −3.4E+00, 4.4E−04; NUTF2, −3.4E+00, 2.7E−07; |
| | TOP2B, −3.4E+00, 1.2E−03; COX8A, −3.4E+00, 5.4E−08; PPIG, −3.4E+00, 5.2E−04; EIF3F, −3.4E+00, 6.0E−07; KARS1, −3.4E+00, 1.8E−05; LUC7L3, −3.4E+00, |
| | 8.8E−04; IMPDH2, −3.4E+00, 6.5E−06; TOMM20, −3.4E+00, 1.3E−04; ATP5MC3, −3.4E+00, 1.0E−05; KDELR1, −3.4E+00, 1.3E−08; BAZ1B, −3.4E+00, 6.8E−04; |
| | STAU1, −3.4E+00, 2.0E−04; CNN2, −3.4E+00, 5.3E−05; PSAP, −3.4E+00, 2.2E−04; FAM136A, −3.4E+00, 5.3E−06; APOE, −3.4E+00, 5.9E−06; TRIM28, |
| | −3.4E+00, 1.1E−04; EDF1, −3.4E+00, 1.3E−05; NOLC1, −3.4E+00, 2.3E−04; MGST1, −3.3E+00, 1.9E−04; CNMD, −3.3E+00, 5.8E−04; ATP5MG, −3.3E+00, |
| | 1.9E−07; BMS1, −3.3E+00, 5.7E−05; CAND1, −3.3E+00, 9.4E−04; ATXN7L3B, −3.3E+00, 2.6E−07; RANBP1, −3.3E+00, 1.5E−05; H2AC8, −3.3E+00, 9.4E−07; SRP72, |
| | −3.3E+00, 2.7E−04; PAPOLA, −3.3E+00, 1.7E−03; RDX, −3.3E+00, 4.4E−04; ATP5IF1, −3.3E+00, 1.6E−06; PSMD12, −3.3E+00, 1.3E−04; MT1G, −3.3E+00, |
| | 1.6E−12; ENSA, −3.3E+00, 3.2E−05; ETF1, −3.3E+00, 2.8E−04; GLO1, −3.3E+00, 3.5E−04; DENR, −3.3E+00, 7.6E−04; DLGAP5, −3.3E+00, 7.7E−04; PRRC2C, |
| | −3.3E+00, 5.2E−04; MAP1B, −3.2E+00, 3.2E−03; ADSS, −3.2E+00, 1.7E−04; RBM3, −3.2E+00, 2.0E−05; SNRPC, −3.2E+00, 2.5E−06; NUDT15, −3.2E+00, 4.3E−06; |
| | PSMA3, −3.2E+00, 7.6E−05; PLAAT3, −3.2E+00, 1.4E−05; PPP2CA, −3.2E+00, 4.6E−04; CTNNB1, −3.2E+00, 2.6E−03; ANP32A, −3.2E+00, 1.5E−03; |
| | HMGN2, −3.2E+00, 1.8E−04; UQCR10, −3.2E+00, 1.3E−07; PABPC4, −3.2E+00, 1.2E−05; NRAS, −3.2E+00, 7.5E−06; TOMM7, −3.2E+00, 3.8E−07; |
| | LOC105377901, −3.2E+00, 5.2E−03; PSMB1, −3.2E+00, 6.9E−05; PGD, −3.2E+00, 8.2E−05; SSBP1, −3.2E+00, 1.7E−04; EBNA1BP2, −3.2E+00, 4.0E−08; |
| | SPCS3, −3.2E+00, 1.5E−05; PSMA2, −3.2E+00, 1.8E−04; MRPL3, −3.2E+00, 1.0E−03; VCAN, −3.1E+00, 4.0E−04; GNAS, −3.1E+00, 3.9E−03; TMED10, |
| | −3.1E+00, 9.8E−05; HNRNPD, −3.1E+00, 3.7E−03; LASP1, −3.1E+00, 8.0E−05; FABP5, −3.1E+00, 4.0E−07; DSP, −3.1E+00, 2.9E−03; APLP2, −3.1E+00, 4.6E−03; |
| | KRAS, −3.1E+00, 4.7E−04; LSM4, −3.1E+00, 8.5E−07; DPYSL3, −3.1E+00, 6.6E−03; FLNA, −3.1E+00, 4.6E−03; DKC1, −3.1E+00, 3.5E−05; FDFT1, |
| | −3.1E+00, 3.6E−03; HIST1H2AC, −3.1E+00, 2.8E−06; ATF4, −3.1E+00, 2.5E−04; MARCKS, −3.1E+00, 2.2E−05; DNAJC8, −3.1E+00, 4.5E−05; GPX4, −3.1E+00, |
| | 2.2E−07; SMARCD1, −3.1E+00, 3.4E−06; PSMB4, −3.1E+00, 4.9E−06; CDCA7L, −3.0E+00, 1.1E−04; COX6B1, −3.0E+00, 1.2E−05; PDPN, −3.0E+00, 2.7E−04; |
| | FBL, −3.0E+00, 1.9E−04; FAM60A, −3.0E+00, 6.6E−03; DHX9, −3.0E+00, 6.7E−03; SMC4, −3.0E+00, 6.6E−03; GSPT1, −3.0E+00, 2.5E−04; NDUFB8, −3.0E+00, |
| | 7.7E−07; BCCIP, −3.0E+00, 1.5E−04; PSMD11, −3.0E+00, 5.8E−04; DDX3Y, −3.0E+00, 2.1E−04; HSPE1, −3.0E+00, 5.1E−06; SHFM1, −3.0E+00, 1.5E−04; |
| | ARMT1, −3.0E+00, 1.8E−04; ENY2, −3.0E+00, 3.4E−05; CLTA, −3.0E+00, 1.8E−04; SAP18, −3.0E+00, 1.1E−05; NOL7, −3.0E+00, 1.0E−05; HIST1H2BC, |
| | −3.0E+00, 4.1E−06; TSPAN6, −3.0E+00, 4.6E−06; SLC38A2, −3.0E+00, 5.2E−03; ABRACL, −3.0E+00, 8.9E−06; MCM7, −3.0E+00, 3.5E−05; MTHFD1, −2.9E+00, |
| | 4.1E−04; RARS, −2.9E+00, 5.7E−04; TOMM6, −2.9E+00, 4.3E−07; UGP2, −2.9E+00, 1.8E−03; NR6A1, −2.9E+00, 9.5E−03; LARS, −2.9E+00, 8.6E−03; UBE2V2, |
| | −2.9E+00, 2.4E−04; VDAC1, −2.9E+00, 2.7E−04; ID1, −2.9E+00, 4.8E−06; ACVR2B, −2.9E+00, 4.1E−03; RFC1, −2.9E+00, 2.9E−03; DBN1, −2.9E+00, 7.0E−04; |
| | USP7, −2.9E+00, 3.4E−03; TALDO1, −2.9E+00, 1.6E−05; CD81, −2.9E+00, 4.2E−06; SBNO1, −2.9E+00, 4.0E−03; PRDX3, −2.9E+00, 3.4E−05; MPHOSPH10, |
| | −2.9E+00, 7.2E−06; PSMA6, −2.9E+00, 2.0E−04; PCBP1, −2.9E+00, 1.9E−04; NUFIP2, −2.9E+00, 1.0E−02; RRM1, −2.9E+00, 3.9E−05; RPL13AP5, −2.9E+00, |
| | 1.2E−05; RIF1, −2.9E+00, 8.2E−03; STAG2, −2.9E+00, 1.2E−02; HIST1H2AG, −2.9E+00, 1.8E−04; WDR1, −2.9E+00, 1.2E−03; KHDRBS1, −2.9E+00, 5.9E−03; |
| | TRAM1, −2.8E+00, 1.2E−04; COX3, −2.8E+00, 3.6E−09; DDX24, −2.8E+00, 3.3E−04; GOT2, −2.8E+00, 3.4E−04; DDX17, −2.8E+00, 1.1E−02; MYL12B, |
| | −2.8E+00, 2.3E−05; CCNA2, −2.8E+00, 1.5E−04; PFDN5, −2.8E+00, 1.7E−05; EIF1AX, −2.8E+00, 8.7E−05; PNRC2, −2.8E+00, 9.5E−05; SQLE, −2.8E+00, 4.5E−03; |
| | CENPU, −2.8E+00, 2.4E−03; DNAJC10, −2.8E+00, 3.1E−03; SNHG16, −2.8E+00, 3.3E−04; SAFB, −2.8E+00, 1.7E−03; ELP2, −2.8E+00, 1.2E−03; C6orf62, |
| | −2.8E+00, 5.2E−04; RTF1, −2.8E+00, 4.8E−04; PAFAH1B2, −2.8E+00, 2.9E−03; TMA7, −2.8E+00, 6.5E−06; MRPS21, −2.8E+00, 5.7E−05; NSA2, −2.8E+00, |
| | 2.1E−05; PCNA, −2.8E+00, 2.0E−04; GRSF1, −2.8E+00, 5.7E−04; HNRNPH1, −2.8E+00, 1.6E−02; CWC15, −2.8E+00, 2.2E−06; KNOP1, −2.8E+00, 4.8E−04; |
| | C21orf59, −2.7E+00, 1.9E−04; SCG3, −2.7E+00, 9.2E−05; PPDPF, −2.7E+00, 8.7E−06; UBE2I, −2.7E+00, 7.6E−04; TMPO, −2.7E+00, 1.2E−02; SPTAN1, |
| | −2.7E+00, 1.4E−02; NCBP2, −2.7E+00, 2.3E−04; FRAT2, −2.7E+00, 5.2E−08; VMA21, −2.7E+00, 6.7E−06; SOX11, −2.7E+00, 5.6E−04; RBM12, −2.7E+00, 9.2E−04; |
| | ZNF483, −2.7E+00, 5.8E−03; MRPS34, −2.7E+00, 6.2E−05; USP1, −2.7E+00, 2.7E−03; PPP2R1B, −2.7E+00, 1.3E−04; PSMD7, −2.7E+00, 8.7E−04; LITAF, |
| | −2.7E+00, 9.7E−03; SNRPD1, −2.7E+00, 1.1E−03; RMND5A, −2.7E+00, 4.0E−04; MAGED2, −2.7E+00, 8.3E−05; TCEAL4, −2.7E+00, 6.9E−05; TUBA1A, |
| | −2.7E+00, 1.9E−04; ROR1, −2.7E+00, 1.9E−02; MDH2, −2.7E+00, 1.8E−05; UGDH, −2.7E+00, 5.9E−04; NDUFB9, −2.7E+00, 4.5E−04; TPX2, −2.7E+00, 7.1E−03; |
| | RBBP7, −2.7E+00, 1.2E−03; SUMO1, −2.6E+00, 1.9E−03; RPL41, −2.6E+00, 3.1E−04; GOLGB1, −2.6E+00, 1.7E−02; ERP29, −2.6E+00, 1.4E−04; SNRPE, |
| | −2.6E+00, 7.2E−04; MRPL19, −2.6E+00, 6.9E−05; PCDH7, −2.6E+00, 3.4E−02; PSMC6, −2.6E+00, 2.7E−04; RAD50, −2.6E+00, 1.4E−02; CTR9, −2.6E+00, 2.8E−04; |
| | YME1L1, −2.6E+00, 1.4E−02; PSMC3, −2.6E+00, 9.9E−05; ARPC2, −2.6E+00, 9.3E−03; PSME3, −2.6E+00, 4.9E−04; PDHA1, −2.6E+00, 3.0E−06; TOMM70, |
| | −2.6E+00, 1.1E−03; EIF3K, −2.6E+00, 1.2E−03; HYOU1, −2.6E+00, 3.0E−03; IPO7, −2.6E+00, 3.1E−02; NES, −2.6E+00, 5.2E−03; ND6, −2.6E+00, 1.2E−02; |
| | PWARSN, −2.6E+00, 3.0E−02; DNAJC2, −2.6E+00, 6.4E−04; FZD7, −2.6E+00, 3.8E−05; LMAN1, −2.6E+00, 5.7E−03; SUMO3, −2.6E+00, 2.0E−06; PRMT1, |
| | −2.6E+00, 1.0E−03; GPI, −2.6E+00, 2.0E−03; GADD45GIP1, −2.6E+00, 3.3E−07; MRPS16, −2.6E+00, 1.3E−05; BUB3, −2.6E+00, 3.9E−04; SEC61B, −2.6E+00, |
| | 2.2E−04; DCP2, −2.6E+00, 2.7E−02; PSMC2, −2.6E+00, 6.9E−05; HCFC1, −2.6E+00, 5.5E−04; CHCHD2, −2.6E+00, 9.6E−05; ND4, −2.6E+00, 2.2E−11; PRRC2A, |
| | −2.6E+00, 6.4E−03; TMEM59, −2.6E+00, 7.7E−06; CKS2, −2.6E+00, 4.3E−04; DNAJC7, −2.6E+00, 3.9E−03; DUT, −2.6E+00, 1.9E−03; ZNF146, −2.6E+00, |
| | 1.9E−02; TUBB2B, −2.6E+00, 9.9E−05; SIRT1, −2.6E+00, 9.8E−03; MED1, −2.5E+00, 1.5E−03; FLT1, −2.5E+00, 9.7E−03; RAD23B, −2.5E+00, 2.2E−02; CXADR, |
| | −2.5E+00, 3.2E−02; MCM6, −2.5E+00, 1.8E−02; GMFB, −2.5E+00, 4.1E−04; PPP2R2B, −2.5E+00, 3.4E−02; HSBP1, −2.5E+00, 3.2E−04; RAC1, −2.5E+00, 8.3E−04; |
| | CKB, −2.5E+00, 6.5E−04; ATP5C1, −2.5E+00, 7.4E−04; SPDL1, −2.5E+00, 6.5E−04; EIF1B, −2.5E+00, 7.5E−05; CDV3, −2.5E+00, 2.4E−03; TRIM71, |
| | −2.5E+00, 6.7E−03; SALL4, −2.5E+00, 3.2E−02; F11R, −2.5E+00, 9.8E−03; GPX1, −2.5E+00, 1.0E−05; MCM3, −2.5E+00, 1.6E−02; TRMT10C, −2.5E+00, 3.0E−05; |
| | ARF1, −2.5E+00, 1.5E−03; TIMM13, −2.5E+00, 4.4E−05; LINC00678, −2.5E+00, 8.5E−05; ATP8, −2.5E+00, 3.9E−02; MYH9, −2.5E+00, 2.5E−02; PDCD5, |
| | −2.5E+00, 7.5E−05; PPAT, −2.5E+00, 7.2E−03; BAZ2A, −2.5E+00, 5.3E−03; ATP6VOC, −2.5E+00, 2.2E−06; XPO1, −2.5E+00, 2.0E−02; ACTR3, −2.5E+00, |
| | 1.5E−02; NRBP1, −2.5E+00, 4.4E−04; UBTF, −2.5E+00, 8.7E−04; COX5A, −2.5E+00, 9.8E−04; DDX52, −2.5E+00, 7.5E−05; PRDX5, −2.5E+00, 5.9E−05; MAP1LC3B, |
| | −2.5E+00, 1.0E−05; DAZAP1, −2.5E+00, 3.2E−03; TROVE2, −2.5E+00, 9.9E−03; FXR1, −2.5E+00, 4.6E−02; TPM1, −2.5E+00, 3.3E−02; DDB1, −2.5E+00, 4.4E−03; |
| | TCEB2, −2.5E+00, 2.0E−04; CYTB, −2.5E+00, 2.6E−05; TFDP2, −2.4E+00, 3.9E−02; PSMD4, −2.4E+00, 1.1E−03; HIST1H3E, −2.4E+00, 6.8E−05; EIF2AK1, |
| | −2.4E+00, 1.2E−03; AES, −2.4E+00, 1.6E−05; XPOT, −2.4E+00, 1.8E−02; TAX1BP1, −2.4E+00, 1.9E−02; C9orf78, −2.4E+00, 8.3E−05; PFN2, −2.4E+00, 5.6E−04; |
| | FAM98A, −2.4E+00, 7.9E−04; RRM2, −2.4E+00, 1.9E−03; ITGA6, −2.4E+00, 3.0E−02; AURKAIP1, −2.4E+00, 5.9E−06; TMEM97, −2.4E+00, 3.2E−03; |
| | PSMB6, −2.4E+00, 3.1E−04; MOB1A, −2.4E+00, 3.8E−03; PPA1, −2.4E+00, 2.8E−03; ABCE1, −2.4E+00, 1.0E−02; PRR13, −2.4E+00, 4.8E−06; POLR2L, |
| | −2.4E+00, 4.4E−05; VDAC2, −2.4E+00, 1.8E−03; VBP1, −2.4E+00, 1.9E−04; SRSF5, −2.4E+00, 6.1E−03; PRKAR1A, −2.4E+00, 4.0E−03; UBLCP1, −2.4E+00, |
| | 2.9E−04; ATP51, −2.4E+00, 4.5E−06; IK, −2.4E+00, 1.9E−04; KIF5B, −2.4E+00, 3.3E−02; SRSF2, −2.4E+00, 4.4E−03; ATP5G2, −2.4E+00, 9.6E−04; UBXN7, |
| | −2.4E+00, 2.2E−02; RAB13, −2.4E+00, 1.7E−04; 4.4E+04, −2.4E+00, 4.4E−02; MAD2L2, −2.4E+00, 8.8E−04; VPS29, −2.4E+00, 2.6E−04; RCN2, −2.4E+00, |
| | 1.5E−02; VDAC3, −2.4E+00, 1.5E−04; KHSRP, −2.4E+00, 7.7E−03; LTA4H, −2.4E+00, 2.2E−03; SUDS3, −2.4E+00, 3.3E−03; PERP, −2.4E+00, 4.2E−04; CCND2, |
| | −2.4E+00, 1.3E−02; COX6A1, −2.4E+00, 7.1E−04; METTL5, −2.4E+00, 2.3E−05; SRP54, −2.4E+00, 4.3E−03; RBM27, −2.4E+00, 3.7E−02; UBA2, −2.4E+00, 2.5E−02; |
| | GID8, −2.4E+00, 1.4E−04; NME1, −2.3E+00, 1.8E−06; SARS, −2.3E+00, 2.5E−04; UQCR11, −2.3E+00, 3.6E−05; CPSF2, −2.3E+00, 2.2E−02; UTP11, |
| | −2.3E+00, 1.3E−04; GNAI3, −2.3E+00, 6.0E−03; ATP1A1, −2.3E+00, 1.9E−02; HADHA, −2.3E+00, 1.0E−02; SRP9, −2.3E+00, 1.3E−02; TCEAL9, −2.3E+00, 2.9E−06; |
| | CLSPN, −2.3E+00, 1.3E−02; ND2, −2.3E+00, 5.8E−03; TPM2, −2.3E+00, 2.5E−03; SNRPA1, −2.3E+00, 1.8E−03; MRPL57, −2.3E+00, 1.8E−04; GHITM, |
| | −2.3E+00, 4.9E−04; CAPZA1, −2.3E+00, 3.3E−02; PCDH18, −2.3E+00, 1.8E−03; XPO5, −2.3E+00, 7.7E−04; PSMC5, −2.3E+00, 7.9E−04; MIS18A, −2.3E+00, |
| | 1.3E−04; ZNF460, −2.3E+00, 3.0E−03; CCNB1, −2.3E+00, 3.0E−02; GART, −2.3E+00, 2.9E−02; DNMT3A, −2.3E+00, 2.6E−02; RPN1, −2.3E+00, 3.8E−03; PDHB, |
| | −2.3E+00, 2.0E−03; PTTG1, −2.3E+00, 8.8E−05; ALDH7A1, −2.3E+00, 3.3E−02; PRPF4B, −2.3E+00, 3.7E−02; WBP11, −2.3E+00, 2.3E−03; DHX33, −2.3E+00, |
| | 1.1E−03; NFYB, −2.3E+00, 2.6E−03; SMC2, −2.3E+00, 2.2E−02; MDM2, −2.3E+00, 4.8E−02; FAM213A, −2.3E+00, 9.4E−04; TUBB4B, −2.3E+00, 7.5E−04; |
| | OSTC, −2.3E+00, 5.1E−03; LSM3, −2.3E+00, 8.2E−04; TAF7, −2.3E+00, 5.4E−03; PRDM14, −2.3E+00, 3.9E−02; CCNC, −2.3E+00, 2.0E−03; RMI1, −2.3E+00, |
| | 1.3E−03; PHGDH, −2.3E+00, 2.0E−02; DIS3, −2.3E+00, 1.9E−03; CLU, −2.3E+00, 1.3E−02; GRB2, −2.3E+00, 3.1E−02; BRD3, −2.3E+00, 2.1E−03; RALBP1, |
| | −2.3E+00, 2.2E−03; TIMELESS, −2.3E+00, 3.9E−03; ZCRB1, −2.3E+00, 5.1E−05; CNOT7, −2.3E+00, 5.4E−03; ODC1, −2.3E+00, 5.4E−04; COX7B, −2.2E+00, |
| | 2.9E−04; CUTA, −2.2E+00, 1.1E−04; ND1, −2.2E+00, 6.8E−03; RNF20, −2.2E+00, 2.4E−03; IPW, −2.2E+00, 1.0E−02; ITM2B, −2.2E+00, 6.1E−03; RNF7, |
| | −2.2E+00, 1.8E−04; MCL1, −2.2E+00, 3.2E−02; PTP4A1, −2.2E+00, 6.6E−03; PTP4A2, −2.2E+00, 7.0E−03; CD164, −2.2E+00, 2.3E−03; ZMAT2, −2.2E+00, 2.9E−04; |
| | CASP8AP2, −2.2E+00, 3.4E−02; UQCRC1, −2.2E+00, 6.1E−04; IFITM3, −2.2E+00, 3.0E−05; MAD2L1, −2.2E+00, 4.5E−04; MSN, −2.2E+00, 9.8E−03; |
| | COX7A2, −2.2E+00, 6.2E−03; EIF4EBP2, −2.2E+00, 3.4E−02; ATP5J, −2.2E+00, 2.7E−03; TSR1, −2.2E+00, 2.0E−03; PRIM1, −2.2E+00, 7.4E−04; FERMT2, |
| | −2.2E+00, 2.2E−02; ATP6, −2.2E+00, 9.1E−05; HN1L, −2.2E+00, 4.4E−02; DDX50, −2.2E+00, 7.0E−03; COPA, −2.2E+00, 2.3E−02; GTF2F1, −2.2E+00, 1.5E−04; |
| | ARRDC3, −2.2E+00, 5.0E−04; CNIH4, −2.2E+00, 7.0E−03; HN1, −2.2E+00, 4.1E−03; H2AFV, −2.2E+00, 1.9E−02; ATP1B3, −2.2E+00, 3.0E−02; |
| | LOC107985690, −2.2E+00, 4.9E−04; CDK2AP1, −2.2E+00, 1.2E−04; SLC2A3, −2.2E+00, 2.5E−02; HMMR, −2.2E+00, 2.1E−02; HSPA13, −2.2E+00, 1.4E−04; |
| | GNPDA1, −2.2E+00, 9.8E−04; CDC6, −2.2E+00, 5.5E−03; COPS2, −2.2E+00, 5.1E−03; ROMO1, −2.2E+00, 1.2E−04; CKS1B, −2.2E+00, 1.0E−05; ARL14EPL, |
| | −2.2E+00, 3.0E−05; SLC25A5, −2.1E+00, 7.4E−03; MRPL12, −2.1E+00, 8.8E−04; NIFK, −2.1E+00, 8.1E−04; PRKAR2A, −2.1E+00, 2.5E−03; LSM7, −2.1E+00, |
| | 7.7E−04; ASF1A, −2.1E+00, 2.4E−05; OIP5-AS1, −2.1E+00, 1.9E−02; PTTG1IP, −2.1E+00, 1.3E−02; HIST1H2AH, −2.1E+00, 1.8E−04; KAT7, −2.1E+00, 3.5E−03; |
| | C1QBP, −2.1E+00, 6.1E−03; HIST1H2AL, −2.1E+00, 1.0E−03; VRTN, −2.1E+00, 1.7E−03; RRP15, −2.1E+00, 8.8E−03; HIST1H4D, −2.1E+00, 6.8E−05; |
| | RAB8A, −2.1E+00, 4.0E−04; KDR, −2.1E+00, 3.6E−03; AIF1L, −2.1E+00, 2.1E−03; MRPL15, −2.1E+00, 1.9E−03; GOLGA2, −2.1E+00, 7.5E−05; EIF3D, |
| | −2.1E+00, 8.6E−03; CDC123, −2.1E+00, 3.1E−02; ZNF738, −2.1E+00, 3.2E−02; BEND3, −2.1E+00, 1.6E−02; RNF168, −2.1E+00, 4.0E−02; POMP, −2.1E+00, |
| | 4.3E−03; PAK1IP1, −2.1E+00, 9.5E−04; DPY30, −2.1E+00, 4.0E−03; CDC37, −2.1E+00, 6.1E−03; CSTB, −2.1E+00, 5.0E−04; VIM, −2.1E+00, 1.3E−03; YTHDF2, |
| | −2.1E+00, 5.0E−02; SMIM7, −2.1E+00, 1.6E−03; C19orf53, −2.1E+00, 1.2E−04; GTF3C4, −2.1E+00, 7.5E−03; CASP3, −2.1E+00, 2.1E−03; TMEM261, |
| | −2.1E+00, 1.4E−03; ATP5G1, −2.1E+00, 9.2E−06; UBL5, −2.1E+00, 7.8E−04; DCTN1, −2.1E+00, 7.9E−03; SNRPG, −2.1E+00, 5.3E−04; DANCR, −2.1E+00, |
| | 1.5E−03; TRIM59, −2.1E+00, 7.2E−03; THY1, −2.1E+00, 4.1E−05; TXNDC17, −2.1E+00, 2.2E−03; MTIF2, −2.1E+00, 6.2E−03; HAUS1, −2.1E+00, 9.1E−03; BOD1, |
| | −2.1E+00, 5.4E−04; EIF2A, −2.1E+00, 2.1E−03; KRT19, −2.1E+00, 1.1E−03; RAB5A, −2.1E+00, 4.1E−02; SFRP2, −2.1E+00, 4.8E−04; RAPGEF5, −2.1E+00, |
| | 1.9E−02; UBQLN2, −2.1E+00, 1.8E−04; EIF2S1, −2.0E+00, 1.8E−03; HIST1H3F, −2.0E+00, 1.3E−03; SARAF, −2.0E+00, 1.4E−02; GTF3C6, −2.0E+00, 3.9E−04; |
| | TMEM14C, −2.0E+00, 2.6E−03; U2AF2, −2.0E+00, 2.6E−03; GDE1, −2.0E+00, 3.2E−04; GPATCH4, −2.0E+00, 3.6E−03; CKAP4, −2.0E+00, 4.6E−04; NIPSNAP1, |
| | −2.0E+00, 2.6E−02; CRKL, −2.0E+00, 1.0E−02; RPL7L1, −2.0E+00, 3.3E−02; NCOA4, −2.0E+00, 7.2E−03; NPC2, −2.0E+00, 1.6E−03; AHSA1, −2.0E+00, |
| | 1.4E−03; MRPL11, −2.0E+00, 2.8E−05; ADSL, −2.0E+00, 8.5E−03; SV2A, −2.0E+00, 6.4E−04; CTSV, −2.0E+00, 2.3E−03; KLHL24, −2.0E+00, 3.4E−03; BEX1, |
| | −2.0E+00, 9.4E−05; ARF6, −2.0E+00, 3.6E−04; CARHSP1, −2.0E+00, 2.7E−02; SERINC1, −2.0E+00, 7.5E−03; MT1X, −2.0E+00, 3.1E−05; NCBP1, −2.0E+00, |
| | 1.1E−02; MESDC2, −2.0E+00, 9.0E−03; ANXA5, −2.0E+00, 2.8E−02; MRPL32, −2.0E+00, 1.0E−03; VPS35, −2.0E+00, 1.9E−02; GGCT, −2.0E+00, 1.0E−02; PPIB, |
| | −2.0E+00, 8.7E−05; P4HB, −2.0E+00, 2.8E−02; GTF2A2, −2.0E+00, 2.4E−03; IARS2, −2.0E+00, 2.7E−02; HIST1H2BH, −2.0E+00, 8.5E−03; COX6C, −2.0E+00, |
| | 8.3E−03; DYNLT1, −2.0E+00, 4.3E−05; TCEAL8, −2.0E+00, 1.9E−04; RAB1A, −2.0E+00, 4.6E−02; RPL22L1, −2.0E+00, 1.0E−02; SF3A1, −2.0E+00, 2.7E−03; |
| | HDGF, −2.0E+00, 1.8E−02; STX3, −2.0E+00, 6.0E−03; HTATSF1, −2.0E+00, 7.1E−03; HMGN5, −2.0E+00, 1.6E−03; ASNSD1, −2.0E+00, 3.7E−04; ARPC1A, |
| | −2.0E+00, 4.0E−03; C7orf73, −2.0E+00, 4.1E−04; DYNC1LI1, −2.0E+00, 3.4E−02; GANAB, −1.9E+00, 2.5E−02; ECHS1, −1.9E+00, 6.8E−04; TBCB, −1.9E+00, |
| | 2.8E−04; RDH11, −1.9E+00, 1.0E−02; EXOSC3, −1.9E+00, 5.4E−04; TUFM, −1.9E+00, 1.7E−03; SSR4, −1.9E+00, 2.7E−04; MRPL47, −1.9E+00, 5.2E−03; |
| | NACC1, −1.9E+00, 1.8E−02; TCEB3, −1.9E+00, 4.0E−03; DNAJA2, −1.9E+00, 3.8E−02; ARF4, −1.9E+00, 2.3E−03; 4.4E+04, −1.9E+00, 1.1E−02; UTP14A, |
| | −1.9E+00, 1.1E−04; NDUFB10, −1.9E+00, 4.5E−03; GTPBP4, −1.9E+00, 4.6E−02; DNAJC19, −1.9E+00, 1.2E−03; PFDN4, −1.9E+00, 2.8E−03; UBXN1, −1.9E+00, |
| | 5.9E−04; ZIC3, −1.9E+00, 1.2E−02; NDUFS6, −1.9E+00, 2.3E−02; BCAS2, −1.9E+00, 2.7E−03; VCPIP1, −1.9E+00, 1.0E−03; GPX8, −1.9E+00, 9.3E−04; ERCC6L, |
| | −1.9E+00, 6.8E−04; TOMM22, −1.9E+00, 3.3E−04; PSMC1, −1.9E+00, 2.3E−03; MMADHC, −1.9E+00, 2.9E−02; AP2S1, −1.9E+00, 7.6E−04; EIF3J, −1.9E+00, |
| | 4.4E−02; CNDP2, −1.9E+00, 1.9E−02; MIDN, −1.9E+00, 1.7E−02; SLC1A5, −1.9E+00, 1.7E−02; S100A13, −1.9E+00, 3.8E−04; PWP1, −1.9E+00, 9.0E−03; |
| | EIF4A3, −1.9E+00, 3.8E−03; STAM, −1.8E+00, 3.7E−02; TRAPPC5, −1.8E+00, 5.0E−05; POLD2, −1.8E+00, 1.6E−03; PHAX, −1.8E+00, 2.8E−02; THOC7, |
| | −1.8E+00, 2.6E−03; NDUFAB1, −1.8E+00, 2.1E−02; DLD, −1.8E+00, 3.4E−02; ZNF92, −1.8E+00, 3.5E−02; RNF11, −1.8E+00, 4.6E−03; RBM8A, −1.8E+00, |
| | 1.7E−02; CLNS1A, −1.8E+00, 3.3E−02; ZNF268, −1.8E+00, 1.9E−03; REX02, −1.8E+00, 9.0E−03; MCCC2, −1.8E+00, 3.3E−02; LOC107987279, −1.8E+00, 8.0E−05; |
| | SRRT, −1.8E+00, 3.4E−02; SF3B5, −1.8E+00, 6.0E−05; TSN, −1.8E+00, 1.4E−02; WDR82, −1.8E+00, 1.4E−02; SERF2, −1.8E+00, 4.0E−02; PRDX4, −1.8E+00, |
| | 1.0E−02; MRPL13, −1.8E+00, 3.2E−02; MRPS15, −1.8E+00, 1.1E−02; ARHGD1A, −1.8E+00, 1.4E−03; CLPX, −1.8E+00, 3.4E−02; RIDA, −1.8E+00, 6.2E−05; |
| | HIST1H3H, −1.8E+00, 3.4E−03; COX2, −1.8E+00, 6.4E−03; FTSJ3, −1.8E+00, 1.1E−02; BRK1, −1.8E+00, 5.3E−03; GPN3, −1.8E+00, 1.5E−03; YWHAH, |
| | −1.8E+00, 3.7E−02; RAB5C, −1.8E+00, 1.5E−03; HIST1H31, −1.8E+00, 2.1E−02; BNIP2, −1.8E+00, 2.3E−02; MTCH1, −1.8E+00, 1.6E−02; LRPAP1, −1.8E+00, |
| | 1.6E−02; NEDD8, −1.8E+00, 2.2E−03; MRPS23, −1.8E+00, 1.2E−03; ZFP36L2, −1.8E+00, 1.2E−02; TRMT112, −1.8E+00, 1.2E−03; LINC01356, −1.8E+00, |
| | 7.3E−03; CDH9, −1.8E+00, 1.1E−02; THUMPD3, −1.8E+00, 1.0E−02; HOOK1, −1.8E+00, 2.1E−02; C14orf2, −1.7E+00, 7.8E−03; EMC4, −1.7E+00, 1.7E−03; |
| | NDUFB7, −1.7E+00, 5.4E−03; NDUFB11, −1.7E+00, 4.9E−03; SURF4, −1.7E+00, 1.7E−02; MRPL21, −1.7E+00, 6.6E−03; UTP14C, −1.7E+00, 1.1E−03; |
| | HIST1H2BD, −1.7E+00, 2.3E−02; STT3A, −1.7E+00, 1.7E−02; LOC101927746, −1.7E+00, 1.6E−02; RAB11A, −1.7E+00, 2.3E−02; SCOC, −1.7E+00, 2.6E−03; |
| | NOP10, −1.7E+00, 5.8E−03; MANF, −1.7E+00, 3.2E−03; DRAP1, −1.7E+00, 3.8E−04; SSR2, −1.7E+00, 1.0E−02; PRKCSH, −1.7E+00, 3.1E−02; SLC7A3, |
| | −1.7E+00, 1.9E−02; FRG1, −1.7E+00, 1.4E−04; KIAA1191, −1.7E+00, 1.5E−02; CFAP97, −1.7E+00, 1.4E−02; CEBPG, −1.7E+00, 5.6E−03; POLR3A, −1.7E+00, |
| | 4.6E−02; CCDC58, −1.7E+00, 5.8E−03; TOMM5, −1.7E+00, 1.1E−02; SHISA5, −1.7E+00, 3.3E−02; HIST1H41, −1.7E+00, 4.4E−03; BNIP3L, −1.7E+00, 6.3E−03; |
| | SDHD, −1.7E+00, 7.1E−03; CDK4, −1.7E+00, 3.4E−03; NDUFA5, −1.7E+00, 3.0E−02; PRPS1, −1.7E+00, 3.7E−03; PSMD13, −1.7E+00, 1.0E−02; POLR2K, |
| | −1.6E+00, 2.4E−04; MRPL35, −1.6E+00, 1.1E−03; USMG5, −1.6E+00, 1.4E−02; UTP6, −1.6E+00, 3.1E−02; MRPL9, −1.6E+00, 5.4E−04; EXOSC9, −1.6E+00, |
| | 3.6E−02; UBE2Q1, −1.6E+00, 2.5E−04; CCNK, −1.6E+00, 4.2E−02; NANOG, −1.6E+00, 5.8E−03; VPS4B, −1.6E+00, 3.8E−02; NUDCD2, −1.6E+00, 5.8E−03; |
| | POLR3C, −1.6E+00, 3.7E−03; NAP1L3, −1.6E+00, 9.9E−03; ESCO2, −1.6E+00, 1.2E−02; HSPA14, −1.6E+00, 2.6E−02; PNPLA8, −1.6E+00, 1.2E−02; C5orf51, |
| | −1.6E+00, 2.0E−02; GTF3A, −1.6E+00, 1.3E−02; MPLKIP, −1.6E+00, 1.5E−04; EXOSC8, −1.6E+00, 3.0E−02; KIAA1143, −1.6E+00, 1.5E−02; ALDH3A2, |
| | −1.6E+00, 4.3E−02; COMMD6, −1.6E+00, 7.8E−03; UTP3, −1.6E+00, 3.2E−03; BANF1, −1.6E+00, 5.4E−03; YKT6, −1.6E+00, 2.8E−03; NDUFB5, −1.6E+00, 4.4E−03; |
| | MRPS18B, −1.6E+00, 1.6E−03; HIGD2A, −1.6E+00, 2.4E−04; PEX19, −1.6E+00, 5.4E−04; SNRPB2, −1.6E+00, 3.4E−02; LINC01090, −1.6E+00, 3.5E−02; |
| | ALDH1B1, −1.6E+00, 2.0E−04; BCL7A, −1.6E+00, 9.5E−04; PPID, −1.6E+00, 1.8E−02; WDR77, −1.6E+00, 3.3E−03; MRPL37, −1.6E+00, 1.2E−02; NDUFS8, |
| | −1.6E+00, 1.7E−02; UBFD1, −1.6E+00, 1.3E−02; PSMD3, −1.6E+00, 9.2E−03; TMEM50A, −1.6E+00, 1.8E−02; ZMYM3, −1.6E+00, 1.5E−02; COPS9, −1.6E+00, |
| | 2.8E−03; MRPS7, −1.6E+00, 1.4E−03; LANCL1, −1.6E+00, 1.3E−02; TSPYL1, −1.6E+00, 4.5E−03; CRIP1, −1.6E+00, 1.6E−04; NDUFB6, −1.6E+00, 1.6E−02; |
| | RPA3, −1.6E+00, 3.8E−03; GNG5, −1.6E+00, 7.7E−03; ACTR6, −1.6E+00, 1.3E−03; HIST4H4, −1.5E+00, 8.8E−04; PBX2, −1.5E+00, 7.3E−03; TMX2, −1.5E+00, |
| | 8.4E−04; SH3BGRL3, −1.5E+00, 1.5E−03; ZBTB33, −1.5E+00, 3.2E−04; NDUFA1, −1.5E+00, 1.0E−03; CENPN, −1.5E+00, 1.0E−02; THYN1, −1.5E+00, 3.0E−03; |
| | NUCB1, −1.5E+00, 5.9E−03; BIRC5, −1.5E+00, 2.5E−02; PBDC1, −1.5E+00, 2.2E−02; NGRN, −1.5E+00, 2.6E−02; MCFD2, −1.5E+00, 3.7E−02; TIMM50, |
| | −1.5E+00, 9.3E−03; PSMG1, −1.5E+00, 4.6E−03; GABPA, −1.5E+00, 2.5E−02; BAG4, −1.5E+00, 3.7E−02; SF3A2, −1.5E+00, 7.0E−04; POLR2I, −1.5E+00, |
| | 1.5E−03; MAGOH, −1.5E+00, 4.4E−03; LBH, −1.5E+00, 1.1E−03; UBE2C, −1.5E+00, 2.0E−02; MRPL20, −1.5E+00, 1.3E−02; LYAR, −1.5E+00, 2.6E−02; HMG20B, |
| | −1.5E+00, 1.6E−03; CTSD, −1.5E+00, 1.7E−02; PPP1R15B, −1.5E+00, 3.1E−02; SEC11C, −1.5E+00, 4.0E−03; TMEM183A, −1.5E+00, 9.4E−03; USP39, |
| | −1.5E+00, 2.8E−02; PPP1R7, −1.5E+00, 1.9E−02; MRPL41, −1.5E+00, 6.8E−03; NRBF2, −1.5E+00, 1.6E−03; ARL3, −1.5E+00, 4.0E−02; FLII, −1.5E+00, |
| | 1.3E−02; BAG5, −1.5E+00, 1.2E−02; DCTPP1, −1.5E+00, 7.2E−04; NDUFC1, −1.5E+00, 1.0E−02; XBP1, −1.5E+00, 3.9E−02; NEK2, −1.5E+00, 1.7E−04; UQCRFS1, |
| | −1.5E+00, 2.0E−02; LLPH, −1.5E+00, 1.4E−03; C12orf57, −1.5E+00, 1.9E−02; QARS, −1.5E+00, 3.1E−02; COPS6, −1.5E+00, 1.3E−02; TMEM258, −1.5E+00, |
| | 2.7E−02; CCDC25, −1.5E+00, 2.3E−02; MPP5, −1.5E+00, 6.0E−03; TRIP10, −1.5E+00, 1.1E−02; ALKBH7, −1.5E+00, 1.4E−03; PGAM1, −1.5E+00, 2.0E−02; |
| | DARS2, −1.5E+00, 3.3E−02; MINOS1, −1.4E+00, 1.2E−02; APRT, −1.4E+00, 2.6E−02; POLR2G, −1.4E+00, 6.4E−03; KIAA0430, −1.4E+00, 1.3E−02; MRPS30, |
| | −1.4E+00, 1.4E−02; BAG6, −1.4E+00, 3.1E−02; SRP68, −1.4E+00, 1.7E−02; CLDN7, −1.4E+00, 1.4E−02; CCDC34, −1.4E+00, 4.6E−02; HIST1H2AB, −1.4E+00, |
| | 8.3E−03; SURF6, −1.4E+00, 3.6E−03; SMIM10L1, −1.4E+00, 1.8E−02; MAGOHB, −1.4E+00, 2.3E−02; EXOSC2, −1.4E+00, 4.1E−02; LOC101927721, −1.4E+00, |
| | 7.6E−03; METTL13, −1.4E+00, 2.0E−02; MT1E, −1.4E+00, 1.2E−05; MLLT11, −1.4E+00, 1.0E−02; TRMT6, −1.4E+00, 9.3E−03; CYB5A, −1.4E+00, 3.1E−02; |
| | PHPT1, −1.4E+00, 1.7E−02; HLA-C, −1.4E+00, 1.4E−02; SLC4A1AP, −1.4E+00, 1.7E−02; NTS, −1.4E+00, 7.6E−05; HLA-A, −1.4E+00, 1.3E−02; TGIF2, |
| | −1.4E+00, 1.2E−02; CYC1, −1.4E+00, 9.0E−03; RWDD1, −1.4E+00, 2.3E−02; PSMC4, −1.4E+00, 3.8E−02; PLIN2, −1.4E+00, 2.0E−02; MBD4, −1.4E+00, 4.4E−02; |
| | MT1H, −1.4E+00, 2.3E−04; LY6E, −1.4E+00, 2.6E−03; BLOC1S6, −1.4E+00, 4.6E−02; OAT, −1.4E+00, 3.9E−02; TIMM8B, −1.4E+00, 4.9E−02; OLFML3, |
| | −1.4E+00, 3.0E−02; EI24, −1.4E+00, 3.2E−02; CTGF, −1.4E+00, 1.6E−02; SYF2, −1.4E+00, 1.7E−02; DNAAF2, −1.4E+00, 1.3E−02; PHF23, −1.4E+00, 7.7E−04; |
| | FAM32A, −1.4E+00, 1.4E−02; KRR1, −1.4E+00, 1.7E−02; TTYH3, −1.3E+00, 3.1E−02; NDUFB1, −1.3E+00, 2.3E−02; TSR2, −1.3E+00, 4.8E−03; TIMM10, |
| | −1.3E+00, 4.2E−03; MTERF3, −1.3E+00, 2.0E−02; RND2, −1.3E+00, 3.9E−02; GAL, −1.3E+00, 1.1E−02; HIST1H2BK, −1.3E+00, 4.9E−02; NDUFA3, −1.3E+00, |
| | 2.1E−02; ETFB, −1.3E+00, 7.2E−03; SLC29A1, −1.3E+00, 2.3E−02; ZNF426, −1.3E+00, 4.5E−02; CDC37L1, −1.3E+00, 3.3E−02; OCIAD2, −1.3E+00, 6.6E−03; |
| | CSNK2B, −1.3E+00, 1.2E−02; RNF26, −1.3E+00, 4.6E−03; FKBP1A, −1.3E+00, 3.8E−02; ATP6AP2, −1.3E+00, 4.7E−02; KLHDC3, −1.3E+00, 3.2E−02; C14orf1, |
| | −1.3E+00, 1.1E−02; KLHL9, −1.3E+00, 3.4E−02; GRPEL1, −1.3E+00, 2.8E−03; COX18, −1.3E+00, 3.7E−03; ASS1, −1.3E+00, 4.0E−02; ZNF28, −1.3E+00, |
| | 1.8E−02; MRPL4, −1.3E+00, 3.4E−03; APEH, −1.3E+00, 1.3E−02; CCDC86, −1.3E+00, 2.3E−04; MKNK2, −1.3E+00, 4.4E−02; SLC39A6, −1.3E+00, 4.0E−02; PPP1R2, |
| | −1.3E+00, 1.3E−02; CD59, −1.3E+00, 3.9E−02; MEAF6, −1.3E+00, 3.4E−02; LAMTOR1, −1.2E+00, 1.0E−02; CHRAC1, −1.2E+00, 6.0E−03; EBP, −1.2E+00, 2.2E−02; |
| | ATRAID, −1.2E+00, 1.8E−02; UQCRQ, −1.2E+00, 3.7E−02; SRF, −1.2E+00, 1.1E−02; GSPT2, −1.2E+00, 1.2E−02; DEGS1, −1.2E+00, 2.9E−02; IFITM2, |
| | −1.2E+00, 5.0E−03; GRPEL2, −1.2E+00, 2.2E−02; PPIL1, −1.2E+00, 1.8E−02; ADI1, −1.2E+00, 3.7E−02; FOPNL, −1.2E+00, 4.0E−02; NDUFA8, −1.2E+00, 3.9E−02; |
| | MRPL55, −1.2E+00, 1.2E−03; MRPS33, −1.2E+00, 4.9E−03; TIMM17B, −1.2E+00, 1.0E−03; ERF, −1.2E+00, 2.0E−02; CHCHD1, −1.2E+00, 3.7E−02; ARL16, |
| | −1.2E+00, 7.8E−04; MRPS17, −1.2E+00, 2.5E−02; ABCF2, −1.2E+00, 4.0E−02; EIF2B1, −1.2E+00, 1.8E−02; FUNDC1, −1.2E+00, 3.9E−03; LOC105373177, |
| | −1.2E+00, 9.4E−03; RPS19BP1, −1.2E+00, 1.3E−02; IGFBP2, −1.2E+00, 4.6E−02; DDX20, −1.2E+00, 2.3E−02; COQ10B, −1.2E+00, 9.2E−03; TIMM10B, |
| | −1.2E+00, 2.6E−02; PSMD10, −1.2E+00, 1.8E−02; HIST2H2BF, −1.2E+00, 7.4E−03; HIST1H4F, −1.2E+00, 5.8E−03; CDKN2AIPNL, −1.2E+00, 4.1E−02; UBAC1, |
| | −1.2E+00, 1.8E−02; SNHG6, −1.2E+00, 9.2E−03; POP7, −1.2E+00, 2.9E−02; NOP16, −1.2E+00, 9.2E−03; VANGL2, −1.2E+00, 3.0E−02; TMED7, −1.2E+00, 5.0E−02; |
| | THAP9-AS1, −1.2E+00, 4.1E−02; SYT4, −1.2E+00, 1.8E−03; C11orf57, −1.2E+00, 3.3E−02; ZNHIT1, −1.2E+00, 4.2E−02; SCHLAP1, −1.1E+00, 9.5E−03; |
| | SS18L2, −1.1E+00, 1.9E−02; C12orf10, −1.1E+00, 2.7E−03; SUPT4H1, −1.1E+00, 1.1E−02; FXYD6, −1.1E+00, 4.1E−03; CPNE7, −1.1E+00, 6.0E−03; SEPHS2, |
| | −1.1E+00, 4.4E−02; C16orf13, −1.1E+00, 2.0E−02; TRAPPC4, −1.1E+00, 1.3E−02; MRPL36, −1.1E+00, 4.2E−03; SIVA1, −1.1E+00, 1.3E−02; ATOX1, −1.1E+00, |
| | 8.3E−03; FOXD3-AS1, −1.1E+00, 1.2E−02; HIST1H3J, −1.1E+00, 3.2E−02; NDUFAF4, −1.1E+00, 4.1E−02; RPL26L1, −1.1E+00, 2.4E−02; SNRNP27, −1.1E+00, |
| | 3.6E−02; USF2, −1.1E+00, 4.6E−02; MRPS22, −1.1E+00, 4.6E−02; NUDT1, −1.1E+00, 4.0E−02; UFSP2, −1.1E+00, 1.4E−02; COA6, −1.1E+00, 1.8E−02; |
| | C6orf120, −1.1E+00, 1.0E−02; PDZD4, −1.1E+00, 2.2E−02; NKAP, −1.1E+00, 3.5E−02; TRIAP1, −1.1E+00, 2.0E−02; PQBP1, −1.1E+00, 2.7E−02; CDT1, |
| | −1.1E+00, 3.3E−02; MRPS12, −1.1E+00, 2.7E−03; RBM42, −1.1E+00, 1.9E−02; MRPL28, −1.1E+00, 4.1E−02; ISYNA1, −1.1E+00, 3.8E−02; HIST1H4K, |
| | −1.1E+00, 3.4E−03; TP53RK, −1.0E+00, 7.1E−03; FYTTD1, −1.0E+00, 3.5E−02; AAMP, −1.0E+00, 3.1E−02; LOC101243545, −1.0E+00, 2.4E−02; DCXR, |
| | −1.0E+00, 1.1E−02; CCDC174, −1.0E+00, 1.9E−02; TUBB2A, −1.0E+00, 2.0E−02; HIST2H2AB, −1.0E+00, 4.4E−02; RGS2, −1.0E+00, 4.6E−02; TMEM223, |
| | −1.0E+00, 3.4E−02; WDR46, −1.0E+00, 3.5E−02; TOB1, −1.0E+00, 9.5E−03; PLEKHJ1, −1.0E+00, 3.3E−02; SNRNP25, −1.0E+00, 4.5E−02; MAGEF1, −1.0E+00, |
| | 1.1E−02; MED8, −1.0E+00, 3.2E−03; PIK3C2B, −1.0E+00, 4.1E−02; INA, −1.0E+00, 4.5E−02; HTATIP2, −9.9E−01, 2.5E−02; TMEM41A, −9.8E−01, 2.5E−02; |
| | POLR3K, −9.8E−01, 1.6E−02; C18orf21, −9.7E−01, 4.7E−02; MRPL40, −9.7E−01, 3.4E−03; FABP7, −9.7E−01, 4.4E−03; BMF, −9.6E−01, 8.4E−03; TRIB1, |
| | −9.6E−01, 2.6E−02; IRF2BP2, −9.5E−01, 4.0E−02; WRB, −9.5E−01, 2.8E−03; ACBD7, −9.5E−01, 2.2E−02; ZNF615, −9.4E−01, 3.6E−02; PNMA1, −9.4E−01, 9.6E−03; |
| | RRAGA, −9.4E−01, 1.4E−02; ABT1, −9.3E−01, 1.5E−03; GDF3, −9.3E−01, 3.2E−03; NOL6, −9.2E−01, 2.1E−02; ATP5D, −9.2E−01, 4.0E−02; RIC8A, −9.2E−01, 9.8E−03; |
| | SLC35B1, −9.1E−01, 4.5E−02; COA3, −9.1E−01, 1.0E−02; MN1, −9.1E−01, 3.9E−02; THAP1, −9.1E−01, 1.9E−02; CCDC127, −9.0E−01, 2.7E−02; ZNF184, |
| | −9.0E−01, 3.4E−02; MLST8, −9.0E−01, 4.0E−03; C1orf174, −9.0E−01, 1.9E−02; GIT1, −8.9E−01, 1.6E−02; ITM2A, −8.8E−01, 3.7E−02; FLVCR1-AS1, −8.8E−01, |
| | 7.9E−03; TAGLN, −8.7E−01, 3.3E−02; PRKACA, −8.6E−01, 3.8E−02; FAM96B, −8.6E−01, 4.8E−02; ING2, −8.6E−01, 3.4E−02; FAM210B, −8.5E−01, 4.0E−03; |
| | ZBTB3, −8.3E−01, 2.3E−02; GUK1, −8.3E−01, 4.2E−02; HIST2H2BE, −8.1E−01, 4.4E−02; RNASEH1-AS1, −8.1E−01, 1.9E−02; KCNK6, −8.1E−01, 6.1E−03; COX14, |
| | −7.9E−01, 1.4E−02; ALDOC, −7.9E−01, 3.9E−02; SYT7, −7.9E−01, 1.9E−02; GEMIN4, −7.9E−01, 3.4E−02; LIMD2, −7.8E−01, 3.1E−02; SMIM12, −7.8E−01, 3.8E−02; |
| | VWCE, −7.7E−01, 2.5E−02; PRELID3B, −7.6E−01, 1.1E−02; KLF15, −7.6E−01, 6.3E−03; MTFP1, −7.6E−01, 5.8E−03; MGAT2, −7.5E−01, 3.3E−02; DUSP23, |
| | −7.5E−01, 1.5E−02; AKIP1, −7.5E−01, 1.2E−02; ZNF559, −7.4E−01, 3.8E−02; HINT3, −7.3E−01, 4.9E−02; BIK, −7.2E−01, 2.0E−02; MPG, −7.1E−01, 4.1E−02; |
| | KLHDC8A, −7.1E−01, 4.5E−02; EXOSC6, −6.9E−01, 1.8E−02; NUDT16L1, −6.9E−01, 2.7E−02; RASGRP2, −6.8E−01, 3.4E−02; C11orf71, −6.6E−01, 4.2E−03; |
| | C1orf122, −6.6E−01, 1.4E−02; KLF1, −6.3E−01, 3.3E−02; CST3, −6.2E−01, 5.0E−02; TSSC4, −6.1E−01, 2.7E−02; AIP, −6.1E−01, 1.8E−02; IL27RA, −6.1E−01, 3.5E−02; |
| | ANXA2P3, −5.9E−01, 2.7E−03; RBP1, −5.8E−01, 3.5E−02; DNAJC4, −5.7E−01, 1.4E−02; FBXL15, −5.6E−01, 1.0E−02; UTF1, −5.3E−01, 4.2E−02; CKMT1A, |
| | −5.2E−01, 2.1E−02; TIMP4, −4.8E−01, 2.5E−02; USP27X, −4.4E−01, 1.6E−02; RGS16, −4.1E−01, 4.0E−02; C1orf74, −3.9E−01, 2.3E−02; TCEAL1, −3.8E−01, 9.3E−03; |
| | ZNHIT2, −3.8E−01, 2.4E−02; EFNA3, −3.6E−01, 3.1E−02; ZNF853, −3.4E−01, 9.5E−03; LOC101929541, −3.0E−01, 2.5E−02; PKD2L1, −2.8E−01, 2.5E−02; |
| | LOC105373003, −2.7E−01, 1.9E−02; LOC101929348, 6.9E−02, 4.7E−02; MIR4263, 6.9E−02, 4.7E−02; LOC105370195, 8.4E−02, 4.5E−02; LOC105369545, |
| | 9.8E−02, 4.3E−02; SNORA2B, 1.0E−01, 2.8E−02; LOC105373406, 1.1E−01, 4.6E−02; LOC105374669, 1.2E−01, 3.5E−02; MS4A7, 1.4E−01, 3.6E−02; |
| | LOC100506274, 1.4E−01, 3.7E−02; RNVU1-3, 1.5E−01, 4.6E−02; LOC105375775, 1.5E−01, 3.9E−02; PATE2, 1.5E−01, 4.3E−02; LOC105371760, 1.5E−01, |
| | 2.2E−02; LOC105377559, 1.6E−01, 3.4E−02; LOC105369616, 1.6E−01, 9.7E−03; LOC101927296, 1.7E−01, 4.1E−02; LOC101929524, 1.7E−01, 4.6E−02; |
| | LOC107984631, 1.9E−01, 4.9E−02; ATP6V1B1, 1.9E−01, 4.6E−02; LOC105378410, 2.0E−01, 2.0E−02; HCG8, 2.0E−01, 7.3E−03; LOC105375210, 2.0E−01, |
| | 1.3E−02; LOC105373645, 2.1E−01, 4.0E−02; CCDC190, 2.3E−01, 4.0E−02; LOC107985235, 2.3E−01, 4.2E−02; SNORD14C, 2.3E−01, 1.8E−02; LOC286437, |
| | 2.4E−01, 4.7E−02; LOC105375167, 2.4E−01, 3.8E−02; LOC105371065, 2.4E−01, 4.6E−02; LOC105376603, 2.5E−01, 2.9E−02; NLRP14, 2.5E−01, 1.9E−02; |
| | LOC105379508, 2.6E−01, 4.9E−03; SMARCA5-AS1, 2.6E−01, 6.6E−03; LOC105379613, 2.6E−01, 4.1E−02; LOC105376485, 2.8E−01, 3.5E−02; BTBD16, |
| | 2.8E−01, 3.0E−02; C5orf66, 2.9E−01, 3.5E−02; LOC107986405, 2.9E−01, 3.7E−02; LOC105371161, 3.0E−01, 3.1E−03; LOC107986970, 3.0E−01, 1.8E−02; |
| | LOC105370198, 3.1E−01, 4.6E−02; LOC105369719, 3.2E−01, 2.7E−02; LOC105373684, 3.5E−01, 1.7E−02; LOC105373037, 3.5E−01, 2.2E−02; |
| | LOC107985897, 3.5E−01, 2.2E−02; LOC105370953, 3.5E−01, 1.9E−03; LOC107986643, 3.6E−01, 1.8E−02; TBC1D22A-AS1, 3.7E−01, 3.8E−02; |
| | LOC105369838, 3.7E−01, 2.3E−02; LOC105373511, 3.8E−01, 1.0E−02; LOC339666, 3.8E−01, 9.1E−03; LOC105373578, 3.8E−01, 1.7E−02; LOC105369896, |
| | 3.9E−01, 2.7E−02; ENPP3, 4.1E−01, 1.2E−02; LOC654342, 4.3E−01, 1.8E−02; LINC01049, 4.3E−01, 1.6E−02; TNXB, 4.7E−01, 3.8E−02; LOC105376123, 4.8E−01, |
| | 1.4E−02; LOC105375153, 4.8E−01, 3.8E−02; LOC105369449, 4.8E−01, 4.8E−03; LOC107985342, 4.8E−01, 2.7E−02; LOC107986885, 4.9E−01, 9.8E−03; |
| | TXNRD2, 4.9E−01, 4.7E−02; LOC107986515, 5.0E−01, 3.0E−02; LOC105375902, 5.0E−01, 2.0E−02; LOC283140, 5.1E−01, 3.5E−02; LOC105379151, 5.2E−01, |
| | 1.2E−02; FOXN3-AS2, 5.3E−01, 3.3E−02; LOC105374520, 5.4E−01, 2.3E−04; LOC105376976, 5.4E−01, 2.3E−02; TEKT5, 5.5E−01, 4.1E−02; |
| | LOC105372037, 5.5E−01, 4.3E−02; LOC105379109, 5.5E−01, 3.2E−02; C1orf158, 5.6E−01, 3.0E−02; LOC101928819, 5.6E−01, 1.8E−02; CMKLR1, 5.6E−01, |
| | 2.2E−02; SULT1C2, 5.7E−01, 2.0E−02; MUC19, 5.9E−01, 1.2E−02; MGLL, 5.9E−01, 2.5E−02; ODF3L2, 6.0E−01, 3.7E−02; LOC105379102, 6.1E−01, 2.9E−02; |
| | TRIM58, 6.1E−01, 4.6E−02; ANGPT2, 6.1E−01, 6.7E−04; LOC107986430, 6.2E−01, 1.0E−02; LOC105376087, 6.2E−01, 3.4E−02; STK31, 6.4E−01, 4.4E−03; |
| | SCARA5, 6.5E−01, 7.3E−04; PWAR1, 6.5E−01, 8.8E−03; LOC105370284, 6.6E−01, 1.6E−02; LOC105373813, 6.7E−01, 2.3E−02; LOC105375752, 6.7E−01, |
| | 4.2E−02; LOC105369403, 6.7E−01, 4.4E−02; DOCK8, 6.8E−01, 1.1E−02; CPED1, 6.8E−01, 3.1E−03; LOC107986113, 6.8E−01, 4.4E−03; ANKRD45, 6.8E−01, |
| | 2.9E−03; MPPE1, 6.9E−01, 2.1E−02; LOC101929551, 7.2E−01, 2.4E−02; LOC105374943, 7.2E−01, 1.6E−02; LOC105374264, 7.2E−01, 3.0E−02; FAM13A- |
| | AS1, 7.2E−01, 4.0E−03; RUNX2, 7.3E−01, 3.3E−02; ADGRD1, 7.3E−01, 2.3E−03; MEPE, 7.3E−01, 4.9E−02; LOC105372044, 7.4E−01, 3.8E−02; FAM86DP, |
| | 7.4E−01, 4.4E−02; ATP6V1C2, 7.5E−01, 6.9E−03; LOC105370283, 7.5E−01, 1.6E−02; PTK2B, 7.6E−01, 4.2E−02; LINC00492, 7.6E−01, 4.5E−02; |
| | LOC102724861, 7.7E−01, 3.7E−02; FAM157A, 7.8E−01, 1.8E−03; LOC105379045, 7.8E−01, 4.0E−02; LOC105377177, 7.9E−01, 8.3E−05; LINC01322, 8.0E−01, |
| | 1.7E−03; LOC107985971, 8.0E−01, 3.8E−02; LOC101927239, 8.0E−01, 2.9E−02; LOC105379110, 8.1E−01, 1.5E−03; LOC339874, 8.1E−01, 4.4E−02; |
| | LOC101928331, 8.1E−01, 2.2E−02; AHRR, 8.2E−01, 4.1E−02; LOC105369166, 8.2E−01, 8.5E−03; GRM7-AS3, 8.2E−01, 4.0E−02; LOC105370500, 8.2E−01, |
| | 4.4E−03; LOC105373455, 8.3E−01, 5.0E−02; ARHGAP25, 8.4E−01, 3.6E−03; WDR11-AS1, 8.4E−01, 2.3E−02; LOC105379080, 8.4E−01, 4.0E−03; |
| | LOC105374344, 8.4E−01, 2.6E−02; LOC105378516, 8.7E−01, 8.3E−04; LINC00871, 8.7E−01, 7.0E−03; LOC101928767, 8.8E−01, 4.0E−02; TRPM6, 8.8E−01, |
| | 3.1E−03; LOC102724637, 8.8E−01, 3.5E−02; CASC20, 8.9E−01, 1.2E−02; CPO, 9.0E−01, 1.5E−02; GCM1, 9.1E−01, 1.9E−02; LOC107983974, 9.1E−01, |
| | 4.5E−03; IGSF9, 9.1E−01, 3.2E−02; LOC107986980, 9.3E−01, 1.2E−02; LOC107986620, 9.3E−01, 2.1E−02; DSCAML1, 9.4E−01, 4.8E−03; LOC105377558, |
| | 9.6E−01, 7.4E−03; LOC105371671, 9.6E−01, 2.3E−02; SLC01C1, 9.7E−01, 4.3E−02; LINC00383, 9.7E−01, 2.5E−03; LOC105370803, 9.9E−01, 1.3E−02; IL15, |
| | 9.9E−01, 1.9E−02; NPNT, 9.9E−01, 2.5E−02; CD48, 9.9E−01, 7.9E−03; TOM1L2, 1.0E+00, 1.6E−02; LOC101928765, 1.0E+00, 4.0E−03; GPR89A, 1.0E+00, |
| | 4.4E−02; CNTN6, 1.0E+00, 2.9E−03; ZRANB2-AS2, 1.0E+00, 5.6E−03; PI15, 1.0E+00, 1.1E−02; LOC101927550, 1.0E+00, 3.8E−02; RNF212, 1.1E+00, 8.3E−03; |
| | LOC101927286, 1.1E+00, 2.1E−02; LOC102724858, 1.1E+00, 3.9E−03; SH3D21, 1.1E+00, 3.7E−02; PPP1R1C, 1.1E+00, 1.6E−02; FLVCR2, 1.1E+00, |
| | 3.4E−02; LOC101929028, 1.1E+00, 1.8E−02; CCDC169-SOHLH2, 1.1E+00, 1.7E−02; LOC107986313, 1.1E+00, 4.3E−02; LOC105374010, 1.1E+00, 7.6E−03; |
| | LOC102724542, 1.1E+00, 2.5E−02; ZNF800, 1.1E+00, 2.4E−02; LOC105375181, 1.1E+00, 1.1E−02; LINC00645, 1.1E+00, 2.1E−03; LM03, 1.2E+00, |
| | 3.2E−02; LOC105371077, 1.2E+00, 1.9E−02; LOC105375817, 1.2E+00, 2.2E−04; C12orf42, 1.2E+00, 2.5E−04; LOC105373187, 1.2E+00, 1.1E−02; |
| | LOC105379005, 1.2E+00, 3.6E−02; FGL1, 1.2E+00, 1.0E−05; LOC105376126, 1.2E+00, 4.0E−04; LOC101929549, 1.2E+00, 3.7E−02; LOC105375721, |
| | 1.2E+00, 3.7E−03; WNT3, 1.2E+00, 2.2E−03; DET1, 1.2E+00, 7.3E−03; LINC00648, 1.2E+00, 8.3E−03; LOC105369863, 1.2E+00, 1.6E−03; ADAMTSL4− |
| | AS1, 1.2E+00, 2.9E−02; PAPPA, 1.2E+00, 4.9E−02; LOC105377261, 1.2E+00, 1.1E−04; EPHA1-AS1, 1.3E+00, 1.3E−02; NLRP12, 1.3E+00, 7.3E−03; |
| | WNT9A, 1.3E+00, 6.6E−04; RNF165, 1.3E+00, 6.7E−03; LOC107985172, 1.3E+00, 2.1E−02; LOC105370982, 1.3E+00, 4.1E−03; A4GALT, 1.3E+00, 3.1E−02; |
| | EML6, 1.3E+00, 1.0E−02; LOC101926941, 1.3E+00, 1.3E−02; LOC105373831, 1.3E+00, 1.6E−03; PQLC1, 1.3E+00, 1.2E−02; MX1, 1.3E+00, 8.2E−03; |
| | PBX4, 1.3E+00, 6.5E−03; LDLRAD4, 1.3E+00, 1.7E−02; METAP1D, 1.3E+00, 2.2E−02; ACER2, 1.3E+00, 4.9E−02; FYCO1, 1.3E+00, 2.9E−02; GRIP2, |
| | 1.3E+00, 1.4E−02; GPR141, 1.3E+00, 4.4E−05; LOC105370921, 1.3E+00, 1.5E−02; TMEM117, 1.3E+00, 3.7E−02; ITGA1, 1.4E+00, 3.1E−02; TEC, 1.4E+00, |
| | 2.2E−02; MCTP2, 1.4E+00, 6.7E−03; LOC105369942, 1.4E+00, 3.4E−03; SYNPO2, 1.4E+00, 3.1E−02; LOC105373691, 1.4E+00, 1.2E−06; LOC107986294, |
| | 1.4E+00, 4.0E−02; LOC105374122, 1.4E+00, 9.8E−03; PIK3AP1, 1.4E+00, 3.3E−02; EPHB2, 1.4E+00, 4.4E−02; KANTR, 1.4E+00, 1.5E−02; CCDC7, 1.4E+00, |
| | 1.8E−03; CNOT6L, 1.4E+00, 1.8E−02; PLSCR4, 1.4E+00, 3.4E−03; GAS6, 1.4E+00, 2.0E−03; LINC00641, 1.4E+00, 7.1E−03; CYB5R4, 1.5E+00, 2.2E−02; |
| | TSNARE1, 1.5E+00, 4.2E−02; UBASH3B, 1.5E+00, 2.1E−02; FAM110B, 1.5E+00, 4.8E−02; LOC107984258, 1.5E+00, 6.2E−03; NBPF11, 1.5E+00, 1.5E−03; |
| | LOC102724880, 1.5E+00, 6.6E−06; LOC105373900, 1.5E+00, 9.0E−03; LOC105375704, 1.5E+00, 2.0E−03; LM07, 1.5E+00, 1.9E−02; ZSCAN5A, 1.5E+00, |
| | 3.9E−02; PRKCH, 1.5E+00, 3.8E−03; LINC01416, 1.5E+00, 3.6E−02; ZYG11A, 1.5E+00, 2.8E−02; EPB41L1, 1.5E+00, 4.9E−02; SLIT3, 1.5E+00, 2.2E−02; |
| | DYNC111, 1.5E+00, 1.6E−02; CHST8, 1.5E+00, 3.7E−02; THUMPD3-AS1, 1.5E+00, 3.5E−02; TBC1D19, 1.6E+00, 2.7E−02; EFR3B, 1.6E+00, 6.2E−03; |
| | LOC105373158, 1.6E+00, 1.6E−04; LOC107984570, 1.6E+00, 6.2E−04; LOC101927768, 1.6E+00, 2.6E−02; LOC105369944, 1.6E+00, 1.9E−03; |
| | MIR99AHG, 1.6E+00, 7.1E−05; NSUN3, 1.6E+00, 4.1E−03; TPTE2P1, 1.6E+00, 5.4E−03; COLEC12, 1.6E+00, 1.2E−02; NPFFR2, 1.6E+00, 1.5E−03; TRIM16, |
| | 1.6E+00, 1.6E−02; LOC107984494, 1.6E+00, 6.4E−04; POLK, 1.6E+00, 1.5E−02; LOC105374656, 1.6E+00, 8.2E−12; LOC107987100, 1.6E+00, 6.8E−03; |
| | APLF, 1.6E+00, 2.9E−02; PDXDC2P, 1.6E+00, 4.5E−02; TVP23C−CDRT4, 1.6E+00, 4.0E−02; USP12, 1.6E+00, 3.4E−02; LOC105369168, 1.6E+00, 7.5E−04; |
| | MTBP, 1.6E+00, 4.2E−02; LOC107987043, 1.6E+00, 1.4E−05; CCDC57, 1.6E+00, 4.5E−02; TESK2, 1.7E+00, 3.5E−02; NOCT, 1.7E+00, 1.4E−02; BANP, |
| | 1.7E+00, 3.4E−02; LINC00491, 1.7E+00, 2.9E−04; C8orf34, 1.7E+00, 6.3E−03; ZNF516, 1.7E+00, 1.0E−02; XRRA1, 1.7E+00, 3.8E−02; LOC107985647, |
| | 1.7E+00, 2.7E−02; GALNT8, 1.7E+00, 2.3E−03; ST7L, 1.7E+00, 3.6E−02; LOC107985325, 1.7E+00, 2.3E−04; PARK2, 1.7E+00, 4.4E−02; PCGF3, 1.7E+00, |
| | 3.4E−02; LOC101929563, 1.7E+00, 6.7E−03; RAB3IP, 1.8E+00, 2.2E−02; PEX14, 1.8E+00, 4.5E−02; DSCAM, 1.8E+00, 4.3E−04; UNC5B, 1.8E+00, 1.7E−02; |
| | DYSF, 1.8E+00, 2.5E−03; ARRB1, 1.8E+00, 1.4E−02; CDHR3, 1.8E+00, 2.0E−02; CHCHD6, 1.8E+00, 4.1E−02; ANO5, 1.8E+00, 2.3E−02; LOC101928565, |
| | 1.8E+00, 2.1E−04; C4orf19, 1.8E+00, 5.3E−04; LOC107985704, 1.8E+00, 8.8E−03; BBOX1-AS1, 1.8E+00, 8.0E−04; NAPB, 1.8E+00, 4.7E−03; SIK2, |
| | 1.8E+00, 1.3E−02; LOC105373456, 1.8E+00, 9.5E−03; LOC102723694, 1.8E+00, 2.0E−03; FBXL4, 1.8E+00, 3.8E−02; TGFBR2, 1.8E+00, 3.2E−03; |
| | LINC01108, 1.9E+00, 7.8E−04; ELF1, 1.9E+00, 4.4E−02; STON2, 1.9E+00, 4.7E−02; RNF217, 1.9E+00, 1.5E−02; LOC105372130, 1.9E+00, 2.1E−03; |
| | LOC107986066, 1.9E+00, 4.9E−04; LONP2, 1.9E+00, 1.4E−02; UQCC1, 1.9E+00, 3.2E−02; LOC105374971, 1.9E+00, 4.0E−03; SLC23A2, 1.9E+00, |
| | 1.8E−02; AGBL1, 1.9E+00, 3.0E−06; LOC349160, 1.9E+00, 2.0E−05; PINX1, 1.9E+00, 3.0E−02; NOVA1, 1.9E+00, 4.9E−02; LOC100507006, 1.9E+00, 1.2E−02; |
| | NNT, 1.9E+00, 3.7E−03; AKAP10, 1.9E+00, 4.6E−02; TAF1B, 1.9E+00, 2.0E−02; RDH13, 1.9E+00, 1.8E−03; MTSS1, 1.9E+00, 1.2E−02; SFSWAP, 1.9E+00, |
| | 4.0E−02; DDHD1, 1.9E+00, 3.6E−02; ACSS3, 2.0E+00, 4.5E−02; TMEM161B, 2.0E+00, 3.1E−02; LOC107987296, 2.0E+00, 5.8E−08; HS3ST3A1, 2.0E+00, |
| | 3.0E−03; LOC105373785, 2.0E+00, 2.0E−03; ZFYVE16, 2.0E+00, 2.0E−02; CASC9, 2.0E+00, 4.9E−03; NUP50-AS1, 2.0E+00, 7.1E−03; KLHDC10, 2.0E+00, |
| | 1.0E−02; LOC105370777, 2.0E+00, 1.2E−03; CMC1, 2.0E+00, 2.1E−02; ARHGAP10, 2.0E+00, 2.1E−03; SPOP, 2.0E+00, 2.6E−03; DENND5A, 2.0E+00, 2.4E−02; |
| | MICU3, 2.0E+00, 5.3E−03; RABGEF1, 2.0E+00, 4.1E−02; TMEM120B, 2.0E+00, 7.5E−03; RIC1, 2.0E+00, 2.1E−02; TEAD4, 2.0E+00, 1.3E−02; |
| | LOC101929147, 2.0E+00, 1.8E−02; LOC105372950, 2.0E+00, 3.6E−07; CHM, 2.0E+00, 2.6E−02; EVC2, 2.0E+00, 2.1E−03; FGGY, 2.0E+00, 2.1E−02; |
| | LINC01456, 2.0E+00, 3.6E−03; C5orf42, 2.1E+00, 2.7E−02; LOC105370504, 2.1E+00, 2.0E−02; USH2A, 2.1E+00, 1.5E−03; KPNA1, 2.1E+00, 3.4E−02; |
| | SERGEF, 2.1E+00, 9.2E−03; DEPTOR, 2.1E+00, 5.3E−03; LOC105370456, 2.1E+00, 5.3E−04; JMJD1C, 2.1E+00, 4.2E−02; ENOSF1, 2.1E+00, 3.9E−02; |
| | SFMBT2, 2.1E+00, 1.9E−02; SPINK5, 2.1E+00, 3.3E−03; DISC1FP1, 2.1E+00, 8.5E−04; GRIA4, 2.1E+00, 4.9E−04; SMAD3, 2.1E+00, 6.8E−03; RAB12, |
| | 2.1E+00, 1.6E−02; TRAK1, 2.1E+00, 3.2E−02; ARMC8, 2.1E+00, 2.5E−02; CEP95, 2.1E+00, 2.9E−02; ZDHHC21, 2.1E+00, 3.2E−02; RYR1, 2.1E+00, |
| | 1.0E−02; CCDC109B, 2.1E+00, 4.4E−03; KC6, 2.1E+00, 3.5E−05; TRAPPC12, 2.1E+00, 1.4E−02; LOC105378030, 2.1E+00, 2.6E−03; NUBPL, 2.1E+00, 3.8E−03; |
| | COX10, 2.1E+00, 8.6E−03; AFF2, 2.1E+00, 2.6E−02; GALK2, 2.1E+00, 1.7E−03; SYNPR, 2.2E+00, 6.3E−04; ZNRF1, 2.2E+00, 2.9E−02; VSNL1, 2.2E+00, |
| | 3.4E−03; LOC105374020, 2.2E+00, 7.9E−05; PDZRN3, 2.2E+00, 3.5E−02; XRCC4, 2.2E+00, 2.1E−02; SLC25A12, 2.2E+00, 2.7E−03; DENND1B, 2.2E+00, |
| | 1.3E−03; EPHA7, 2.2E+00, 7.7E−03; EFCAB13, 2.2E+00, 2.1E−03; MON2, 2.2E+00, 3.5E−02; LOC107984117, 2.2E+00, 1.8E−12; PMEPA1, 2.2E+00, 2.0E−04; |
| | STXBP4, 2.2E+00, 2.8E−02; MFAP3L, 2.2E+00, 3.1E−04; ZNF75D, 2.2E+00, 3.2E−02; GPCPD1, 2.2E+00, 4.2E−03; FTX, 2.2E+00, 4.7E−02; VWDE, |
| | 2.2E+00, 3.5E−02; SENP5, 2.2E+00, 2.2E−02; MAST2, 2.2E+00, 2.7E−02; MIR4435-2HG, 2.2E+00, 7.0E−06; LOC101927605, 2.2E+00, 4.9E−04; |
| | LOC100505498, 2.2E+00, 2.0E−04; MBOAT1, 2.2E+00, 2.6E−05; KCNIP4, 2.2E+00, 8.8E−03; LOC107985165, 2.2E+00, 4.0E−03; ZNF91, 2.3E+00, 3.9E−02; |
| | RASGRF2, 2.3E+00, 2.0E−03; MAGI3, 2.3E+00, 3.6E−02; EVI5, 2.3E+00, 2.0E−02; NSMAF, 2.3E+00, 2.3E−03; LOC105369427, 2.3E+00, 1.3E−09; |
| | KIAA1468, 2.3E+00, 2.5E−02; EEA1, 2.3E+00, 3.3E−02; LINC01508, 2.3E+00, 8.2E−03; HIRA, 2.3E+00, 4.0E−03; ZC3H12C, 2.3E+00, 1.1E−03; IMMP1L, |
| | 2.3E+00, 1.2E−02; LOC101928923, 2.3E+00, 3.1E−03; LOC105377134, 2.3E+00, 2.6E−02; PLCE1, 2.3E+00, 7.6E−07; KLRG2, 2.3E+00, 3.8E−03; |
| | LOC102724623, 2.3E+00, 5.2E−05; SEMA6D, 2.3E+00, 3.9E−04; STX8, 2.3E+00, 1.7E−02; CAMK2D, 2.3E+00, 3.0E−03; ANKDD1B, 2.3E+00, 2.6E−06; |
| | ACVR1, 2.3E+00, 4.0E−03; ALG13, 2.3E+00, 3.0E−02; SAMD12, 2.3E+00, 2.3E−02; HTT, 2.3E+00, 3.1E−02; TLE4, 2.3E+00, 3.1E−02; TSEN2, 2.4E+00, 2.4E−03; |
| | MED27, 2.4E+00, 9.9E−03; PIBF1, 2.4E+00, 2.3E−02; LOC105375161, 2.4E+00, 3.5E−06; MBOAT2, 2.4E+00, 1.8E−02; HOOK3, 2.4E+00, 9.3E−03; |
| | WIPF3, 2.4E+00, 4.1E−04; LOC102724001, 2.4E+00, 9.7E−03; DENND4C, 2.4E+00, 1.7E−02; MPRIP, 2.4E+00, 8.3E−03; DNAJC15, 2.4E+00, 4.2E−05; |
| | CLEC16A, 2.4E+00, 6.4E−03; GRB10, 2.4E+00, 4.3E−02; HHLA1, 2.4E+00, 2.6E−02; RAD54B, 2.4E+00, 1.4E−02; FAM78B, 2.4E+00, 5.5E−06; MAGED1, |
| | 2.4E+00, 4.7E−02; WRN, 2.4E+00, 3.5E−02; ME1, 2.4E+00, 2.4E−04; CCDC150, 2.4E+00, 8.5E−03; LIMK2, 2.4E+00, 2.0E−03; RIMKLB, 2.4E+00, 3.6E−02; |
| | UBE2W, 2.4E+00, 3.0E−02; RCOR3, 2.4E+00, 5.6E−03; KIAA1328, 2.4E+00, 8.6E−03; MAD1L1, 2.4E+00, 1.2E−02; MGMT, 2.4E+00, 5.8E−03; ATXN2, |
| | 2.4E+00, 4.3E−02; NRF1, 2.4E+00, 1.5E−02; PRR16, 2.4E+00, 2.2E−02; XYLT1, 2.4E+00, 2.8E−02; PSD3, 2.4E+00, 4.1E−02; CCSER2, 2.4E+00, 2.1E−02; |
| | RCOR1, 2.5E+00, 4.0E−02; DDX31, 2.5E+00, 8.6E−04; CBLB, 2.5E+00, 2.5E−02; GAB2, 2.5E+00, 1.7E−03; MAML3, 2.5E+00, 1.4E−02; SIPA1L2, 2.5E+00, |
| | 2.3E−03; UBE2E3, 2.5E+00, 2.8E−02; EMSY, 2.5E+00, 1.4E−02; KLF7, 2.5E+00, 9.0E−03; NDUFAF2, 2.5E+00, 3.7E−03; TXLNGY, 2.5E+00, 1.6E−02; MYO19, |
| | 2.5E+00, 1.0E−02; UBE3D, 2.5E+00, 3.6E−02; RAB28, 2.5E+00, 1.8E−02; PDE7A, 2.5E+00, 1.4E−02; ZC3H12B, 2.5E+00, 4.9E−02; LOC105369791, |
| | 2.5E+00, 3.0E−05; CHSY1, 2.5E+00, 7.8E−03; RELL1, 2.5E+00, 1.3E−04; FAM13A, 2.5E+00, 1.9E−02; TBCA, 2.5E+00, 1.0E−02; NEB, 2.5E+00, 1.0E−03; |
| | C11orf49, 2.5E+00, 8.5E−03; CNTLN, 2.5E+00, 4.0E−02; MBNL1, 2.5E+00, 1.1E−02; MAGI1, 2.5E+00, 6.1E−03; C2CD5, 2.5E+00, 1.2E−02; ACOXL, 2.5E+00, |
| | 3.5E−02; TENM4, 2.5E+00, 3.1E−02; HTR2C, 2.5E+00, 5.7E−03; LYPLAL1, 2.5E+00, 8.0E−03; UVRAG, 2.5E+00, 2.0E−02; NEK7, 2.5E+00, 3.9E−03; POT1, |
| | 2.5E+00, 4.0E−04; CDK5RAP2, 2.5E+00, 1.9E−02; STOX2, 2.5E+00, 2.3E−03; PARD3, 2.5E+00, 1.8E−02; SENP7, 2.5E+00, 2.3E−04; LINC01060, 2.5E+00, |
| | 4.4E−03; 4.4E+04, 2.6E+00, 3.8E−03; MYO5A, 2.6E+00, 5.7E−03; TJP2, 2.6E+00, 3.5E−02; PCMTD1, 2.6E+00, 1.9E−02; GATAD2B, 2.6E+00, 1.9E−02; |
| | ATF7IP2, 2.6E+00, 5.6E−03; CHCHD3, 2.6E+00, 3.4E−02; SND1, 2.6E+00, 3.1E−02; VRK2, 2.6E+00, 9.8E−03; USP32, 2.6E+00, 3.5E−02; CHD9, 2.6E+00, |
| | 3.6E−02; CEP192, 2.6E+00, 1.8E−02; TACC2, 2.6E+00, 1.2E−03; LDLRAD3, 2.6E+00, 2.7E−02; WDR33, 2.6E+00, 1.8E−02; PHKB, 2.6E+00, 9.7E−03; |
| | LOC107986724, 2.6E+00, 9.1E−08; RSRC1, 2.6E+00, 2.2E−02; LUZP2, 2.6E+00, 2.5E−02; CLASP2, 2.6E+00, 3.0E−02; RGL1, 2.6E+00, 1.5E−05; ATG5, |
| | 2.6E+00, 6.9E−03; FAM135A, 2.6E+00, 1.6E−02; SCN8A, 2.6E+00, 2.3E−02; CRMP1, 2.6E+00, 1.5E−03; PTAR1, 2.6E+00, 3.3E−02; LINC00630, 2.6E+00, |
| | 4.9E−05; BMPR2, 2.6E+00, 1.9E−02; CHN1, 2.7E+00, 2.2E−02; JARID2, 2.7E+00, 1.4E−03; TRIML2, 2.7E+00, 1.2E−04; LOC105370463, 2.7E+00, 1.7E−08; |
| | KIRREL1, 2.7E+00, 4.2E−03; LOC105373703, 2.7E+00, 3.9E−05; SUZ12P1, 2.7E+00, 2.3E−02; FOXP1, 2.7E+00, 2.2E−02; FRYL, 2.7E+00, 2.2E−02; NARS2, |
| | 2.7E+00, 3.3E−03; KDM6A, 2.7E+00, 2.9E−02; FMNL2, 2.7E+00, 3.3E−02; PDE5A, 2.7E+00, 4.5E−03; SUCLG2, 2.7E+00, 8.5E−03; RPTOR, 2.7E+00, 4.0E−03; |
| | FYN, 2.7E+00, 6.0E−03; CDH8, 2.7E+00, 1.8E−03; PRKCQ, 2.7E+00, 6.9E−04; INVS, 2.7E+00, 6.0E−03; RAPGEF6, 2.7E+00, 7.6E−03; LDAH, 2.7E+00, |
| | 3.5E−03; ATXN7, 2.7E+00, 7.6E−04; LOC107987087, 2.7E+00, 1.8E−02; ASTN2, 2.7E+00, 2.0E−02; XP04, 2.7E+00, 1.2E−02; COL4A2, 2.7E+00, 5.8E−03; |
| | CRIM1, 2.7E+00, 9.9E−03; GLI2, 2.7E+00, 2.2E−02; MYO3A, 2.7E+00, 1.0E−04; WWOX, 2.7E+00, 2.1E−02; CTDSPL, 2.8E+00, 4.0E−03; STK3, 2.8E+00, |
| | 9.0E−03; FGF12, 2.8E+00, 5.1E−03; LOC107985675, 2.8E+00, 1.5E−02; TTLL5, 2.8E+00, 1.3E−02; TRIO, 2.8E+00, 1.9E−02; ARHGAP32, 2.8E+00, 1.6E−02; |
| | FLRT2, 2.8E+00, 1.1E−04; FEZ2, 2.8E+00, 3.1E−04; ZNF609, 2.8E+00, 1.1E−02; CENPC, 2.8E+00, 4.0E−04; RRAS2, 2.8E+00, 1.7E−02; MALAT1, 2.8E+00, |
| | 7.4E−11; ASH1L, 2.8E+00, 1.5E−02; ATG7, 2.8E+00, 3.2E−03; NCOA2, 2.8E+00, 1.5E−02; PKD1L1, 2.8E+00, 2.0E−07; KMT2C, 2.8E+00, 1.8E−02; SLCO1A2, |
| | 2.8E+00, 1.3E−06; RAP1GDS1, 2.8E+00, 3.0E−03; LOC101929095, 2.8E+00, 4.0E−04; UBR3, 2.8E+00, 2.4E−03; AKT3, 2.8E+00, 1.3E−02; LINC01250, |
| | 2.8E+00, 7.7E−14; ERCC8, 2.8E+00, 8.1E−04; ITCH, 2.8E+00, 4.7E−03; MMS22L, 2.8E+00, 1.2E−02; HSD17B12, 2.8E+00, 1.8E−02; LOC105371953, |
| | 2.8E+00, 1.2E−04; LOC100133091, 2.8E+00, 5.0E−03; ANKRD12, 2.8E+00, 7.8E−03; MMP16, 2.8E+00, 9.9E−03; ANKRD11, 2.8E+00, 1.4E−02; HERC4, |
| | 2.8E+00, 9.7E−03; PKP4, 2.8E+00, 1.4E−02; GPATCH2, 2.8E+00, 3.8E−03; RIMS2, 2.9E+00, 9.0E−04; TNRC6A, 2.9E+00, 9.8E−03; GALNT13, 2.9E+00, |
| | 1.5E−02; KCNH8, 2.9E+00, 8.9E−04; MAN1C1, 2.9E+00, 3.8E−06; CAMTA1, 2.9E+00, 1.2E−02; ETNK1, 2.9E+00, 9.3E−03; CCNY, 2.9E+00, 9.5E−03; MICAL3, |
| | 2.9E+00, 1.9E−03; GRIK2, 2.9E+00, 4.5E−05; VPS54, 2.9E+00, 2.2E−03; PDZD2, 2.9E+00, 5.0E−03; GSTCD, 2.9E+00, 2.2E−03; LOC105370108, 2.9E+00, |
| | 5.2E−04; GRIP1, 2.9E+00, 9.6E−03; SRBD1, 2.9E+00, 6.5E−03; AGBL4, 2.9E+00, 3.2E−04; NTN4, 2.9E+00, 1.5E−04; KCNJ3, 2.9E+00, 5.9E−05; UBE3C, |
| | 2.9E+00, 7.4E−03; IL34, 2.9E+00, 3.9E−05; HIBCH, 2.9E+00, 2.8E−03; CELF2, 2.9E+00, 3.9E−03; PCDH11Y, 2.9E+00, 9.0E−05; SLC2A13, 2.9E+00, 2.9E−04; |
| | KCND2, 3.0E+00, 1.1E−02; PCDH15, 3.0E+00, 9.8E−08; FNDC3A, 3.0E+00, 5.9E−03; AGFG1, 3.0E+00, 2.1E−03; CACNA1C, 3.0E+00, 1.9E−05; PARD3B, |
| | 3.0E+00, 6.2E−03; MUC4, 3.0E+00, 6.3E−07; STAG1, 3.0E+00, 1.0E−02; STRN3, 3.0E+00, 6.8E−03; ARHGEF7, 3.0E+00, 2.3E−03; EIPR1, 3.0E+00, 7.5E−04; |
| | RTTN, 3.0E+00, 4.2E−04; MLLT10, 3.0E+00, 8.2E−03; VSIG10, 3.0E+00, 3.5E−03; EHMT1, 3.0E+00, 7.9E−03; RIN2, 3.0E+00, 8.0E−09; KIAA1958, 3.0E+00, |
| | 8.2E−03; CRPPA, 3.0E+00, 2.8E−07; NSMCE2, 3.0E+00, 6.6E−03; DMD, 3.0E+00, 2.3E−02; LOC107986638, 3.0E+00, 1.6E−05; SORBS1, 3.0E+00, 5.0E−03; |
| | CPNE8, 3.0E+00, 1.4E−06; BAZ2B, 3.0E+00, 6.7E−03; RALYL, 3.0E+00, 8.8E−04; PDE3B, 3.0E+00, 6.4E−04; CACNB2, 3.0E+00, 1.1E−03; SLC25A16, |
| | 3.1E+00, 4.3E−05; CEP128, 3.1E+00, 4.2E−03; PLEKHG4B, 3.1E+00, 3.5E−03; UTY, 3.1E+00, 6.7E−03; RUNX1T1, 3.1E+00, 2.0E−03; WDR27, 3.1E+00, |
| | 3.4E−03; TBC1D32, 3.1E+00, 1.7E−03; LOC105378800, 3.1E+00, 5.2E−11; NETO2, 3.1E+00, 2.4E−04; HDAC4, 3.1E+00, 2.5E−03; FOCAD, 3.1E+00, 4.4E−03; |
| | TBC1D23, 3.1E+00, 1.6E−03; TBCK, 3.1E+00, 3.6E−03; KLF12, 3.1E+00, 5.8E−03; DAPK1, 3.1E+00, 5.5E−03; FNDC3B, 3.1E+00, 7.3E−03; DST, 3.1E+00, |
| | 3.9E−04; TTTY14, 3.1E+00, 3.6E−03; SRGAP1, 3.1E+00, 1.8E−04; DIP2C, 3.1E+00, 3.5E−03; LOC105369876, 3.1E+00, 1.7E−06; STX18-AS1, 3.1E+00, 7.5E−04; |
| | ATG10, 3.1E+00, 1.6E−03; KCNQ10T1, 3.2E+00, 2.7E−03; ELP4, 3.2E+00, 2.3E−03; LPP, 3.2E+00, 5.5E−03; MTHFD1L, 3.2E+00, 2.6E−03; |
| | LOC105374657, 3.2E+00, 9.3E−05; SDHAP3, 3.2E+00, 1.2E−04; FBXL7, 3.2E+00, 2.9E−03; CDC42BPA, 3.2E+00, 3.6E−03; FAM160A1, 3.2E+00, 4.1E−03; |
| | TRMT11, 3.2E+00, 7.5E−04; RHBDD1, 3.2E+00, 8.7E−05; CELF4, 3.2E+00, 3.9E−06; XKR6, 3.2E+00, 1.1E−03; BACH2, 3.2E+00, 4.2E−04; VTI1A, 3.2E+00, |
| | 3.6E−03; ASAP1, 3.2E+00, 3.6E−03; RAP1GAP2, 3.2E+00, 5.3E−04; SASH1, 3.2E+00, 8.3E−04; MAP2K4, 3.2E+00, 4.6E−04; MAP2K5, 3.2E+00, 1.4E−04; |
| | DIS3L2, 3.2E+00, 6.5E−05; VASH2, 3.3E+00, 4.4E−03; MIR2052HG, 3.3E+00, 2.0E−08; EXPH5, 3.3E+00, 2.7E−05; ERICH1-AS1, 3.3E+00, 3.7E−05; |
| | CACNA1B, 3.3E+00, 8.8E−05; MBD5, 3.3E+00, 2.6E−03; PBX1, 3.3E+00, 4.5E−06; DOCK4, 3.3E+00, 1.6E−03; TCF7L2, 3.3E+00, 2.8E−05; BTBD9, 3.3E+00, |
| | 4.7E−04; SLX4IP, 3.3E+00, 2.3E−04; BABAM2, 3.3E+00, 1.5E−04; PAN3, 3.3E+00, 1.6E−03; APP, 3.3E+00, 1.2E−03; TNRC6C, 3.3E+00, 5.0E−05; NHS, |
| | 3.3E+00, 3.8E−04; ELMO1, 3.3E+00, 9.4E−05; LOC645513, 3.3E+00, 2.2E−05; KIF16B, 3.3E+00, 8.9E−06; ZRANB3, 3.3E+00, 1.1E−03; PCSK5, 3.4E+00, |
| | 2.5E−04; PPP1R12B, 3.4E+00, 1.6E−05; RALGAPA2, 3.4E+00, 5.6E−04; LCLAT1, 3.4E+00, 2.3E−04; TASP1, 3.4E+00, 6.4E−04; NBAS, 3.4E+00, 4.4E−04; |
| | MIR924HG, 3.4E+00, 4.8E−03; PDSS2, 3.4E+00, 7.2E−04; SPRED1, 3.4E+00, 1.5E−04; ATP9B, 3.4E+00, 4.8E−04; ARHGAP44, 3.4E+00, 5.9E−05; KCNT2, |
| | 3.4E+00, 2.1E−03; ANKS1A, 3.4E+00, 1.9E−04; PKN2, 3.4E+00, 8.3E−04; SUGCT, 3.4E+00, 7.3E−06; GSE1, 3.4E+00, 1.3E−03; FBXW7, 3.4E+00, 8.5E−04; |
| | LOC102723568, 3.4E+00, 3.8E−05; DPP6, 3.5E+00, 1.2E−04; ERBIN, 3.5E+00, 1.4E−03; MB21D2, 3.5E+00, 1.8E−04; UTRN, 3.5E+00, 6.4E−04; DPP10, |
| | 3.5E+00, 1.1E−03; LATS2, 3.5E+00, 3.0E−06; LRBA, 3.5E+00, 3.6E−04; RSU1, 3.5E+00, 4.2E−05; ARID1B, 3.5E+00, 2.2E−04; PATJ, 3.5E+00, 1.1E−03; |
| | RASAL2, 3.5E+00, 9.6E−04; PICALM, 3.5E+00, 2.2E−04; IGF1R, 3.5E+00, 1.5E−04; CECR2, 3.5E+00, 7.1E−05; FARP1, 3.5E+00, 7.9E−04; BCAS3, 3.6E+00, |
| | 5.0E−04; MDGA2, 3.6E+00, 2.1E−06; CTBP2, 3.6E+00, 4.7E−05; FRMPD4, 3.6E+00, 9.9E−07; ATXN7L1, 3.6E+00, 6.4E−04; UST, 3.6E+00, 8.0E−04; |
| | MIR31HG, 3.6E+00, 1.7E−07; PRKG1, 3.6E+00, 8.8E−04; AOPEP, 3.6E+00, 1.6E−04; COG5, 3.6E+00, 3.3E−04; MED13L, 3.6E+00, 5.6E−04; BMPR1A, |
| | 3.6E+00, 6.0E−04; TMEM135, 3.6E+00, 3.1E−04; TLN2, 3.6E+00, 2.4E−04; RFC3, 3.6E+00, 5.6E−04; NHSL1, 3.6E+00, 4.2E−04; CAMKMT, 3.7E+00, 5.8E−04; |
| | NRXN3, 3.7E+00, 7.6E−04; PRIM2, 3.7E+00, 4.2E−04; MEI4, 3.7E+00, 7.8E−08; DNAH14, 3.7E+00, 1.5E−04; SH3RF1, 3.7E+00, 2.6E−05; SIK3, 3.7E+00, |
| | 4.1E−04; ROR2, 3.7E+00, 2.4E−06; DIAPH3, 3.7E+00, 6.5E−04; DOCK1, 3.7E+00, 3.5E−04; SDK1, 3.7E+00, 5.0E−04; ADGRA3, 3.7E+00, 1.9E−04; |
| | LINC00989, 3.7E+00, 6.1E−07; MAPK8, 3.7E+00, 2.3E−04; TAF3, 3.7E+00, 1.6E−05; ST6GALNAC3, 3.8E+00, 3.8E−04; C15orf41, 3.8E+00, 3.3E−05; STK33, |
| | 3.8E+00, 2.3E−04; PVT1, 3.8E+00, 3.0E−04; CCDC141, 3.8E+00, 1.4E−03; MIPOL1, 3.8E+00, 1.1E−04; FASTKD2, 3.8E+00, 2.7E−05; LOC285500, 3.8E+00, |
| | 1.1E−06; BCKDHB, 3.8E+00, 3.3E−04; EHBP1, 3.8E+00, 1.3E−04; AHCYL2, 3.8E+00, 1.6E−04; ITFG1, 3.8E+00, 1.0E−04; LINC01162, 3.9E+00, 3.0E−05; |
| | VAV2, 3.9E+00, 1.1E−05; LOC101927580, 3.9E+00, 1.4E−07; TEX41, 3.9E+00, 1.1E−07; LOC107986978, 3.9E+00, 1.2E−11; LOC107987166, 3.9E+00, |
| | 7.3E−06; PTK2, 3.9E+00, 4.2E−05; EXOC4, 3.9E+00, 6.1E−05; RNF24, 3.9E+00, 1.5E−07; AVL9, 3.9E+00, 1.1E−05; TTC28, 3.9E+00, 1.7E−04; LINC01057, |
| | 3.9E+00, 6.1E−07; TCF4, 3.9E+00, 5.8E−05; FAAH2, 3.9E+00, 5.4E−05; MYO1D, 3.9E+00, 2.9E−05; PITPNC1, 3.9E+00, 1.1E−04; PTPRN2, 3.9E+00, |
| | 1.7E−04; CLASP1, 3.9E+00, 9.9E−05; SPATA5, 3.9E+00, 1.3E−04; NEDD4L, 3.9E+00, 1.6E−04; STPG2, 3.9E+00, 2.9E−07; LOC107986623, 4.0E+00, 5.2E−09; |
| | EDIL3, 4.0E+00, 1.7E−04; ARHGAP42, 4.0E+00, 9.6E−05; FAM155A, 4.0E+00, 1.1E−05; STK39, 4.0E+00, 4.9E−06; TTC17, 4.0E+00, 8.7E−05; RNGTT, |
| | 4.0E+00, 3.0E−05; FAM102B, 4.0E+00, 8.3E−07; MPPED2, 4.0E+00, 1.5E−04; LOC105369617, 4.0E+00, 1.1E−07; IL1RAPL1, 4.0E+00, 2.2E−05; |
| | LOC101928354, 4.0E+00, 1.0E−07; C5orf46, 4.0E+00, 2.6E−06; PDE4D, 4.0E+00, 8.4E−07; ADK, 4.1E+00, 9.9E−05; AGAP1, 4.1E+00, 7.9E−05; |
| | LOC101928283, 4.1E+00, 6.8E−12; TSPAN18, 4.1E+00, 8.2E−07; PCAT14, 4.1E+00, 4.0E−04; PLCB4, 4.1E+00, 3.9E−05; RBPMS, 4.1E+00, 6.9E−07; |
| | POU6F2, 4.1E+00, 1.0E−07; TBC1D22A, 4.1E+00, 2.3E−05; MID1, 4.1E+00, 4.5E−05; ZNF385D, 4.1E+00, 3.2E−08; NTNG1, 4.1E+00, 6.6E−08; TRAPPC9, |
| | 4.1E+00, 5.9E−06; EDA, 4.1E+00, 5.4E−05; KAZN, 4.1E+00, 7.1E−05; COMMD10, 4.2E+00, 6.4E−05; MYO9A, 4.2E+00, 6.0E−06; DOCK3, 4.2E+00, 8.0E−05; |
| | LRFN5, 4.2E+00, 6.2E−05; FTO, 4.2E+00, 2.1E−05; WDR70, 4.2E+00, 5.2E−06; RBMS3, 4.2E+00, 1.1E−06; LOC105375815, 4.2E+00, 8.4E−20; DNAJB4, |
| | 4.2E+00, 1.9E−06; ITPR2, 4.3E+00, 1.9E−05; KLF8, 4.3E+00, 1.3E−05; PLCB1, 4.3E+00, 1.6E−05; TULP4, 4.3E+00, 1.5E−05; CHRM3, 4.3E+00, 3.1E−07; |
| | PTPRK, 4.3E+00, 1.3E−05; LOC105378798, 4.3E+00, 5.4E−08; LOC100288637, 4.3E+00, 2.3E−06; ZFAND3, 4.3E+00, 9.1E−06; FGD4, 4.3E+00, 1.3E−06; |
| | DYM, 4.3E+00, 1.5E−06; SPATA6, 4.3E+00, 1.1E−07; ZNF407, 4.3E+00, 3.2E−07; AFAP1, 4.3E+00, 1.3E−07; PLEKHA5, 4.3E+00, 2.9E−08; SCFD2, 4.3E+00, |
| | 1.8E−07; DANT2, 4.4E+00, 9.9E−06; FARS2, 4.4E+00, 6.6E−06; ADAMTS12, 4.4E+00, 1.8E−06; GLDC, 4.4E+00, 2.3E−07; PTPRG, 4.4E+00, 5.7E−11; CMIP, |
| | 4.4E+00, 9.8E−06; SERINC5, 4.4E+00, 1.5E−05; COP1, 4.4E+00, 5.9E−06; CBFA2T2, 4.4E+00, 1.6E−06; PHKA1, 4.4E+00, 1.9E−11; ACACA, 4.4E+00, 3.4E−06; |
| | SLC16A10, 4.5E+00, 2.8E−06; WDFY3, 4.5E+00, 5.1E−06; LOC107985961, 4.5E+00, 1.0E−06; RORA, 4.5E+00, 1.4E−05; MIR3681HG, 4.5E+00, 3.4E−12; |
| | ADAMTS19, 4.5E+00, 1.1E−05; RBM47, 4.5E+00, 9.2E−06; TMEM132D, 4.5E+00, 9.1E−06; TMCC1, 4.5E+00, 5.0E−06; GABRB3, 4.5E+00, 8.0E−07; |
| | LOC105378797, 4.6E+00, 1.4E−09; NLK, 4.6E+00, 4.4E−07; TMTC1, 4.6E+00, 2.6E−06; MEF2A, 4.6E+00, 1.9E−06; LINC01572, 4.6E+00, 2.9E−06; |
| | TMEM108, 4.6E+00, 5.0E−07; RERE, 4.6E+00, 1.0E−07; DLEU1, 4.6E+00, 2.2E−06; LINC00534, 4.6E+00, 1.9E−11; BICD1, 4.7E+00, 3.7E−09; UGGT2, |
| | 4.7E+00, 1.4E−06; ARHGEF10, 4.7E+00, 1.9E−06; SLC35F3, 4.7E+00, 1.1E−07; ZNRF3, 4.7E+00, 3.1E−07; SUPT3H, 4.7E+00, 1.7E−06; ASCC3, 4.7E+00, |
| | 1.7E−06; GMDS, 4.7E+00, 1.1E−06; TENM3, 4.8E+00, 1.1E−07; RANBP17, 4.8E+00, 1.1E−06; COBL, 4.8E+00, 7.6E−07; TCF12, 4.8E+00, 2.3E−07; SYNE1, |
| | 4.8E+00, 1.3E−10; LOC107985037, 4.8E+00, 2.5E−08; LRCH1, 4.8E+00, 9.0E−11; CHST9, 4.8E+00, 6.8E−07; RFX7, 4.8E+00, 9.4E−07; MACROD2, 4.9E+00, |
| | 3.1E−07; LOC105374945, 4.9E+00, 1.7E−06; CADPS, 4.9E+00, 4.6E−08; LOC107986777, 4.9E+00, 2.5E−06; ANKRD18CP, 4.9E+00, 5.4E−09; TIAM1, |
| | 4.9E+00, 1.4E−07; RPS6KA2, 4.9E+00, 1.8E−07; LOC101928437, 4.9E+00, 2.2E−11; LOC105373153, 5.0E+00, 6.3E−12; PCNX2, 5.0E+00, 4.3E−07; PKIB, |
| | 5.0E+00, 1.3E−06; GRID2, 5.0E+00, 7.9E−35; THADA, 5.1E+00, 4.0E−09; FOXN3, 5.1E+00, 2.4E−18; APBB2, 5.1E+00, 1.3E−07; CTNNA3, 5.1E+00, 8.6E−08; |
| | LINC00922, 5.2E+00, 1.9E−09; UBE2E2, 5.2E+00, 8.6E−09; FER, 5.2E+00, 2.8E−08; LOC105374013, 5.3E+00, 2.0E−10; RYR2, 5.3E+00, 2.3E−07; |
| | LOC101929194, 5.3E+00, 5.5E−08; GRIA1, 5.3E+00, 1.3E−07; PTPRT, 5.3E+00, 3.1E−08; FOXO3, 5.3E+00, 2.2E−09; JAZF1, 5.3E+00, 9.7E−08; EXT1, |
| | 5.4E+00, 9.3E−09; METTL15, 5.4E+00, 1.2E−09; PTCHD1, 5.4E+00, 7.6E−14; TUSC3, 5.4E+00, 6.0E−09; RAD51B, 5.4E+00, 1.2E−08; LOC107985710, |
| | 5.4E+00, 3.2E−08; VPS13B, 5.5E+00, 2.0E−08; LOC105375334, 5.5E+00, 1.1E−10; IMMP2L, 5.5E+00, 1.4E−09; LINC01194, 5.5E+00, 3.7E−09; TBC1D5, |
| | 5.5E+00, 1.3E−08; ULK4, 5.5E+00, 1.5E−09; LOC101929378, 5.5E+00, 2.8E−08; CDH13, 5.6E+00, 1.8E−08; TRPS1, 5.7E+00, 7.9E−10; ST6GAL1, 5.8E+00, |
| | 2.8E−09; LOC105374827, 5.8E+00, 7.2E−18; FBN2, 5.8E+00, 2.6E−11; ANK2, 5.8E+00, 5.4E−23; NEAT1, 5.8E+00, 4.0E−09; GPC6, 5.9E+00, 9.1E−08; |
| | GRIN2A, 6.0E+00, 2.5E−15; FAF1, 6.0E+00, 2.2E−10; TBCD, 6.0E+00, 8.1E−12; MAML2, 6.1E+00, 3.1E−09; SGCD, 6.1E+00, 7.3E−10; LOC105378031, |
| | 6.2E+00, 1.0E−10; ZNF827, 6.2E+00, 1.7E−11; SEMA6A, 6.2E+00, 1.5E−20; ASIC2, 6.3E+00, 1.3E−11; LOC107985962, 6.3E+00, 1.3E−11; CDKAL1, |
| | 6.4E+00, 1.7E−11; SPIDR, 6.4E+00, 6.5E−12; GPHN, 6.5E+00, 9.2E−12; CASC15, 6.5E+00, 8.4E−18; ADCY2, 6.5E+00, 2.2E−09; LOC644919, 6.6E+00, |
| | 1.0E−11; MARCHF1, 6.6E+00, 4.3E−15; VWA8, 6.6E+00, 3.8E−14; OPCML, 6.6E+00, 4.0E−12; FHIT, 6.7E+00, 1.2E−11; SMYD3, 6.7E+00, 8.9E−14; LINGO2, |
| | 6.7E+00, 7.9E−12; C4orf51, 6.7E+00, 1.8E−15; LOC107986770, 6.8E+00, 9.7E−12; LOC100420587, 6.8E+00, 8.5E−13; ARL15, 6.8E+00, 3.6E−13; SYT1, |
| | 6.9E+00, 1.1E−15; BBS9, 6.9E+00, 4.9E−12; SCAPER, 7.2E+00, 3.0E−16; GTDC1, 7.2E+00, 6.0E−17; LOC101927668, 7.2E+00, 1.4E−10; LSAMP, 7.2E+00, |
| | 9.0E−15; NPSR1-AS1, 7.3E+00, 1.2E−17; DPH6, 7.4E+00, 1.8E−16; CACNA2D3, 7.6E+00, 4.1E−16; PPARGC1A, 7.6E+00, 4.4E−16; LAMA2, 7.6E+00, |
| | 1.8E−16; TNS3, 7.7E+00, 2.7E−17; LOC105374655, 7.7E+00, 4.2E−27; KDM4C, 7.9E+00, 3.2E−18; KIAA1217, 7.9E+00, 9.1E−17; TMEFF2, 8.2E+00, 2.1E−23; |
| | LOC339862, 8.5E+00, 1.0E−18; SHROOM3, 8.6E+00, 6.7E−21; LRRTM4, 8.8E+00, 1.5E−33; BHLHE40, 9.0E+00, 5.7E−26; PTCHD1-AS, 9.0E+00, 1.2E−19; |
| | LOC728755, 1.0E+01, 5.2E−25; LOC100505817, 1.1E+01, 6.6E−31; FGF13, 1.1E+01, 3.2E−25; LOC102467213, 1.1E+01, 4.6E−31; CHODL, 1.8E+01, 2.2E−52; |
| 4 | LINC01194, −1.6E+01, 9.8E−12; LINC00428, −1.5E+01, 7.1E−15; ESRG, −1.4E+01, 1.4E−08; SERPINB9, −1.3E+01, 9.7E−10; LOC102467213, −1.2E+01, 2.7E−09; |
| | LOC101927668, −1.0E+01, 1.3E−04; CHODL, −1.0E+01, 4.4E−05; LOC101929194, −9.6E+00, 4.4E−05; LOC105374013, −9.3E+00, 1.9E−09; SERINC5, |
| | −9.1E+00, 7.1E−05; GRID2, −8.7E+00, 1.8E−18; C12orf60, −8.7E+00, 2.1E−08; LOC100505817, −8.3E+00, 4.7E−19; RPLP1, −8.3E+00, 1.2E−03; RACK1, |
| | −8.2E+00, 4.4E−03; PTMA, −7.9E+00, 2.7E−05; ND1, −7.9E+00, 1.3E−04; TERF1, −7.7E+00, 3.0E−03; RPS8, −7.7E+00, 2.4E−03; SERBP1, −7.6E+00, 6.9E−03; |
| | CCDC141, −7.5E+00, 2.1E−09; EIF4A2, −7.3E+00, 1.7E−02; LOC105372310, −7.3E+00, 1.9E−02; SPG20, −7.3E+00, 1.8E−04; USO1, −7.2E+00, 2.5E−02; GJA1, |
| | −7.1E+00, 4.2E−02; RPL5, −7.0E+00, 3.3E−02; NPM1, −7.0E+00, 5.8E−03; BHLHE40, −7.0E+00, 3.0E−08; ZMAT4, −6.9E+00, 1.9E−02; DPPA4, −6.9E+00, 2.8E−02; |
| | LIN28A, −6.9E+00, 1.0E−02; DNMT3B, −6.9E+00, 3.4E−03; MRS2, −6.9E+00, 3.8E−04; PRDX6, −6.8E+00, 1.0E−02; RPL9, −6.8E+00, 3.4E−02; |
| | LOC105374945, −6.7E+00, 1.5E−02; VASH2, −6.6E+00, 4.3E−02; CNBP, −6.5E+00, 2.8E−02; FOXN3, −6.5E+00, 2.3E−03; RPL4, −6.4E+00, 2.6E−02; |
| | HSP90AB1, −6.4E+00, 5.2E−03; C9orf135, −6.4E+00, 4.8E−05; LOC105375710, −6.3E+00, 8.7E−07; FLVCR1, −6.3E+00, 4.9E−02; BUB1, −6.2E+00, 4.8E−02; |
| | CNMD, −6.2E+00, 4.9E−02; LOC105377860, −6.1E+00, 1.8E−02; TDGF1, −6.0E+00, 4.2E−02; LOC107985710, −6.0E+00, 3.6E−06; VSIG10, −5.7E+00, 9.7E−03; |
| | GALNT3, −5.7E+00, 1.4E−02; HSP90AA1, −5.6E+00, 2.6E−02; LRFN5, −5.6E+00, 1.4E−07; LOC105370482, −5.5E+00, 1.6E−02; C5orf46, −5.3E+00, |
| | 1.4E−02; LOC107987166, −4.9E+00, 3.5E−02; SGCD, −4.9E+00, 2.6E−03; HHLA1, −4.9E+00, 2.3E−11; PCAT14, −4.7E+00, 1.2E−02; ATP6, −4.6E+00, 7.1E−03; |
| | LOC107985647, −4.6E+00, 1.0E−07; PLAAT3, −4.6E+00, 1.4E−02; RALYL, −4.5E+00, 4.3E−03; LOC105377901, −4.4E+00, 2.3E−09; GRIA1, −4.3E+00, |
| | 1.3E−02; COX1, −4.3E+00, 1.3E−03; ND5, −4.2E+00, 4.5E−02; LOC105374657, −4.1E+00, 3.9E−03; SPP1, −4.0E+00, 8.6E−04; SNAR−C3, −3.6E+00, 1.2E−02; |
| | C4orf51, −3.6E+00, 1.5E−06; ABHD12B, −3.4E+00, 7.8E−07; FRMPD4, −3.2E+00, 3.4E−02; F3, −3.0E+00, 7.5E−05; LOC107985704, −2.9E+00, 2.9E−03; ND4, |
| | −2.9E+00, 3.9E−02; S100A13, −2.8E+00, 3.8E−02; LOC107987087, −2.8E+00, 1.1E−03; LOC105377986, −2.7E+00, 3.1E−02; C9orf129, −2.6E+00, 1.6E−03; |
| | CCSAP, −2.6E+00, 2.3E−02; LINC00989, −2.3E+00, 7.6E−04; LOC101927915, −2.3E+00, 4.0E−04; MT1X, −2.2E+00, 7.1E−03; LOC107986623, −2.0E+00, |
| | 1.3E−03; LINC01508, −2.0E+00, 1.6E−02; ABCC2, −1.7E+00, 4.8E−02; MT1H, −1.6E+00, 1.2E−03; LOC101927580, −1.4E+00, 4.0E−02; LOC105374814, |
| | −1.2E+00, 1.5E−02; LOC107987090, −9.0E−01, 4.1E−02; LOC105374869, 1.7E−01, 1.3E−02; PMCHL2, 1.7E−01, 1.3E−02; SEMG1, 1.7E−01, 1.3E−02; GCG, |
| | 2.2E−01, 2.2E−03; LOC107985306, 2.2E−01, 2.2E−03; PYHIN1, 2.2E−01, 2.2E−03; SLC17A6, 2.2E−01, 2.2E−03; UCN, 2.2E−01, 2.2E−03; LOC105369406, |
| | 2.2E−01, 1.7E−02; APCS, 2.9E−01, 2.4E−06; LOC105379278, 2.9E−01, 2.4E−06; LOC107984876, 2.9E−01, 2.4E−06; LOC105376645, 3.0E−01, 1.0E−08; |
| | MIR194-2HG, 3.0E−01, 1.0E−08; MIR330, 3.0E−01, 1.0E−08; MIR544B, 3.0E−01, 1.0E−08; FAM228A, 3.0E−01, 2.0E−03; TMEM105, 3.0E−01, 2.0E−03; |
| | SSTR5, 3.0E−01, 2.1E−02; PRRT1, 3.1E−01, 2.8E−02; LINC00508, 3.2E−01, 5.8E−03; ZNF735, 3.2E−01, 5.8E−03; LOC107984008, 3.2E−01, 3.5E−03; ENPP7, |
| | 3.2E−01, 2.4E−02; LOC105372985, 3.4E−01, 1.4E−07; LOC105375532, 3.4E−01, 1.4E−07; LOC105376556, 3.4E−01, 1.4E−07; USP41, 3.4E−01, 1.4E−07; |
| | LOC101927755, 3.5E−01, 3.4E−02; TPPP3, 3.6E−01, 1.4E−04; MYL4, 4.0E−01, 8.6E−04; LOC105372750, 4.3E−01, 2.3E−02; FGFBP1, 4.3E−01, 4.9E−02; |
| | LOC105374769, 4.4E−01, 1.2E−02; HOXB6, 4.6E−01, 7.6E−04; EPHB3, 4.8E−01, 1.0E−02; CABCOCO1, 4.9E−01, 1.6E−02; SLC52A1, 5.5E−01, 4.3E−04; |
| | LOC105379301, 5.8E−01, 5.0E−03; LOC107984512, 6.0E−01, 1.8E−05; SQOR, 6.1E−01, 5.1E−04; SLC26A4, 6.2E−01, 1.4E−03; LOC105369482, 6.8E−01, |
| | 5.6E−04; LOC105372782, 7.0E−01, 1.7E−03; LOC105374496, 7.1E−01, 6.2E−11; HOXD4, 7.3E−01, 1.6E−09; LOC105372821, 7.3E−01, 1.6E−09; |
| | LOC105376027, 7.3E−01, 1.6E−09; RTCA-AS1, 7.3E−01, 4.0E−02; HDC, 7.4E−01, 3.5E−04; DIRAS3, 7.4E−01, 9.5E−07; CCDC9B, 7.4E−01, 1.6E−03; |
| | LOC105376425, 7.5E−01, 5.0E−03; LOC101927244, 7.6E−01, 6.2E−04; LOC100996294, 7.7E−01, 4.7E−04; LOC105374798, 7.9E−01, 3.9E−05; |
| | LOC107985685, 8.0E−01, 5.9E−06; TRIM55, 8.2E−01, 1.8E−02; LIFR-AS1, 8.3E−01, 3.7E−02; TMEFF1, 8.4E−01, 1.4E−02; HOXD3, 8.4E−01, 2.2E−05; ZBED5- |
| | AS1, 8.6E−01, 9.3E−03; SERPINF2, 9.1E−01, 1.9E−02; LOC105369309, 9.3E−01, 9.7E−03; FGF10-AS1, 9.4E−01, 2.8E−10; LOC105376981, 9.4E−01, 2.3E−03; |
| | LOC105373693, 9.6E−01, 3.5E−04; LOC285889, 9.8E−01, 3.8E−26; NTRK2, 9.8E−01, 5.9E−03; KRT222, 9.9E−01, 1.3E−02; OPRM1, 9.9E−01, 4.6E−08; |
| | LOC105369689, 1.0E+00, 7.8E−04; CLEC4D, 1.0E+00, 1.7E−13; MOSPD3, 1.0E+00, 7.7E−03; LOC105375728, 1.0E+00, 3.4E−04; LOC101928529, |
| | 1.0E+00, 1.3E−02; OPN5, 1.0E+00, 5.6E−27; LOC105376440, 1.0E+00, 1.5E−12; KCNS1, 1.0E+00, 7.8E−07; LOC102723724, 1.0E+00, 2.8E−03; |
| | LOC102724392, 1.0E+00, 4.3E−11; LOC102725254, 1.0E+00, 3.3E−10; METTL11B, 1.0E+00, 1.0E−07; LOC107987057, 1.0E+00, 2.7E−02; |
| | LOC105378512, 1.1E+00, 6.0E−04; KRT15, 1.1E+00, 2.3E−11; LOC105377135, 1.1E+00, 2.5E−66; MTRNR2L4, 1.1E+00, 2.5E−66; ARX, 1.1E+00, 5.6E−28; |
| | RAB9B, 1.1E+00, 2.9E−05; LINC01518, 1.1E+00, 3.0E−23; CA5A, 1.1E+00, 3.5E−04; LOC105373137, 1.1E+00, 6.1E−08; LINC00882, 1.1E+00, 3.8E−05; |
| | LOC102724362, 1.1E+00, 3.9E−02; PCDH19, 1.1E+00, 3.5E−02; FGF13-AS1, 1.1E+00, 8.0E−03; SNORD12B, 1.1E+00, 1.0E−13; LOC107985714, 1.1E+00, |
| | 5.0E−20; MIR4256, 1.1E+00, 3.2E−16; PRSS55, 1.1E+00, 8.1E−21; AQP4, 1.1E+00, 2.0E−09; RSPH1, 1.1E+00, 1.2E−04; FBXL22, 1.1E+00, 8.7E−03; |
| | SCGB2B2, 1.1E+00, 2.7E−13; ZNF763, 1.1E+00, 1.2E−02; SNAI3, 1.1E+00, 4.8E−06; LOC100505530, 1.1E+00, 6.2E−03; LOC105377585, 1.1E+00, |
| | 1.0E−02; LOC105379064, 1.1E+00, 3.9E−05; SCX, 1.1E+00, 6.2E−07; ADH6, 1.1E+00, 2.8E−03; MFSD2B, 1.2E+00, 3.0E−03; LOC101927378, 1.2E+00, 1.9E−13; |
| | LOC105378623, 1.2E+00, 2.1E−30; LOC105373292, 1.2E+00, 1.4E−05; LOC107987055, 1.2E+00, 9.1E−33; LOC105379050, 1.2E+00, 1.5E−07; |
| | TMEM115, 1.2E+00, 2.0E−02; LOC101928535, 1.2E+00, 6.3E−31; LOC107986417, 1.2E+00, 3.9E−19; MIR320E, 1.2E+00, 9.7E−26; TCL6, 1.2E+00, |
| | 1.1E−08; ASCL2, 1.2E+00, 5.5E−23; LOC105379365, 1.2E+00, 3.1E−33; PLPPR4, 1.2E+00, 3.8E−03; SYTL3, 1.2E+00, 4.6E−02; EMX2OS, 1.2E+00, 8.1E−21; |
| | EFHB, 1.2E+00, 1.7E−03; IGLL5, 1.2E+00, 7.0E−52; MB, 1.2E+00, 2.5E−15; LSAMP-AS1, 1.2E+00, 1.8E−05; SNORD116−26, 1.2E+00, 1.0E−02; ANKFN1, |
| | 1.2E+00, 4.6E−03; LOC107984315, 1.3E+00, 3.6E−04; LOC105375457, 1.3E+00, 4.4E−06; SLC17A1, 1.3E+00, 2.5E−22; LOC105375803, 1.3E+00, |
| | 1.8E−38; LOC729558, 1.3E+00, 2.8E−03; RGS14, 1.3E+00, 5.6E−04; CDH24, 1.3E+00, 2.7E−02; TINAG, 1.3E+00, 4.7E−34; LOC105376234, 1.4E+00, 3.2E−16; |
| | MRGPRF, 1.4E+00, 1.1E−03; LOC105369927, 1.4E+00, 1.5E−02; PARP12, 1.4E+00, 1.2E−02; SYBU, 1.4E+00, 3.2E−02; FRMPD2, 1.4E+00, 7.6E−04; |
| | LOC105377623, 1.4E+00, 1.0E−02; SP8, 1.4E+00, 2.5E−04; VENTX, 1.4E+00, 7.3E−04; LOC105374165, 1.4E+00, 1.3E−02; LOC105378866, 1.4E+00, |
| | 1.2E−10; LOC105372606, 1.4E+00, 4.7E−19; LOC101927421, 1.5E+00, 8.5E−03; APOL2, 1.5E+00, 4.5E−02; ANAPC15, 1.5E+00, 4.7E−05; EPS8L1, 1.5E+00, |
| | 4.7E−03; LINC02208, 1.5E+00, 7.5E−07; EFCAB12, 1.5E+00, 2.8E−08; IRX5, 1.6E+00, 3.6E−13; LOC105378248, 1.6E+00, 5.2E−03; RHEBL1, 1.6E+00, |
| | 6.9E−08; DYNLT3, 1.6E+00, 5.6E−03; GSTM2, 1.6E+00, 2.1E−03; RELN, 1.6E+00, 5.4E−06; LOC107985770, 1.6E+00, 9.3E−18; LOC105378120, 1.7E+00, |
| | 5.1E−04; LOC101927995, 1.7E+00, 4.9E−31; CDK15, 1.7E+00, 4.1E−02; SLC9B2, 1.7E+00, 3.3E−03; DAB2, 1.7E+00, 1.5E−02; MOXD1, 1.7E+00, 4.1E−02; |
| | MTTP, 1.7E+00, 6.9E−06; ABCA12, 1.8E+00, 1.4E−02; DOCK8, 1.9E+00, 3.6E−02; CDH10, 1.9E+00, 1.7E−02; H2BU1, 1.9E+00, 1.1E−05; TMUB2, 1.9E+00, |
| | 3.2E−02; LOC105375721, 1.9E+00, 3.2E−02; FGF11, 1.9E+00, 2.2E−02; TFAP2A, 1.9E+00, 1.2E−03; ANXA3, 2.0E+00, 5.2E−03; PAX7, 2.1E+00, 2.4E−06; |
| | ADAM12, 2.1E+00, 5.2E−03; GOLGA8B, 2.1E+00, 4.9E−02; MGAM, 2.1E+00, 5.0E−10; LOC105379109, 2.1E+00, 1.4E−10; LOC105378308, 2.2E+00, |
| | 1.5E−02; MAOB, 2.2E+00, 4.8E−43; GLIS3, 2.4E+00, 2.3E−02; RPH3AL, 2.4E+00, 2.8E−02; ANKRD16, 2.4E+00, 1.0E−02; ARID5B, 2.4E+00, 6.8E−04; ME3, |
| | 2.5E+00, 9.6E−03; DPYD, 2.5E+00, 2.3E−04; LOC105373627, 2.5E+00, 1.9E−44; SEMA3C, 2.6E+00, 1.7E−02; FOXP2, 2.6E+00, 8.4E−03; CYP27A1, |
| | 2.6E+00, 3.0E−09; GOLGA8A, 2.7E+00, 8.6E−04; LOC100130207, 2.8E+00, 4.9E−02; PCDH17, 2.9E+00, 4.3E−04; SOX6, 2.9E+00, 4.4E−04; ANGPT1, |
| | 3.0E+00, 3.8E−02; ZNF256, 3.0E+00, 1.1E−04; LOC107987163, 3.1E+00, 2.7E−02; UBE2S, 3.1E+00, 3.5E−04; MALAT1, 3.2E+00, 4.3E−02; BMPR1B, |
| | 3.3E+00, 1.7E−02; LOC105370802, 3.3E+00, 2.8E−02; CA10, 3.4E+00, 4.2E−02; SLC66A2, 3.5E+00, 3.9E−05; NOX4, 3.5E+00, 3.1E−05; GNG12, 3.5E+00, |
| | 1.3E−02; SYTL5, 3.7E+00, 6.2E−08; HMCN1, 3.7E+00, 1.9E−02; POC1B, 3.8E+00, 2.6E−02; PDCD4, 3.9E+00, 1.6E−02; INPP4B, 3.9E+00, 9.1E−05; ZFHX4, |
| | 4.0E+00, 6.4E−04; LPAR1, 4.0E+00, 5.9E−03; MEIS2, 4.1E+00, 8.2E−04; UNC5C, 4.2E+00, 5.6E−03; NCAM1, 4.2E+00, 9.7E−03; KDM3A, 4.3E+00, 2.0E−02; |
| | NCKAP5, 4.3E+00, 7.7E−03; PIGU, 4.3E+00, 5.6E−03; TAFA2, 4.3E+00, 1.2E−03; RSRP1, 4.5E+00, 3.2E−02; DENND1B, 4.6E+00, 2.8E−03; ASXL3, 4.7E+00, |
| | 2.8E−08; LHFP, 4.7E+00, 5.0E−02; ITGB8, 4.7E+00, 6.2E−03; HAPLN1, 4.9E+00, 1.1E−03; LOC105378531, 4.9E+00, 8.1E−04; GRIK2, 5.0E+00, 1.3E−02; |
| | ANKRD6, 5.1E+00, 1.2E−02; ANAPC10, 5.2E+00, 3.2E−02; PPFIBP1, 5.3E+00, 2.0E−02; SDC2, 5.4E+00, 3.9E−02; SH3GL2, 5.4E+00, 4.0E−03; PKNOX2, |
| | 5.4E+00, 3.2E−04; LAMB1, 5.5E+00, 4.4E−02; LOC107986022, 5.5E+00, 1.2E−04; RCAN2, 5.5E+00, 3.8E−05; KCNIP4, 5.8E+00, 1.3E−02; SLC35F1, |
| | 5.8E+00, 4.5E−02; FAM171A1, 5.8E+00, 6.4E−03; TTC3, 5.9E+00, 2.3E−02; CAMK2D, 5.9E+00, 1.0E−02; VAV3, 5.9E+00, 5.8E−03; AUTS2, 6.0E+00, 4.9E−02; |
| | PGAP1, 6.0E+00, 5.0E−02; HIPK2, 6.0E+00, 3.4E−02; CNKSR3, 6.0E+00, 6.4E−04; AHNAK, 6.3E+00, 8.6E−04; ITGAV, 6.5E+00, 3.5E−04; DACH1, |
| | 6.6E+00, 8.4E−06; PKP2, 6.7E+00, 1.5E−07; CHD7, 6.7E+00, 4.7E−02; CASK, 6.8E+00, 3.2E−02; TLE4, 6.9E+00, 1.6E−02; KIF26B, 6.9E+00, 4.4E−09; |
| | ZSWIM6, 6.9E+00, 1.2E−02; MAPK10, 7.0E+00, 5.4E−03; NF1, 7.0E+00, 2.4E−02; LPP, 7.0E+00, 4.1E−02; ARL15, 7.1E+00, 3.3E−02; NLGN4Y, 7.1E+00, |
| | 4.2E−02; SIPA1L2, 7.1E+00, 6.8E−06; CDH2, 7.1E+00, 4.3E−04; VTI1A, 7.2E+00, 2.5E−02; LOC101928570, 7.2E+00, 7.2E−04; COL4A5, 7.2E+00, 1.1E−02; |
| | ZNF521, 7.3E+00, 3.9E−03; PPP3CA, 7.3E+00, 1.2E−02; MAGI3, 7.3E+00, 4.2E−03; NRXN3, 7.3E+00, 3.3E−02; DSP, 7.3E+00, 7.1E−03; PDE4D, 7.3E+00, |
| | 2.8E−03; MAML3, 7.3E+00, 2.0E−03; ZNF608, 7.4E+00, 1.9E−02; SDK1, 7.4E+00, 2.3E−02; PTPRD, 7.6E+00, 1.9E−02; CDH6, 8.2E+00, 3.4E−06; PARP8, |
| | 8.2E+00, 7.6E−04; SLIT2, 8.2E+00, 8.7E−05; PALLD, 8.3E+00, 6.1E−05; FRYL, 8.4E+00, 1.2E−03; TENM4, 8.5E+00, 2.8E−03; PDE10A, 8.6E+00, 5.4E−08; |
| | GPC3, 8.7E+00, 3.9E−03; LRP1B, 8.7E+00, 7.8E−07; EFNA5, 8.7E+00, 2.3E−03; ZBTB20, 8.8E+00, 5.1E−05; CADM1, 8.9E+00, 1.3E−04; SORBS2, 9.0E+00, |
| | 2.5E−06; CTNNA2, 9.5E+00, 5.6E−04; ERBB4, 9.6E+00, 6.7E−07; FBN2, 9.6E+00, 1.2E−06; CNTN4, 9.8E+00, 2.2E−05; PTPRM, 1.0E+01, 1.8E−08; PRTG, |
| | 1.1E+01, 2.7E−13; CACNA2D1, 1.1E+01, 1.6E−05; CDK14, 1.1E+01, 8.6E−08; GREB1L, 1.6E+01, 1.2E−16; |
| 5 | CDH1, −4.1E+00, 2.8E−19; PODXL, −4.1E+00, 1.3E−25; CD24, −3.6E+00, 4.6E−21; DPPA4, −3.3E+00, 1.8E−14; ESRG, −3.2E+00, 1.1E−11; L1TD1, −2.9E+00, |
| | 9.0E−15; GPC4, −2.8E+00, 1.4E−08; GSTP1, −2.8E+00, 5.0E−09; HMGA1, −2.7E+00, 1.6E−08; CHODL, −2.7E+00, 3.6E−05; APELA, −2.7E+00, 3.6E−08; CGNL1, |
| | −2.6E+00, 5.4E−09; SAT1, −2.6E+00, 2.0E−08; LINC01194, −2.6E+00, 1.7E−07; GRID2, −2.6E+00, 4.6E−18; SLIRP, −2.6E+00, 2.9E−07; SLC16A1, −2.6E+00, |
| | 5.7E−08; SERPINB9, −2.5E+00, 4.8E−10; POU5F1, −2.5E+00, 7.6E−07; ITGA6, −2.5E+00, 3.7E−07; OPCML, −2.4E+00, 4.1E−06; ANKRD18CP, −2.4E+00, 2.4E−06; |
| | SLC7A8, −2.4E+00, 1.0E−08; SOX2, −2.4E+00, 1.6E−06; SET, −2.3E+00, 8.9E−08; TDGF1, −2.3E+00, 3.4E−07; UCHL1, −2.3E+00, 6.7E−06; RTN3, −2.3E+00, |
| | 1.8E−06; ATP5F1B, −2.3E+00, 5.2E−06; RPL24, −2.2E+00, 1.5E−05; SEMA3E, −2.2E+00, 1.2E−05; DHCR24, −2.2E+00, 2.3E−05; PTMA, −2.2E+00, 9.0E−14; |
| | RPL35, −2.2E+00, 7.1E−05; DNMT3B, −2.1E+00, 1.3E−06; CTSC, −2.1E+00, 3.1E−05; PLS3, −2.0E+00, 8.5E−05; CLDN6, −2.0E+00, 1.2E−05; CLU, −2.0E+00, |
| | 2.1E−05; EPCAM, −2.0E+00, 3.9E−05; LOC101927668, −2.0E+00, 2.1E−05; AKIRIN1, −2.0E+00, 1.1E−04; H4C3, −2.0E+00, 4.2E−03; GAPDH, −2.0E+00, 9.1E−08; |
| | CTSV, −2.0E+00, 7.7E−06; BEX3, −1.9E+00, 6.1E−04; RPS27, −1.9E+00, 3.2E−04; ESRP1, −1.9E+00, 7.5E−05; CALM1, −1.9E+00, 3.7E−04; HMGB3, |
| | −1.9E+00, 3.0E−04; GJA1, −1.9E+00, 1.6E−04; EZR, −1.9E+00, 2.4E−04; HSD17B4, −1.9E+00, 1.7E−04; BNC2, −1.9E+00, 5.1E−04; LARP7, −1.9E+00, 5.7E−04; |
| | RPS14, −1.9E+00, 1.4E−04; LIN28A, −1.9E+00, 7.1E−07; RPL34, −1.9E+00, 1.1E−04; LINC01356, −1.9E+00, 9.0E−09; ATP5IF1, −1.9E+00, 7.3E−05; TENM4, |
| | −1.9E+00, 4.0E−04; TARS1, −1.9E+00, 5.4E−04; RAB3B, −1.8E+00, 2.6E−04; TERF1, −1.8E+00, 1.9E−04; CEBPZ, −1.8E+00, 8.8E−04; RPL12, −1.8E+00, 3.6E−04; |
| | DPYSL3, −1.8E+00, 7.9E−04; UQCRH, −1.8E+00, 3.2E−04; JARID2, −1.8E+00, 8.5E−05; RPL32, −1.8E+00, 1.2E−03; LRRTM4, −1.8E+00, 2.4E−03; RPL21, |
| | −1.8E+00, 1.2E−03; RPL35A, −1.7E+00, 1.5E−03; FOXP1, −1.7E+00, 2.5E−03; SEPHS1, −1.7E+00, 8.7E−04; NTM, −1.7E+00, 4.2E−03; TFRC, −1.7E+00, 3.1E−04; |
| | OSBPL10, −1.7E+00, 2.2E−03; RPS29, −1.7E+00, 3.7E−03; RPL8, −1.7E+00, 1.0E−03; CACHD1, −1.7E+00, 2.9E−03; BPTF, −1.7E+00, 8.9E−04; RPS6, |
| | −1.7E+00, 1.8E−07; PCDH11X, −1.7E+00, 4.0E−03; RPL11, −1.7E+00, 2.2E−04; FTH1, −1.7E+00, 2.4E−03; CXADR, −1.7E+00, 2.8E−03; RPL37, −1.7E+00, 6.0E−03; |
| | SPP1, −1.6E+00, 2.9E−03; BST2, −1.6E+00, 5.5E−06; MAD2L2, −1.6E+00, 4.0E−05; NCL, −1.6E+00, 1.1E−05; RPS21, −1.6E+00, 4.4E−03; ENO1, −1.6E+00, |
| | 2.8E−03; NRXN1, −1.6E+00, 5.8E−03; DBN1, −1.6E+00, 1.7E−03; CLIC4, −1.6E+00, 4.6E−03; PTPRZ1, −1.6E+00, 5.9E−03; RPL31, −1.6E+00, 7.6E−04; RIMS2, |
| | −1.6E+00, 5.1E−03; RCN2, −1.6E+00, 2.1E−03; YWHAE, −1.6E+00, 2.5E−03; LITAF, −1.6E+00, 3.2E−03; HNRNPU, −1.6E+00, 7.6E−04; HSPD1, −1.6E+00, |
| | 8.0E−04; ACOXL, −1.6E+00, 2.1E−03; ZNF281, −1.5E+00, 8.0E−03; UGP2, −1.5E+00, 3.4E−03; FGF13, −1.5E+00, 4.5E−02; SALL4, −1.5E+00, 9.1E−03; PSIP1, |
| | −1.5E+00, 9.5E−03; BTF3, −1.5E+00, 1.9E−02; RPS26, −1.5E+00, 6.9E−03; RPL27, −1.5E+00, 1.4E−02; TFDP2, −1.5E+00, 1.1E−02; MGST1, −1.5E+00, 6.4E−03; |
| | RPS15A, −1.5E+00, 1.0E−02; NEDD4L, −1.5E+00, 1.1E−02; FGFR2, −1.5E+00, 1.4E−02; BICD1, −1.5E+00, 2.1E−02; BCOR, −1.5E+00, 4.3E−03; CFAP298, |
| | −1.5E+00, 1.6E−03; RPL19, −1.4E+00, 5.6E−03; SNTG2, −1.4E+00, 2.9E−02; LDHB, −1.4E+00, 8.3E−03; DBI, −1.4E+00, 2.3E−02; C13orf42, −1.4E+00, |
| | 1.3E−02; MAP7, −1.4E+00, 2.0E−02; PDPN, −1.4E+00, 2.2E−03; EIF3K, −1.4E+00, 1.2E−03; AP2M1, −1.4E+00, 1.9E−02; PRR16, −1.4E+00, 6.6E−03; RPS19, |
| | −1.4E+00, 1.5E−02; PMAIP1, −1.4E+00, 3.5E−03; PARK7, −1.4E+00, 2.6E−02; QSER1, −1.4E+00, 2.7E−02; UQCR10, −1.4E+00, 7.1E−03; RPL23, −1.4E+00, |
| | 1.5E−02; ATP5PD, −1.4E+00, 4.6E−03; SYN3, −1.4E+00, 3.5E−02; EIF5B, −1.4E+00, 3.3E−02; PHF21B, −1.4E+00, 2.9E−02; RPS15, −1.4E+00, 3.7E−02; |
| | ALDOA, −1.4E+00, 2.5E−02; TMED2, −1.4E+00, 2.7E−02; ZNF483, −1.4E+00, 3.6E−03; PSMA2, −1.3E+00, 1.6E−02; ACIN1, −1.3E+00, 4.1E−02; SERBP1, |
| | −1.3E+00, 2.0E−02; PPP1CC, −1.3E+00, 3.3E−02; NDUFS6, −1.3E+00, 1.6E−02; FLNB, −1.3E+00, 2.7E−02; PPM1H, −1.3E+00, 2.6E−02; TRIM24, −1.3E+00, |
| | 4.6E−02; AIF1L, −1.3E+00, 2.4E−03; SLC3A2, −1.3E+00, 2.4E−02; KIF1A, −1.3E+00, 1.2E−02; ADD2, −1.3E+00, 1.7E−02; COX7C, −1.3E+00, 4.5E−02; TLE1, |
| | −1.3E+00, 5.5E−03; H4C9, −1.3E+00, 4.4E−02; SLC7A5, −1.3E+00, 1.8E−03; HSPA8, −1.3E+00, 1.8E−02; AZIN1, −1.3E+00, 4.0E−02; CALB1, −1.3E+00, 8.3E−05; |
| | RPS8, −1.2E+00, 3.2E−03; ESF1, −1.2E+00, 1.9E−02; METAP2, −1.2E+00, 4.4E−02; SLC29A1, −1.2E+00, 2.1E−03; RBM47, −1.2E+00, 2.0E−02; RPL13A, |
| | −1.2E+00, 6.6E−03; TRIM71, −1.2E+00, 4.6E−02; ZNF770, −1.2E+00, 2.9E−02; PTTG1, −1.2E+00, 2.4E−02; TBCA, −1.2E+00, 4.7E−02; F11R, −1.2E+00, 3.1E−02; |
| | SLC9A3R1, −1.2E+00, 1.7E−03; PABPC1, −1.2E+00, 1.7E−02; ARMCX3, −1.2E+00, 9.2E−04; SYNDIG1, −1.2E+00, 9.1E−03; LINC00428, −1.2E+00, 3.5E−03; |
| | NDUFA3, −1.2E+00, 3.5E−03; H4C12, −1.2E+00, 2.0E−02; PCAT14, −1.2E+00, 4.5E−03; ELOB, −1.2E+00, 3.3E−02; ITM2B, −1.1E+00, 3.7E−02; NDUFB9, |
| | −1.1E+00, 2.9E−02; COX7A2, −1.1E+00, 4.5E−02; SELENOW, −1.1E+00, 4.4E−02; MDH2, −1.1E+00, 6.5E−03; UQCRQ, −1.1E+00, 6.3E−03; TOMM6, −1.1E+00, |
| | 3.2E−02; SORBS1, −1.1E+00, 4.1E−02; TXNDC17, −1.1E+00, 3.2E−02; C12orf60, −1.1E+00, 1.6E−03; LSM3, −1.1E+00, 4.6E−02; COX7B, −1.1E+00, 1.6E−02; |
| | GPX1, −1.1E+00, 1.5E−02; HSP90AB1, −1.1E+00, 5.0E−03; HNRNPA2B1, −1.1E+00, 6.8E−03; ATP6V1G1, −1.1E+00, 4.7E−02; CDCP1, −1.0E+00, 2.5E−02; |
| | GCNT2, −1.0E+00, 4.2E−02; INSR, −1.0E+00, 3.9E−02; ROMO1, −1.0E+00, 4.6E−02; NPM1, −9.9E−01, 2.2E−02; SEC13, −9.9E−01, 2.7E−02; LOC105375710, |
| | −9.8E−01, 1.2E−04; RPA3, −9.7E−01, 2.5E−02; TFAP2C, −9.7E−01, 3.1E−04; SEL1L3, −9.6E−01, 1.9E−02; EEF1A1, −9.4E−01, 3.7E−03; TMEM64, −9.4E−01, 3.9E−02; |
| | CYP2S1, −9.4E−01, 2.7E−02; PAK1IP1, −9.1E−01, 4.4E−02; BEND4, −8.9E−01, 3.2E−03; SCGB3A2, −8.8E−01, 6.0E−04; ICA1, −8.5E−01, 2.2E−02; RAB15, |
| | −8.5E−01, 2.5E−02; FEZ1, −8.4E−01, 1.4E−02; FXYD5, −8.2E−01, 6.6E−03; SF3B4, −8.1E−01, 4.5E−02; ND4, −8.1E−01, 2.9E−04; CD55, −8.0E−01, 1.9E−02; KLKB1, |
| | −7.9E−01, 1.3E−02; MTIF3, −7.8E−01, 1.9E−02; RND2, −7.7E−01, 3.6E−02; CASTOR2, −7.5E−01, 3.8E−02; HLA-C, −7.5E−01, 2.9E−02; RPS14P3, −7.4E−01, 2.8E−02; |
| | CRABP1, −7.3E−01, 2.3E−02; PLAAT3, −7.3E−01, 1.7E−02; PLAAT5, −6.7E−01, 7.1E−03; RHOU, −6.3E−01, 3.0E−02; MUC3A, −6.2E−01, 2.8E−03; FGFR3, |
| | −5.7E−01, 4.5E−02; MBP, −5.5E−01, 9.0E−03; LOC105379087, −5.5E−01, 2.1E−02; NANOG, −5.3E−01, 4.0E−02; PILRA, −5.3E−01, 3.5E−02; NKAIN4, −5.1E−01, |
| | 4.0E−02; GPANK1, −5.1E−01, 1.4E−02; ATP6VOD2, −4.5E−01, 1.4E−02; MIR302C, −3.0E−01, 6.2E−03; FABP4, 2.9E−02, 2.7E−02; LOC101928523, 2.9E−02, |
| | 2.7E−02; LOC102723517, 2.9E−02, 2.7E−02; LOC728084, 2.9E−02, 2.7E−02; LOC105379355, 3.1E−02, 4.0E−02; LOC107985155, 3.1E−02, 4.0E−02; |
| | LOC105370855, 3.3E−02, 2.3E−02; LOC107985001, 3.3E−02, 2.3E−02; SNORA72, 3.3E−02, 2.3E−02; LOC105371498, 3.3E−02, 4.1E−02; GAPLINC, 3.5E−02, |
| | 4.1E−02; LOC105372092, 3.5E−02, 4.1E−02; LOC105373397, 3.5E−02, 4.1E−02; LOC107985569, 3.5E−02, 4.1E−02; TBC1D26, 3.5E−02, 4.1E−02; CD93, |
| | 3.8E−02, 2.4E−02; MIR181A2, 3.8E−02, 2.4E−02; SERPINB3, 3.8E−02, 2.4E−02; LINC01221, 3.8E−02, 4.6E−02; LOC101927829, 3.8E−02, 4.6E−02; |
| | LOC105379091, 3.8E−02, 4.6E−02; OR2A25, 3.8E−02, 4.6E−02; POU6F2-AS2, 3.8E−02, 4.6E−02; TNFSF14, 3.8E−02, 4.6E−02; LOC101928272, 4.2E−02, |
| | 3.8E−02; TMEM211, 4.2E−02, 3.8E−02; C4BPB, 4.3E−02, 1.6E−02; LY6G6C, 4.3E−02, 1.6E−02; LOC105377687, 4.4E−02, 3.0E−02; LOC107986117, 4.4E−02, |
| | 3.0E−02; SNORA11, 4.4E−02, 3.0E−02; LOC107986842, 4.4E−02, 1.9E−02; LOC107987085, 4.4E−02, 1.9E−02; MIR4256, 4.4E−02, 3.1E−02; LOC105369874, |
| | 4.4E−02, 4.1E−02; LOC105376435, 4.4E−02, 4.1E−02; LOC105377706, 4.4E−02, 4.1E−02; AQP7, 4.7E−02, 2.1E−02; CYP2B7P, 4.9E−02, 4.4E−02; DBH, 4.9E−02, |
| | 4.4E−02; LOC105370251, 4.9E−02, 4.4E−02; LOC100130345, 5.0E−02, 3.7E−02; LOC105378400, 5.3E−02, 4.6E−02; RNVU1-19, 5.5E−02, 3.5E−02; |
| | LOC101927740, 5.6E−02, 4.0E−02; LOC107985349, 5.6E−02, 4.5E−02; NANOS3, 6.0E−02, 1.7E−02; LOC728327, 6.1E−02, 9.2E−03; CEP170P1, 6.2E−02, |
| | 3.5E−02; FGF14-IT1, 6.3E−02, 5.8E−03; LOC105373041, 6.4E−02, 2.4E−02; BHMG1, 6.4E−02, 1.5E−02; BMI1, 6.5E−02, 5.7E−03; HLA-H, 6.7E−02, 6.8E−03; |
| | LOC105375085, 6.8E−02, 3.6E−02; LOC105371529, 7.1E−02, 4.6E−02; CISH, 7.2E−02, 2.0E−02; LINC00305, 7.2E−02, 4.0E−03; LOC105372104, 7.3E−02, |
| | 3.3E−02; LOC105377367, 7.3E−02, 2.6E−03; LOC107985284, 7.4E−02, 2.9E−02; LOC105374517, 7.7E−02, 4.1E−02; LOC107987064, 7.9E−02, 2.5E−03; |
| | LOC105377709, 7.9E−02, 1.8E−02; LOC107986013, 8.1E−02, 4.5E−02; SOWAHD, 8.2E−02, 2.3E−02; KCNMB1, 8.3E−02, 1.0E−03; LOC107985458, 8.4E−02, |
| | 2.6E−02; LOC107986771, 8.5E−02, 4.5E−02; SLC5A8, 8.5E−02, 2.4E−02; LOC102723339, 8.5E−02, 3.9E−02; LOC100506474, 8.7E−02, 5.3E−03; |
| | LOC107985504, 8.8E−02, 2.6E−02; PIP, 8.9E−02, 3.7E−03; LINC01491, 8.9E−02, 4.2E−03; LOC105374559, 9.0E−02, 3.1E−02; LOC107986527, 9.4E−02, |
| | 4.4E−02; LINC01152, 9.4E−02, 4.2E−03; LOC101927646, 9.5E−02, 1.4E−03; LOC105371874, 9.7E−02, 2.7E−02; PLXNB3, 9.7E−02, 3.2E−03; XAF1, 9.9E−02, |
| | 1.9E−02; LOC101929717, 1.0E−01, 3.9E−02; LOC105376411, 1.0E−01, 2.1E−02; LOC105378825, 1.0E−01, 4.6E−02; INAFM1, 1.0E−01, 3.5E−02; |
| | LOC105372733, 1.1E−01, 3.2E−02; CPA1, 1.1E−01, 6.8E−03; LOC105374340, 1.1E−01, 4.2E−02; MGC27382, 1.1E−01, 1.1E−03; LOC105373117, 1.1E−01, |
| | 4.1E−02; LOC107986712, 1.1E−01, 4.5E−02; LOC107986600, 1.2E−01, 2.2E−02; ADAP2, 1.2E−01, 7.1E−03; PEAR1, 1.2E−01, 4.4E−02; LOC100128882, |
| | 1.3E−01, 1.4E−04; LOC644135, 1.3E−01, 2.0E−03; DNAI2, 1.3E−01, 4.8E−02; LOC105369428, 1.3E−01, 3.5E−03; LOC105371625, 1.3E−01, 5.0E−03; |
| | LOC107986707, 1.4E−01, 1.3E−02; TMEM14EP, 1.4E−01, 1.4E−02; COL8A2, 1.4E−01, 4.7E−02; THEMIS, 1.5E−01, 5.6E−04; LOC105369890, 1.5E−01, 3.0E−02; |
| | LOC107985779, 1.5E−01, 1.8E−03; LOC107985054, 1.6E−01, 5.9E−05; LOC107986189, 1.6E−01, 3.1E−02; ACVRL1, 1.6E−01, 1.0E−02; LINC01252, |
| | 1.6E−01, 3.6E−02; LOC100130476, 1.6E−01, 1.5E−02; LOC107986028, 1.7E−01, 1.7E−03; LOC100506731, 1.7E−01, 7.0E−05; LOC101928462, 1.7E−01, |
| | 2.8E−02; LOC100507156, 1.7E−01, 3.2E−02; LOC440934, 1.7E−01, 1.5E−03; LOC105378234, 1.7E−01, 3.0E−02; PPP1R3A, 1.7E−01, 1.5E−03; FGF10-AS1, |
| | 1.8E−01, 1.4E−02; LOC105373438, 1.8E−01, 2.2E−03; LOC107984131, 1.8E−01, 2.8E−02; LOC105370604, 1.8E−01, 1.3E−03; GNG8, 1.8E−01, 4.6E−02; |
| | LOC105371303, 1.9E−01, 2.6E−04; LOC101926964, 2.0E−01, 3.3E−03; CCL2, 2.0E−01, 3.9E−02; LOC653602, 2.0E−01, 1.2E−02; LINC00276, 2.0E−01, 7.4E−04; |
| | SCN7A, 2.1E−01, 3.2E−03; LOC105372211, 2.1E−01, 5.4E−03; LOC107984366, 2.1E−01, 4.5E−04; LOC105372550, 2.1E−01, 7.5E−03; LOC105369826, |
| | 2.2E−01, 2.4E−02; CEACAM21, 2.2E−01, 1.7E−02; LINC01389, 2.2E−01, 9.6E−03; LOC107985228, 2.2E−01, 4.6E−02; LOC107985784, 2.3E−01, 1.1E−02; |
| | LINC00877, 2.3E−01, 4.4E−02; NDST4, 2.3E−01, 2.5E−02; TNS2, 2.3E−01, 7.3E−03; LOC107986709, 2.3E−01, 1.1E−02; FAS, 2.3E−01, 5.4E−04; ATOH8, 2.3E−01, |
| | 1.3E−02; HTR1A, 2.3E−01, 2.9E−04; SLC5A9, 2.3E−01, 4.7E−02; LOC105374464, 2.3E−01, 1.5E−03; LOC105377979, 2.4E−01, 9.4E−03; IER5L, 2.4E−01, |
| | 4.7E−04; LOC105377291, 2.4E−01, 1.1E−02; CPED1, 2.5E−01, 6.9E−03; ENG, 2.5E−01, 6.1E−03; ADAMTS9-AS1, 2.5E−01, 1.3E−03; CDRT1, 2.6E−01, 3.0E−04; |
| | GDF6, 2.6E−01, 2.1E−04; VAX1, 2.6E−01, 5.2E−04; A2M, 2.6E−01, 3.9E−02; LOC102723906, 2.6E−01, 1.1E−02; ADGRF2, 2.7E−01, 3.8E−05; RCSD1, 2.7E−01, |
| | 3.5E−04; LOC105372160, 2.7E−01, 3.6E−02; POSTN, 2.7E−01, 2.7E−02; LOC105370555, 2.8E−01, 4.0E−02; LINC00936, 2.8E−01, 3.8E−03; PCDHGC4, |
| | 2.8E−01, 5.6E−03; PIK3C2G, 2.8E−01, 2.5E−02; ITGA11, 2.8E−01, 2.2E−02; HSD17B3, 2.8E−01, 1.8E−02; ABCA10, 2.8E−01, 1.3E−02; ARHGEF15, 2.9E−01, |
| | 4.0E−02; GATA2, 2.9E−01, 1.0E−02; BCHE, 2.9E−01, 4.0E−03; VSTM2A, 2.9E−01, 5.3E−04; SLC8A1-AS1, 3.0E−01, 6.2E−05; LOC105375631, 3.0E−01, 7.9E−03; |
| | LOC105375821, 3.0E−01, 5.7E−03; SYTL4, 3.0E−01, 8.7E−04; KLHDC8B, 3.0E−01, 1.0E−02; CTBS, 3.0E−01, 3.5E−02; EPHB3, 3.1E−01, 9.8E−04; DACT3, |
| | 3.1E−01, 3.0E−04; LOC339622, 3.1E−01, 1.4E−02; LOC105374039, 3.2E−01, 3.1E−05; PRICKLE2-AS1, 3.2E−01, 2.6E−08; LOC105376486, 3.2E−01, 3.5E−02; |
| | SMARCD3, 3.3E−01, 2.3E−02; S1PR1, 3.3E−01, 1.5E−08; BVES, 3.3E−01, 4.6E−02; SMYD1, 3.3E−01, 1.2E−04; RFTN1, 3.3E−01, 1.9E−02; TMEM246, 3.4E−01, |
| | 3.6E−02; ENPEP, 3.4E−01, 6.8E−04; SPX, 3.4E−01, 3.4E−04; MESDC1, 3.4E−01, 3.9E−02; WASH2P, 3.5E−01, 3.5E−03; LOC100506178, 3.5E−01, 4.0E−05; |
| | TRIM32, 3.6E−01, 7.8E−03; KCTD12, 3.7E−01, 1.4E−02; PDZRN4, 3.7E−01, 1.4E−04; LOC105370487, 3.7E−01, 7.0E−03; ELFN1, 3.9E−01, 3.0E−02; TRIL, |
| | 3.9E−01, 4.8E−04; CNTN6, 3.9E−01, 3.9E−04; TRMT10A, 4.0E−01, 2.2E−02; SYTL5, 4.0E−01, 3.8E−02; ADGRA2, 4.1E−01, 2.3E−02; FOXP2, 4.1E−01, 2.8E−02; |
| | CYP7B1, 4.2E−01, 1.5E−02; COL3A1, 4.2E−01, 8.0E−05; SRPX2, 4.2E−01, 1.3E−06; LOC105379055, 4.2E−01, 1.7E−03; COPG2IT1, 4.2E−01, 1.2E−03; DAB2, |
| | 4.3E−01, 2.3E−02; RCAN1, 4.3E−01, 1.4E−02; LOC105374322, 4.3E−01, 1.7E−03; FKBP9, 4.3E−01, 4.1E−02; LOC105374959, 4.3E−01, 2.3E−03; PGM5, 4.4E−01, |
| | 7.0E−08; ADAM12, 4.4E−01, 3.2E−03; LOC151760, 4.4E−01, 7.9E−03; LOC101929710, 4.4E−01, 3.1E−02; MSC, 4.5E−01, 3.2E−03; ZHX1, 4.5E−01, 2.0E−02; |
| | SVEP1, 4.5E−01, 3.4E−07; CLECIA, 4.5E−01, 2.3E−07; LOC107984656, 4.6E−01, 6.9E−03; PCDHGC3, 4.6E−01, 3.0E−02; BLOC1S5−TXNDC5, 4.6E−01, |
| | 3.8E−02; C22orf29, 4.6E−01, 1.9E−02; ASXL3, 4.7E−01, 2.7E−02; IL1R1, 4.8E−01, 6.0E−05; LRRC6, 4.8E−01, 1.3E−02; NFKB1, 4.8E−01, 4.1E−02; P2RY1, |
| | 4.8E−01, 1.9E−02; FSIP2, 4.8E−01, 4.3E−02; SLITRK5, 4.9E−01, 1.2E−05; TMEM169, 4.9E−01, 2.7E−02; CNTN5, 4.9E−01, 2.1E−03; FAM104B, 4.9E−01, 3.3E−02; |
| | GNG12-AS1, 5.0E−01, 2.5E−06; ALX1, 5.0E−01, 2.4E−05; CUEDC1, 5.0E−01, 3.1E−02; SLC16A7, 5.0E−01, 3.1E−02; NTF3, 5.1E−01, 1.2E−02; GNPDA2, |
| | 5.1E−01, 2.2E−02; PLXND1, 5.1E−01, 3.4E−02; RASSF9, 5.1E−01, 3.8E−02; GNB1L, 5.1E−01, 8.8E−04; PKD1L1, 5.1E−01, 1.2E−03; RUNX2, 5.2E−01, 1.2E−04; |
| | ATP7A, 5.2E−01, 1.8E−02; NNMT, 5.2E−01, 1.2E−14; LOC101927815, 5.2E−01, 3.7E−04; MATN3, 5.2E−01, 1.3E−04; KDELC2, 5.2E−01, 1.4E−02; ARSJ, 5.2E−01, |
| | 3.9E−02; LINC01237, 5.2E−01, 4.6E−02; AMER2, 5.2E−01, 2.6E−06; SLFN5, 5.3E−01, 1.0E−03; LOC105369863, 5.3E−01, 3.4E−07; POU3F2, 5.4E−01, |
| | 1.4E−12; RGS3, 5.4E−01, 3.1E−02; NETO1, 5.4E−01, 2.7E−02; BAHCC1, 5.4E−01, 3.4E−06; PAG1, 5.4E−01, 1.7E−06; LOC107985969, 5.4E−01, 4.5E−02; |
| | ANGPT2, 5.4E−01, 6.8E−08; SUSD4, 5.5E−01, 1.3E−03; HECTD2, 5.6E−01, 7.2E−03; LOC101927359, 5.7E−01, 3.8E−07; ST3GAL1, 5.7E−01, 2.4E−03; PALM2− |
| | AKAP2, 5.7E−01, 2.4E−02; STAT6, 5.8E−01, 3.1E−02; BRINP2, 5.8E−01, 1.4E−12; LGALS1, 5.8E−01, 2.0E−03; EHD2, 5.8E−01, 2.4E−02; PDE7B, 5.9E−01, |
| | 1.1E−08; HHAT, 5.9E−01, 3.7E−03; YAF2, 5.9E−01, 1.5E−02; GADD45A, 5.9E−01, 3.3E−03; NDRG1, 6.0E−01, 1.1E−09; LOC101929563, 6.0E−01, 1.9E−02; UNC5C, |
| | 6.0E−01, 4.0E−03; PLAGL1, 6.0E−01, 3.7E−05; KIFAP3, 6.0E−01, 6.6E−03; SHANK1, 6.1E−01, 1.1E−03; DKK2, 6.1E−01, 3.5E−11; HGSNAT, 6.1E−01, 1.0E−02; |
| | LOC105374494, 6.2E−01, 3.9E−02; UBE2J1, 6.2E−01, 2.1E−03; NPR1, 6.3E−01, 2.2E−04; LOC102724832, 6.3E−01, 1.2E−02; WLS, 6.3E−01, 7.0E−03; |
| | TNFRSF19, 6.4E−01, 4.7E−04; SMYD2, 6.4E−01, 1.7E−03; SMAD6, 6.4E−01, 4.6E−02; RNF152, 6.5E−01, 3.2E−03; NID1, 6.6E−01, 1.6E−02; ENOX1, 6.6E−01, |
| | 9.4E−03; TSPAN12, 6.6E−01, 1.4E−02; DNM3OS, 6.6E−01, 6.9E−17; SPSB1, 6.7E−01, 4.9E−04; RNF180, 6.7E−01, 8.1E−03; C12orf4, 6.7E−01, 3.9E−02; |
| | SLC2A14, 6.8E−01, 5.1E−03; CLMN, 6.8E−01, 2.4E−02; EMILIN2, 6.8E−01, 5.6E−03; LOC105373202, 6.8E−01, 3.1E−02; ST8SIA2, 6.8E−01, 9.5E−04; CPE, |
| | 6.9E−01, 6.5E−03; LOC100507291, 6.9E−01, 2.6E−02; MECOM, 7.0E−01, 4.6E−03; ARFGAP3, 7.0E−01, 1.1E−02; ALPK2, 7.0E−01, 6.3E−07; TRIM5, 7.0E−01, |
| | 2.7E−02; MEGF8, 7.0E−01, 1.9E−02; MIR503HG, 7.0E−01, 2.8E−12; TIMP1, 7.1E−01, 3.7E−03; RIN2, 7.1E−01, 1.1E−04; DPY19L1, 7.1E−01, 3.6E−02; SHC3, |
| | 7.1E−01, 1.2E−05; ADAM9, 7.2E−01, 4.3E−02; WIPF1, 7.2E−01, 1.8E−03; BICC1, 7.2E−01, 1.9E−04; SRGAP2C, 7.2E−01, 1.0E−03; RNF19A, 7.2E−01, 1.3E−02; |
| | LINC00152, 7.3E−01, 3.4E−02; CXXC4, 7.3E−01, 4.9E−04; KLF6, 7.3E−01, 2.7E−02; COLGALT2, 7.3E−01, 2.1E−06; TTYH3, 7.4E−01, 3.6E−02; RUSC2, 7.4E−01, |
| | 1.5E−03; LOC100506974, 7.5E−01, 6.6E−04; ARF6, 7.5E−01, 4.1E−02; KBTBD2, 7.5E−01, 2.0E−02; CALCR, 7.5E−01, 6.3E−06; PREX1, 7.5E−01, 2.9E−03; |
| | CSMD3, 7.5E−01, 6.2E−05; JPH2, 7.5E−01, 3.1E−11; MCAM, 7.5E−01, 9.5E−04; FAM155A-IT1, 7.5E−01, 2.9E−07; FBN1, 7.5E−01, 8.6E−04; CYP1B1, 7.6E−01, |
| | 2.3E−10; FAM129B, 7.6E−01, 2.2E−03; MAF, 7.7E−01, 2.2E−03; AFF3, 7.7E−01, 4.4E−05; LRRC8C, 7.8E−01, 5.2E−05; LRRC28, 7.8E−01, 1.1E−02; MRC2, 7.9E−01, |
| | 2.9E−02; EPB41L4A, 7.9E−01, 2.0E−02; SLFN12, 7.9E−01, 1.1E−04; TGFB2, 8.0E−01, 3.8E−09; DUBR, 8.1E−01, 4.5E−09; HEYL, 8.1E−01, 8.0E−04; MMP2, |
| | 8.2E−01, 1.5E−04; TRAM2, 8.2E−01, 1.7E−02; KLF3, 8.3E−01, 3.9E−03; GATA3, 8.3E−01, 8.0E−04; NXPH2, 8.4E−01, 4.0E−02; SLC35F5, 8.4E−01, 3.5E−02; |
| | RGS16, 8.5E−01, 2.5E−02; ZFPM2, 8.5E−01, 1.8E−07; ARHGEF17, 8.5E−01, 1.1E−06; MDGA2, 8.6E−01, 7.0E−03; PLOD1, 8.6E−01, 3.4E−03; GCLM, 8.6E−01, |
| | 2.9E−03; MSRB3, 8.6E−01, 8.2E−08; PKDCC, 8.6E−01, 1.3E−03; MRPS25, 8.7E−01, 2.3E−02; GBE1, 8.7E−01, 1.4E−02; FAR2, 8.8E−01, 1.6E−02; C9orf84, 8.8E−01, |
| | 5.9E−03; HSPA2, 8.8E−01, 3.4E−03; FMNL3, 8.8E−01, 5.9E−03; RBM22, 8.8E−01, 1.8E−03; KCNB2, 8.8E−01, 2.2E−03; LOC105369715, 8.8E−01, 4.7E−15; |
| | NEGR1, 8.8E−01, 4.2E−02; MIR17HG, 8.8E−01, 5.1E−03; MIR181A1HG, 8.9E−01, 2.5E−13; MMP14, 8.9E−01, 4.1E−03; SSH1, 8.9E−01, 2.0E−03; HECW2, |
| | 8.9E−01, 1.2E−02; PPP3CC, 8.9E−01, 2.4E−05; SSFA2, 8.9E−01, 4.5E−07; MLLT11, 8.9E−01, 2.4E−02; CTGF, 9.0E−01, 1.1E−02; PARK2, 9.0E−01, 3.3E−02; |
| | DLC1, 9.1E−01, 3.6E−05; PAPD7, 9.1E−01, 2.4E−03; ARID5B, 9.1E−01, 4.0E−08; ETS1, 9.1E−01, 1.2E−02; KIAA0754, 9.1E−01, 6.6E−04; TNRC18, 9.1E−01, |
| | 3.1E−04; RBMS2, 9.2E−01, 8.0E−04; ARMC9, 9.2E−01, 4.7E−02; NPAS3, 9.2E−01, 3.0E−05; CIRBP, 9.2E−01, 2.2E−02; CREB3L1, 9.3E−01, 1.6E−05; MN1, 9.3E−01, |
| | 1.2E−02; C5orf42, 9.3E−01, 4.8E−02; MIR99AHG, 9.4E−01, 7.5E−09; RUFY2, 9.4E−01, 7.9E−03; RAP1A, 9.5E−01, 3.3E−02; RDH10, 9.5E−01, 6.7E−10; |
| | MAP3K1, 9.5E−01, 1.5E−03; KANSL1L, 9.5E−01, 3.6E−02; GPR161, 9.6E−01, 3.8E−03; PIK3R1, 9.6E−01, 1.2E−03; SEMA5A, 9.6E−01, 3.6E−02; GAB2, 9.6E−01, |
| | 4.0E−03; GLIS3, 9.6E−01, 1.9E−08; GRK5, 9.6E−01, 3.5E−05; DENND2A, 9.7E−01, 2.4E−02; NAALADL2, 9.7E−01, 3.2E−02; SNRPN, 9.7E−01, 4.6E−05; |
| | SPRED2, 9.7E−01, 3.4E−03; MPHOSPH9, 9.8E−01, 3.8E−02; SLC12A2, 9.8E−01, 7.1E−03; KCNH5, 9.8E−01, 1.0E−07; RNF146, 9.9E−01, 1.0E−03; MOB3B, |
| | 9.9E−01, 1.5E−02; RAI1, 9.9E−01, 1.6E−09; MACROH2A1, 1.0E+00, 1.0E−02; RNF144A, 1.0E+00, 1.9E−03; MACROH2A2, 1.0E+00, 3.3E−03; CLIP2, |
| | 1.0E+00, 2.8E−03; FSCN1, 1.0E+00, 4.0E−02; AHI1, 1.0E+00, 1.7E−02; SIK2, 1.0E+00, 7.1E−03; ANKRD26, 1.0E+00, 3.5E−02; NDFIP1, 1.0E+00, 2.2E−03; |
| | SH3PXD2A, 1.0E+00, 1.9E−03; GNAI1, 1.0E+00, 1.9E−02; APBA2, 1.0E+00, 1.7E−04; PRKCE, 1.0E+00, 4.5E−07; ST6GAL2, 1.0E+00, 5.9E−03; PPP4R1, |
| | 1.0E+00, 2.3E−02; ZNF124, 1.0E+00, 4.5E−02; MAN1A2, 1.0E+00, 3.1E−02; DYRK2, 1.0E+00, 4.2E−03; ELL2, 1.1E+00, 1.5E−02; ZBTB18, 1.1E+00, |
| | 1.4E−04; LRFN5, 1.1E+00, 1.1E−11; RCN1, 1.1E+00, 2.6E−02; MAP3K20, 1.1E+00, 7.4E−04; RABGEF1, 1.1E+00, 4.7E−02; STXBP5, 1.1E+00, 2.2E−02; DAAM1, |
| | 1.1E+00, 3.0E−02; DSE, 1.1E+00, 5.9E−03; BNC1, 1.1E+00, 9.4E−05; VOPP1, 1.1E+00, 3.9E−02; ZFYVE16, 1.1E+00, 1.4E−02; F3, 1.1E+00, 1.3E−07; |
| | TBC1D9, 1.1E+00, 7.2E−10; ANTXR2, 1.1E+00, 2.2E−07; RAB28, 1.1E+00, 4.7E−02; AIM2, 1.1E+00, 4.7E−07; WWC3, 1.1E+00, 3.1E−03; TENM1, 1.1E+00, |
| | 3.6E−04; SLC16A12, 1.1E+00, 2.3E−22; NBAS, 1.1E+00, 4.9E−02; MPRIP, 1.1E+00, 2.1E−02; IGF2, 1.1E+00, 8.2E−12; NOL4, 1.1E+00, 6.7E−10; FAT4, |
| | 1.1E+00, 2.8E−09; ATXN1, 1.1E+00, 1.1E−02; RPS6KA3, 1.1E+00, 7.6E−04; TNS1, 1.1E+00, 4.6E−06; ZFP36L1, 1.1E+00, 2.2E−02; BTBD7, 1.1E+00, 3.1E−02; |
| | CRISPLD1, 1.1E+00, 9.2E−03; CENPK, 1.1E+00, 4.2E−02; DGKD, 1.1E+00, 1.4E−06; SCRN1, 1.2E+00, 2.1E−02; PTCHD4, 1.2E+00, 3.4E−07; NUDT4, |
| | 1.2E+00, 1.3E−05; GALNT2, 1.2E+00, 2.6E−02; RNF145, 1.2E+00, 1.7E−03; SMAD5, 1.2E+00, 2.2E−02; GREB1, 1.2E+00, 3.1E−03; SLITRK6, 1.2E+00, |
| | 1.4E−15; ACTG1, 1.2E+00, 4.6E−02; PCDH10, 1.2E+00, 2.0E−10; ARHGAP24, 1.2E+00, 2.3E−05; RIC1, 1.2E+00, 4.6E−03; GLS, 1.2E+00, 1.5E−02; JAM3, 1.2E+00, |
| | 6.6E−03; ANO6, 1.2E+00, 4.1E−02; SDK2, 1.2E+00, 2.4E−02; FBXW8, 1.2E+00, 1.8E−03; DLG5, 1.2E+00, 1.9E−02; OGT, 1.2E+00, 3.3E−02; TTN, 1.2E+00, |
| | 4.8E−02; MEMO1, 1.2E+00, 1.1E−02; ELMO1, 1.2E+00, 5.1E−03; GRB10, 1.2E+00, 2.0E−02; SOX4, 1.2E+00, 4.9E−02; TUBA1A, 1.2E+00, 1.7E−02; SIPA1L2, |
| | 1.2E+00, 4.4E−03; ARHGAP10, 1.2E+00, 8.5E−04; MSC-AS1, 1.2E+00, 3.1E−06; TBC1D22A, 1.2E+00, 3.9E−02; CAPN2, 1.2E+00, 5.7E−07; VGLL4, 1.2E+00, |
| | 4.1E−03; GTDC1, 1.2E+00, 1.2E−02; NELL2, 1.2E+00, 7.2E−03; STC1, 1.2E+00, 6.0E−05; COL11A1, 1.2E+00, 2.9E−03; GNB4, 1.2E+00, 2.9E−04; H19, |
| | 1.2E+00, 3.2E−09; HACE1, 1.2E+00, 2.6E−03; GNG12, 1.2E+00, 1.5E−06; TBCK, 1.2E+00, 1.8E−02; PARP8, 1.2E+00, 3.1E−02; PDS5B, 1.2E+00, 4.5E−02; |
| | WSB1, 1.3E+00, 1.8E−02; PDLIM5, 1.3E+00, 9.2E−03; TP53I11, 1.3E+00, 1.0E−03; ABI2, 1.3E+00, 3.8E−02; NEK7, 1.3E+00, 8.0E−04; TACR3, 1.3E+00, |
| | 1.9E−09; AAK1, 1.3E+00, 3.2E−02; TNFRSF21, 1.3E+00, 2.9E−04; UBE2E3, 1.3E+00, 3.1E−02; SLC10A7, 1.3E+00, 4.7E−07; LCORL, 1.3E+00, 1.9E−02; |
| | EBF2, 1.3E+00, 1.3E−11; MYOF, 1.3E+00, 1.1E−07; KNTC1, 1.3E+00, 2.0E−02; PIBF1, 1.3E+00, 8.1E−03; CEP170, 1.3E+00, 3.3E−02; FADS1, 1.3E+00, 4.5E−02; |
| | RTN4, 1.3E+00, 5.0E−02; CPD, 1.3E+00, 1.9E−03; MSN, 1.3E+00, 1.7E−02; FST, 1.3E+00, 5.7E−07; TUSC3, 1.3E+00, 3.1E−02; UBL3, 1.3E+00, 3.1E−04; |
| | LOC101927483, 1.3E+00, 4.4E−04; NAV1, 1.3E+00, 7.5E−03; EVI5, 1.3E+00, 1.7E−03; RUNX1T1, 1.3E+00, 1.6E−02; UGGT2, 1.3E+00, 3.6E−02; USP3, |
| | 1.3E+00, 3.5E−08; TULP4, 1.3E+00, 2.9E−02; MEF2A, 1.3E+00, 2.7E−02; ELK3, 1.3E+00, 1.0E−06; IGF2BP2, 1.3E+00, 4.9E−02; LOC100506718, 1.3E+00, |
| | 3.6E−21; FAM13A, 1.3E+00, 1.1E−02; FBXW7, 1.3E+00, 2.0E−02; ANGPT1, 1.3E+00, 1.0E−10; METTL15, 1.3E+00, 1.2E−02; MTUS2, 1.3E+00, 8.6E−11; |
| | KIAA1324L, 1.3E+00, 2.6E−03; VPS54, 1.3E+00, 3.3E−03; TTC17, 1.3E+00, 3.9E−02; RNF13, 1.3E+00, 2.6E−03; TNS3, 1.3E+00, 1.1E−02; ITGA1, 1.3E+00, |
| | 9.8E−10; YAP1, 1.3E+00, 3.1E−02; SLIT3, 1.3E+00, 4.2E−05; CEP128, 1.3E+00, 1.5E−02; ABCA5, 1.3E+00, 1.5E−08; DNAJC1, 1.3E+00, 1.7E−04; SFMBT2, |
| | 1.3E+00, 1.5E−03; SCFD2, 1.3E+00, 5.4E−04; HMGCR, 1.3E+00, 4.0E−02; SPATA6, 1.3E+00, 1.6E−04; PHTF2, 1.3E+00, 7.9E−04; COL5A1, 1.3E+00, 6.9E−10; |
| | SLC7A11, 1.3E+00, 3.2E−03; GLCCI1, 1.4E+00, 4.4E−03; TLN1, 1.4E+00, 1.9E−03; PPP3CA, 1.4E+00, 1.5E−02; KLF12, 1.4E+00, 2.0E−02; LYN, 1.4E+00, |
| | 1.2E−03; VTI1A, 1.4E+00, 2.1E−02; SLC8A1, 1.4E+00, 9.6E−10; PELI1, 1.4E+00, 8.0E−03; CORO1C, 1.4E+00, 5.5E−03; EPHA6, 1.4E+00, 1.8E−08; SLC5A3, |
| | 1.4E+00, 8.4E−06; DDR2, 1.4E+00, 1.1E−22; CDC14B, 1.4E+00, 3.0E−03; ADGRG6, 1.4E+00, 3.8E−17; SERPINH1, 1.4E+00, 1.7E−02; ASCC3, 1.4E+00, 3.4E−02; |
| | EPB41L2, 1.4E+00, 1.6E−02; TNIK, 1.4E+00, 1.1E−03; PCNX1, 1.4E+00, 1.0E−02; TEAD1, 1.4E+00, 2.6E−02; ARHGAP6, 1.4E+00, 5.1E−13; MYH9, |
| | 1.4E+00, 1.9E−02; BAZ2B, 1.4E+00, 2.6E−02; BACH1, 1.4E+00, 6.9E−04; SSH2, 1.4E+00, 3.2E−03; PHF14, 1.4E+00, 2.0E−02; RFTN2, 1.4E+00, 6.1E−09; |
| | KIF5B, 1.4E+00, 1.0E−02; TRIM44, 1.4E+00, 1.0E−03; SPATS2, 1.4E+00, 2.0E−03; GPC5, 1.4E+00, 1.4E−11; TRIB2, 1.4E+00, 4.3E−08; NSMCE2, 1.4E+00, |
| | 7.8E−03; HMCN1, 1.4E+00, 5.1E−07; LOC105378178, 1.4E+00, 8.8E−11; PABPC4L, 1.4E+00, 1.2E−17; DCC, 1.5E+00, 6.8E−12; CRIM1, 1.5E+00, 2.4E−03; |
| | FBXL17, 1.5E+00, 2.8E−03; CHSY3, 1.5E+00, 5.4E−08; RFC3, 1.5E+00, 1.4E−02; AGAP1, 1.5E+00, 1.7E−02; RUFY3, 1.5E+00, 1.9E−04; EZH2, 1.5E+00, 4.0E−03; |
| | GREB1L, 1.5E+00, 2.1E−03; ANP32B, 1.5E+00, 6.9E−03; DYRK1A, 1.5E+00, 1.1E−02; FLT1, 1.5E+00, 1.3E−02; CEP85L, 1.5E+00, 2.6E−08; RFX3, |
| | 1.5E+00, 1.1E−02; ITPKB, 1.5E+00, 1.4E−19; MAP1B, 1.5E+00, 1.1E−02; ARHGAP5, 1.5E+00, 5.2E−03; UBR3, 1.5E+00, 3.7E−05; ANKRD17, 1.5E+00, |
| | 1.4E−02; SLC38A2, 1.5E+00, 1.3E−02; GPM6B, 1.5E+00, 1.7E−02; MALAT1, 1.5E+00, 4.4E−13; C1orf21, 1.5E+00, 1.4E−02; CCBE1, 1.5E+00, 2.4E−11; DAAM2, |
| | 1.5E+00, 1.8E−11; WDFY3, 1.5E+00, 9.3E−03; KSR1, 1.5E+00, 7.8E−05; IVNS1ABP, 1.5E+00, 4.5E−03; DIAPH3, 1.5E+00, 1.4E−02; NCOA2, 1.5E+00, |
| | 1.3E−02; MDFIC, 1.5E+00, 2.7E−10; MAN2A1, 1.5E+00, 8.7E−03; LPGAT1, 1.5E+00, 1.8E−09; TMTC2, 1.5E+00, 3.7E−03; FSTL1, 1.5E+00, 9.8E−03; BMPR2, |
| | 1.5E+00, 2.4E−03; KALRN, 1.5E+00, 1.4E−04; ANTXR1, 1.5E+00, 7.7E−04; SMAD2, 1.5E+00, 7.9E−03; RAD54B, 1.5E+00, 3.5E−04; MBD5, 1.5E+00, 9.4E−03; |
| | UHRF1, 1.6E+00, 3.8E−07; PCNX4, 1.6E+00, 4.0E−04; MKLN1, 1.6E+00, 5.1E−03; ST7, 1.6E+00, 1.2E−05; ANXA1, 1.6E+00, 2.0E−18; TRPS1, 1.6E+00, |
| | 3.6E−04; KAT6A, 1.6E+00, 5.7E−04; GBF1, 1.6E+00, 5.9E−05; NR6A1, 1.6E+00, 6.0E−03; PHC2, 1.6E+00, 1.4E−16; GNG2, 1.6E+00, 1.6E−13; |
| | LOC100506885, 1.6E+00, 4.4E−15; LAMB1, 1.6E+00, 9.0E−04; STK3, 1.6E+00, 8.8E−04; AMOTL1, 1.6E+00, 3.4E−05; TENM3, 1.6E+00, 3.2E−03; PDGFRB, |
| | 1.6E+00, 6.3E−18; CAP2, 1.6E+00, 5.3E−06; S1PR3, 1.6E+00, 1.4E−10; HEG1, 1.6E+00, 3.9E−06; MED13, 1.6E+00, 2.8E−03; GSK3B, 1.6E+00, 2.4E−03; |
| | CEP112, 1.6E+00, 1.3E−07; DIP2C, 1.6E+00, 2.7E−04; NR3C1, 1.6E+00, 2.4E−05; LINC01515, 1.7E+00, 1.9E−05; RAD51B, 1.7E+00, 4.4E−03; REEP3, |
| | 1.7E+00, 2.7E−05; TCF4, 1.7E+00, 2.7E−03; MAMDC2, 1.7E+00, 1.6E−09; NAB1, 1.7E+00, 2.6E−10; CCNY, 1.7E+00, 4.2E−04; MED13L, 1.7E+00, 4.4E−03; |
| | PHLDB2, 1.7E+00, 7.4E−05; CYR61, 1.7E+00, 1.5E−09; MBNL2, 1.7E+00, 3.4E−24; PHLPP1, 1.7E+00, 1.7E−03; PPFIBP1, 1.7E+00, 2.0E−05; SPATA5, |
| | 1.7E+00, 1.8E−03; ADAM19, 1.7E+00, 3.8E−10; PRICKLE2, 1.7E+00, 1.0E−05; SRGAP2, 1.7E+00, 5.5E−09; LIN28B, 1.7E+00, 2.4E−03; ADGRL2, 1.7E+00, |
| | 1.7E−03; FIGN, 1.7E+00, 7.9E−04; TSPAN6, 1.7E+00, 2.0E−05; HMGA2, 1.7E+00, 1.3E−03; ZFAND3, 1.7E+00, 2.4E−03; WWC2, 1.7E+00, 1.8E−03; STK38L, |
| | 1.7E+00, 1.2E−06; PTPRG, 1.7E+00, 2.1E−05; TSC22D1, 1.8E+00, 1.5E−03; COLEC12, 1.8E+00, 7.1E−20; ZNF516, 1.8E+00, 3.5E−11; DGKH, 1.8E+00, 4.5E−07; |
| | DOCK4, 1.8E+00, 1.5E−04; EDNRB, 1.8E+00, 3.4E−06; ANO4, 1.8E+00, 4.0E−06; FLNC, 1.8E+00, 2.7E−07; ASAP1, 1.8E+00, 1.0E−03; SDC2, 1.8E+00, |
| | 1.4E−04; MSI2, 1.8E+00, 1.3E−03; TENM2, 1.8E+00, 1.8E−08; ZBTB16, 1.8E+00, 4.0E−21; GNAQ, 1.8E+00, 8.6E−04; VAV3, 1.8E+00, 7.6E−10; COL2A1, |
| | 1.8E+00, 1.6E−15; CACNA1C, 1.8E+00, 8.6E−12; ETV6, 1.9E+00, 3.7E−05; LOC105377134, 1.9E+00, 8.5E−07; PIAS1, 1.9E+00, 3.1E−05; TAGLN, 1.9E+00, |
| | 1.9E−09; MIR924HG, 1.9E+00, 1.5E−03; TBC1D5, 1.9E+00, 3.7E−04; ENC1, 1.9E+00, 3.3E−20; TCF12, 1.9E+00, 4.6E−04; KTN1, 1.9E+00, 2.6E−04; CREB5, |
| | 1.9E+00, 6.9E−21; PKNOX2, 1.9E+00, 1.0E−05; CDK6, 1.9E+00, 1.7E−04; PBX3, 1.9E+00, 5.9E−04; DST, 2.0E+00, 6.3E−05; FTO, 2.0E+00, 1.9E−05; |
| | FERMT2, 2.0E+00, 1.5E−05; CCDC50, 2.0E+00, 2.6E−11; DENND2B, 2.0E+00, 1.4E−09; MEF2C, 2.0E+00, 3.2E−42; APP, 2.0E+00, 9.1E−05; LOC105374693, |
| | 2.0E+00, 5.2E−11; MPDZ, 2.0E+00, 2.7E−06; SMYD3, 2.0E+00, 2.1E−04; PDE10A, 2.0E+00, 9.2E−11; NCALD, 2.1E+00, 6.4E−11; FNDC3B, 2.1E+00, 8.6E−05; |
| | FN1, 2.1E+00, 1.3E−05; RASAL2, 2.1E+00, 7.5E−05; ANKRD1, 2.1E+00, 8.4E−16; NOVA1-AS1, 2.1E+00, 2.7E−18; PLK2, 2.1E+00, 1.0E−29; RASA3, |
| | 2.1E+00, 5.0E−15; LOC107984581, 2.1E+00, 6.1E−17; ROCK2, 2.1E+00, 2.7E−06; LOC644919, 2.1E+00, 3.8E−05; JMJD1C, 2.1E+00, 3.4E−06; PTPRD, |
| | 2.1E+00, 2.9E−05; SETBP1, 2.1E+00, 1.2E−06; FGF10, 2.1E+00, 2.3E−41; SEMA6D, 2.1E+00, 3.3E−11; MAPK10, 2.1E+00, 4.8E−07; AKAP13, 2.1E+00, 2.1E−05; |
| | TLE4, 2.1E+00, 1.5E−06; PTK2, 2.1E+00, 2.7E−05; EPHA7, 2.2E+00, 3.7E−13; COL1A2, 2.2E+00, 9.6E−08; CBLB, 2.2E+00, 2.2E−06; CERS6, 2.2E+00, |
| | 3.1E−06; ANK2, 2.2E+00, 5.5E−07; CLSTN2, 2.2E+00, 7.8E−16; ROR2, 2.2E+00, 6.3E−12; NF1, 2.2E+00, 6.3E−06; TMCC1, 2.2E+00, 1.3E−06; OXR1, |
| | 2.2E+00, 7.3E−13; NEXN, 2.2E+00, 3.9E−09; EDIL3, 2.2E+00, 1.2E−07; THBS1, 2.3E+00, 3.5E−17; RNF217, 2.3E+00, 8.3E−14; PTPRK, 2.3E+00, 5.4E−06; |
| | C3orf70, 2.3E+00, 2.3E−20; FRMD6, 2.3E+00, 6.5E−18; CDH11, 2.3E+00, 7.7E−10; NRIP1, 2.3E+00, 1.2E−10; PARD3, 2.4E+00, 2.1E−06; TRIO, 2.4E+00, |
| | 3.2E−06; NFAT5, 2.4E+00, 7.0E−08; PTPRM, 2.4E+00, 5.8E−05; SCMH1, 2.4E+00, 1.1E−10; COL4A2, 2.4E+00, 8.9E−13; NEAT1, 2.4E+00, 1.6E−09; LHFP, |
| | 2.4E+00, 1.8E−09; PCDH7, 2.4E+00, 2.0E−06; HACD2, 2.4E+00, 1.5E−13; COL4A1, 2.4E+00, 7.3E−13; HDAC9, 2.4E+00, 8.6E−11; BGN, 2.4E+00, 8.2E−30; |
| | SVIL, 2.5E+00, 7.1E−11; LOXL2, 2.5E+00, 4.7E−14; AKT3, 2.5E+00, 5.1E−07; EPHA3, 2.5E+00, 9.6E−24; NID2, 2.5E+00, 8.0E−31; TTC28, 2.5E+00, 6.0E−07; |
| | S100A11, 2.5E+00, 1.9E−10; LINC-PINT, 2.5E+00, 2.6E−13; COL5A2, 2.6E+00, 3.1E−19; EFR3A, 2.6E+00, 2.3E−10; PICALM, 2.6E+00, 2.7E−10; MGAT5, |
| | 2.6E+00, 1.0E−07; BZW2, 2.6E+00, 6.7E−12; SPARC, 2.6E+00, 1.6E−08; ROBO2, 2.7E+00, 3.3E−06; KCNE5, 2.7E+00, 1.3E−47; HS3ST3A1, 2.7E+00, 3.5E−25; |
| | PLEKHA5, 2.7E+00, 1.3E−09; COL12A1, 2.7E+00, 5.8E−59; KCNT2, 2.7E+00, 1.0E−08; SEPTIN7, 2.7E+00, 5.0E−09; ZNF704, 2.8E+00, 2.8E−16; ESRRG, |
| | 2.8E+00, 9.3E−34; WWOX, 2.8E+00, 3.5E−08; SMURF2, 2.8E+00, 1.1E−18; FBXL7, 2.8E+00, 2.2E−09; HEY1, 2.8E+00, 6.0E−58; KIRREL1, 2.8E+00, 5.0E−13; |
| | SNAI2, 2.8E+00, 6.3E−15; PTPN14, 2.8E+00, 1.6E−09; ZSWIM6, 2.8E+00, 2.1E−10; CNTNAP2, 2.8E+00, 3.7E−09; BCAT1, 2.9E+00, 9.8E−10; ZEB1, |
| | 2.9E+00, 2.1E−32; SHROOM3, 2.9E+00, 3.8E−14; HS6ST2, 2.9E+00, 2.3E−10; ST8SIA4, 2.9E+00, 7.7E−75; CHD7, 2.9E+00, 2.7E−10; MID1, 2.9E+00, 6.5E−12; |
| | ZNF521, 3.0E+00, 3.1E−14; COL1A1, 3.0E+00, 2.5E−14; PELI2, 3.0E+00, 2.4E−12; SULF1, 3.0E+00, 8.9E−28; KCND2, 3.1E+00, 1.9E−09; PDE3B, |
| | 3.1E+00, 1.9E−19; LM03, 3.1E+00, 3.6E−39; AHNAK, 3.1E+00, 6.0E−17; TANC1, 3.1E+00, 3.4E−22; TFPI, 3.1E+00, 2.9E−58; TTC3, 3.2E+00, 3.1E−16; |
| | RBMS1, 3.2E+00, 1.6E−12; EOGT, 3.2E+00, 2.8E−32; DUSP6, 3.3E+00, 4.6E−34; DDAH1, 3.3E+00, 1.6E−30; CAMK2D, 3.4E+00, 2.6E−22; SPATS2L, |
| | 3.4E+00, 7.3E−15; ST6GALNAC3, 3.4E+00, 3.4E−11; KIF26B, 3.5E+00, 9.2E−16; NES, 3.5E+00, 1.4E−13; FAM126A, 3.5E+00, 9.0E−15; ALCAM, 3.5E+00, |
| | 4.8E−15; CADM1, 3.5E+00, 3.1E−20; ZBTB7C, 3.5E+00, 3.2E−53; ZEB2, 3.6E+00, 8.3E−37; AUTS2, 3.6E+00, 5.0E−19; GATM, 3.6E+00, 1.1E−56; EXT1, |
| | 3.6E+00, 1.4E−14; DOK6, 3.7E+00, 5.8E−33; MACF1, 3.7E+00, 4.4E−21; TBX15, 3.7E+00, 8.9E−39; CCND2, 3.7E+00, 7.9E−16; PALLD, 3.8E+00, 1.3E−20; |
| | EFNA5, 3.8E+00, 8.4E−17; ARHGAP28, 3.8E+00, 4.9E−27; FAM171A1, 3.8E+00, 2.2E−26; COPG2, 3.9E+00, 1.3E−20; LRP1B, 3.9E+00, 1.7E−44; LPP, |
| | 4.0E+00, 2.8E−18; SSBP2, 4.0E+00, 3.1E−18; NLGN1, 4.1E+00, 6.6E−16; CDK14, 4.1E+00, 1.7E−18; ROBO1, 4.1E+00, 2.0E−18; SAMD4A, 4.1E+00, |
| | 1.1E−34; MIR4435−2HG, 4.1E+00, 2.3E−26; ITGAV, 4.1E+00, 3.0E−34; PARVA, 4.2E+00, 5.0E−39; PRKG1, 4.2E+00, 2.8E−19; ADAMTS9, 4.2E+00, 2.2E−61; P3H2, |
| | 4.4E+00, 4.1E−26; ITPR2, 4.4E+00, 4.6E−27; APBB2, 4.5E+00, 5.0E−24; SOX5, 4.5E+00, 1.4E−22; CDH10, 4.6E+00, 1.8E−53; CCDC102B, 4.7E+00, 6.2E−67; |
| | ARHGAP42, 4.7E+00, 2.9E−28; PLXNA2, 4.7E+00, 8.0E−55; GPC3, 4.8E+00, 1.3E−25; BMPR1B, 4.8E+00, 1.4E−71; EBF1, 4.9E+00, 3.9E−104; MEST, |
| | 4.9E+00, 7.3E−34; CALD1, 5.0E+00, 2.2E−27; PDZD2, 5.2E+00, 7.9E−35; SYT1, 5.2E+00, 2.1E−30; FAT1, 5.3E+00, 1.1E−35; MAML2, 5.3E+00, 2.3E−41; |
| | FBN2, 5.4E+00, 7.8E−46; STXBP5L, 5.4E+00, 2.4E−41; TMTC1, 5.5E+00, 3.8E−33; ITPR1, 5.8E+00, 7.3E−93; GPC6, 5.8E+00, 5.4E−34; PRTG, 6.1E+00, 8.3E−37; |
| | SOX6, 6.2E+00, 1.5E−109; HAPLN1, 6.5E+00, 2.0E−44; SORBS2, 6.6E+00, 3.1E−73; INPP4B, 6.6E+00, 3.1E−100; SEPTIN11, 6.7E+00, 6.4E−50; SLIT2, |
| | 7.0E+00, 4.5E−51; FAM155A, 7.6E+00, 1.5E−65; RBMS3, 8.2E+00, 5.0E−93; RHOBTB3, 8.7E+00, 3.9E−129; ATP2B1, 9.0E+00, 1.1E−94; FLRT2, 9.8E+00, |
| | 5.1E−136; VIM, 9.8E+00, 1.8E−110; ZNF804A, 1.7E+01, 8.5E−284 |
| 6 | PTMA, −3.3E+01, 3.2E−62; RPL4, −3.3E+01, 5.4E−33; RPS8, −3.2E+01, 6.6E−39; ACTG1, −3.2E+01, 7.6E−30; ACTB, −3.2E+01, 6.6E−39; RPL11, −3.1E+01, |
| | 7.0E−33; GAPDH, −3.1E+01, 4.6E−36; RPL6, −3.0E+01, 6.7E−27; EEF1A1, −3.0E+01, 1.9E−58; TPT1, −3.0E+01, 5.0E−24; RPL8, −2.9E+01, 4.8E−23; RPL13A, |
| | −2.9E+01, 6.8E−32; RPL15, −2.9E+01, 1.1E−21; TMSB4X, −2.8E+01, 1.6E−20; RPS24, −2.8E+01, 2.6E−21; RPS19, −2.8E+01, 2.3E−21; HSP90AB1, −2.8E+01, |
| | 3.9E−39; RPL34, −2.8E+01, 1.4E−21; RPL19, −2.8E+01, 5.0E−21; RPL31, −2.8E+01, 3.3E−22; RPS12, −2.7E+01, 4.3E−20; RPS11, −2.7E+01, 1.6E−19; RPL13, |
| | −2.7E+01, 3.9E−20; HNRNPA1, −2.7E+01, 6.7E−30; NPM1, −2.7E+01, 3.9E−35; RPL3, −2.7E+01, 2.9E−23; RPS6, −2.6E+01, 8.9E−31; H4C3, −2.6E+01, 3.4E−15; |
| | LIN28A, −2.6E+01, 9.0E−26; CD24, −2.6E+01, 9.4E−23; RPL7, −2.5E+01, 2.4E−17; RPL14, −2.5E+01, 8.1E−17; EEF2, −2.5E+01, 7.9E−17; RPL18, |
| | −2.5E+01, 3.8E−16; RPS3, −2.4E+01, 1.4E−15; RPL23, −2.4E+01, 1.8E−15; HSP90AA1, −2.4E+01, 9.0E−29; EIF4G2, −2.4E+01, 3.6E−16; FTH1, −2.4E+01, |
| | 1.3E−14; HSPD1, −2.4E+01, 6.8E−19; RPL10A, −2.3E+01, 1.2E−14; RPS2, −2.3E+01, 1.2E−14; RPS23, −2.3E+01, 3.9E−15; RPLP1, −2.3E+01, 5.6E−21; LDHB, |
| | −2.3E+01, 2.9E−15; RPS18, −2.3E+01, 3.8E−16; RPS27A, −2.3E+01, 7.6E−15; SET, −2.3E+01, 4.0E−16; RPL21, −2.3E+01, 1.2E−13; RPL10, −2.3E+01, 7.0E−14; |
| | CANX, −2.2E+01, 4.9E−14; RPLPO, −2.2E+01, 3.0E−13; RPL12, −2.2E+01, 9.8E−14; RACK1, −2.2E+01, 1.5E−13; RPL7A, −2.2E+01, 4.1E−14; RPS7, −2.2E+01, |
| | 7.4E−13; RPS16, −2.2E+01, 8.5E−13; POU5F1, −2.2E+01, 1.5E−12; RPL24, −2.2E+01, 1.6E−12; RPS13, −2.2E+01, 6.3E−13; NCL, −2.2E+01, 3.4E−19; RPS15A, |
| | −2.2E+01, 1.5E−12; PFN1, −2.2E+01, 3.7E−12; RPS27, −2.2E+01, 3.3E−12; GSTP1, −2.2E+01, 5.0E−12; TUBA1B, −2.1E+01, 1.4E−12; RPS15, −2.1E+01, |
| | 1.6E−11; PABPC1, −2.1E+01, 7.2E−16; RPL32, −2.1E+01, 9.6E−12; TUBB, −2.1E+01, 2.3E−12; RPSA, −2.1E+01, 2.6E−11; PAICS, −2.1E+01, 9.3E−12; FTL, −2.1E+01, |
| | 2.1E−11; HMGA1, −2.1E+01, 4.6E−12; NUCKS1, −2.1E+01, 1.2E−13; PRDX1, −2.1E+01, 9.8E−12; H1-5, −2.0E+01, 1.3E−09; CALM1, −2.0E+01, 4.8E−11; |
| | RPL27A, −2.0E+01, 2.1E−11; RPL18A, −2.0E+01, 1.1E−11; NACA, −2.0E+01, 1.1E−10; HNRNPK, −2.0E+01, 4.0E−11; RPS9, −2.0E+01, 1.2E−10; RPS29, |
| | −2.0E+01, 1.4E−10; RPL5, −2.0E+01, 1.7E−11; RPLP2, −2.0E+01, 3.5E−10; TPM3, −2.0E+01, 2.4E−10; ENO1, −2.0E+01, 8.7E−11; RAN, −2.0E+01, 2.2E−10; |
| | NASP, −2.0E+01, 8.0E−12; RPL35A, −2.0E+01, 1.9E−09; RPL26, −1.9E+01, 2.7E−10; HNRNPA2B1, −1.9E+01, 3.4E−19; MDK, −1.9E+01, 3.1E−10; RPL27, |
| | −1.9E+01, 3.0E−11; RPS14, −1.9E+01, 5.0E−10; HSPA8, −1.9E+01, 2.6E−12; MYL6, −1.9E+01, 7.7E−10; CALM2, −1.9E+01, 2.3E−09; RPS4X, −1.9E+01, 2.9E−09; |
| | RPL37, −1.9E+01, 2.6E−09; RPL28, −1.9E+01, 2.1E−09; RPS3A, −1.9E+01, 2.6E−09; EEF1G, −1.8E+01, 5.1E−09; YWHAE, −1.8E+01, 4.7E−09; UBB, |
| | −1.8E+01, 2.9E−09; TMSB10, −1.8E+01, 1.2E−09; SCD, −1.8E+01, 2.4E−09; RPS17, −1.8E+01, 2.7E−08; HMGB2, −1.8E+01, 3.1E−09; GDI2, −1.7E+01, 2.2E−08; |
| | CBX5, −1.7E+01, 2.3E−08; CEBPZ, −1.7E+01, 4.4E−08; CHD4, −1.7E+01, 5.8E−08; PRDX6, −1.7E+01, 1.2E−08; RPL29, −1.7E+01, 4.5E−08; CFL1, −1.7E+01, |
| | 1.1E−08; HSPA4, −1.7E+01, 7.4E−08; TCP1, −1.7E+01, 1.7E−08; EEF1B2, −1.7E+01, 4.4E−08; SERBP1, −1.7E+01, 2.8E−08; YWHAZ, −1.7E+01, 5.6E−08; |
| | RPS20, −1.7E+01, 1.8E−07; FAU, −1.7E+01, 7.5E−08; RPL36, −1.7E+01, 2.4E−07; TPI1, −1.7E+01, 7.9E−08; CLTC, −1.7E+01, 1.9E−07; RPL9, −1.7E+01, |
| | 1.9E−07; RHOA, −1.7E+01, 1.8E−08; PEBP1, −1.6E+01, 1.5E−08; RPL30, −1.6E+01, 2.8E−07; RPS28, −1.6E+01, 4.4E−08; HMGB1, −1.6E+01, 5.7E−07; YWHAB, |
| | −1.6E+01, 1.7E−07; ATP5F1A, −1.6E+01, 3.2E−07; CCT3, −1.6E+01, 2.7E−07; RPL35, −1.6E+01, 3.1E−07; H2AZ1, −1.6E+01, 7.0E−07; H1-3, −1.6E+01, 3.9E−06; |
| | RPL38, −1.6E+01, 7.6E−08; PTGES3, −1.6E+01, 9.5E−07; STMN1, −1.6E+01, 1.5E−07; SMARCA5, −1.6E+01, 9.0E−07; KPNB1, −1.6E+01, 7.1E−07; |
| | ATP5F1B, −1.6E+01, 1.2E−06; HMGCS1, −1.6E+01, 2.6E−06; SSB, −1.6E+01, 6.4E−07; SOX2, −1.6E+01, 6.2E−07; SKP1, −1.6E+01, 1.3E−07; CALR, −1.5E+01, |
| | 1.7E−06; EIF4B, −1.5E+01, 3.1E−06; YBX1, −1.5E+01, 2.2E−06; MORF4L1, −1.5E+01, 2.5E−06; PARP1, −1.5E+01, 2.0E−06; MATR3, −1.5E+01, 7.1E−07; |
| | SUMO2, −1.5E+01, 8.5E−08; VCP, −1.5E+01, 9.9E−07; CYCS, −1.5E+01, 1.6E−07; XRCC5, −1.5E+01, 2.2E−07; PPIA, −1.5E+01, 3.9E−06; TDGF1, −1.5E+01, |
| | 4.6E−07; G3BP2, −1.5E+01, 8.0E−06; NORAD, −1.5E+01, 2.3E−06; PGRMC1, −1.5E+01, 2.5E−06; RPS5, −1.5E+01, 9.0E−06; CYP51A1, −1.5E+01, 2.2E−06; |
| | GJA1, −1.5E+01, 9.2E−06; CSDE1, −1.5E+01, 9.5E−06; CCT8, −1.5E+01, 2.5E−06; ND5, −1.4E+01, 2.4E−20; H3F3B, −1.4E+01, 8.6E−06; DNMT3B, −1.4E+01, |
| | 4.8E−09; TXNRD1, −1.4E+01, 9.0E−06; COX4I1, −1.4E+01, 4.3E−07; RPL22, −1.4E+01, 1.0E−06; HNRNPA3, −1.4E+01, 2.2E−05; H1-2, −1.4E+01, 1.2E−05; |
| | H2AC17,−1.4E+01, 1.4E−06; HMGB3, −1.4E+01, 4.6E−06; HNRNPU, −1.4E+01, 2.8E−06; ILF3, −1.4E+01, 3.6E−05; IPO5, −1.4E+01, 3.0E−05; ESRG, −1.4E+01, |
| | 7.0E−05; GNAS, −1.4E+01, 4.3E−05; RPS26, −1.4E+01, 5.8E−07; ANP32E, −1.4E+01, 3.4E−06; PLS3, −1.4E+01, 4.2E−05; DYNLL1, −1.4E+01, 5.9E−06; MDH1, |
| | −1.4E+01, 1.5E−05; AP2M1, −1.4E+01, 6.6E−07; RCC2, −1.4E+01, 6.1E−05; SON, −1.4E+01, 6.7E−05; SRSF3, −1.3E+01, 6.1E−05; CCT6A, −1.3E+01, 3.9E−05; |
| | CLDN6, −1.3E+01, 1.5E−05; COX3, −1.3E+01, 7.4E−20; ND6, −1.3E+01, 4.7E−06; UBC, −1.3E+01, 1.1E−05; HMGN1, −1.3E+01, 2.7E−05; CBX3, −1.3E+01, 2.1E−05; |
| | UQCRB, −1.3E+01, 1.1E−06; PDIA3, −1.3E+01, 1.3E−04; ANP32B, −1.3E+01, 5.6E−07; CYTB, −1.3E+01, 7.6E−15; SRP14, −1.3E+01, 1.4E−05; HSP90B1, |
| | −1.3E+01, 2.0E−05; CCT4, −1.3E+01, 7.3E−05; KPNA2, −1.3E+01, 1.4E−04; LITAF, −1.3E+01, 1.1E−05; UBA52, −1.3E+01, 3.8E−05; RPS25, −1.3E+01, 6.7E−06; |
| | CCT5, −1.3E+01, 1.2E−04; H2AC20, −1.3E+01, 5.2E−06; HNRNPM, −1.3E+01, 3.1E−04; L1TD1, −1.3E+01, 7.6E−07; CCND1, −1.3E+01, 1.7E−04; CCT2, |
| | −1.3E+01, 1.4E−04; NONO, −1.3E+01, 2.9E−04; NDUFA4, −1.3E+01, 2.1E−05; DDX18, −1.2E+01, 8.9E−06; RAD21, −1.2E+01, 2.0E−04; DDX1, −1.2E+01, 6.1E−05; |
| | C11orf58, −1.2E+01, 1.1E−04; ACLY, −1.2E+01, 2.4E−04; FKBP3, −1.2E+01, 1.4E−04; HIST1H1E, −1.2E+01, 1.8E−04; NARS1, −1.2E+01, 6.5E−05; PARK7, |
| | −1.2E+01, 6.7E−05; COX6B1, −1.2E+01, 2.9E−07; TKT, −1.2E+01, 3.7E−04; DDX3X, −1.2E+01, 3.1E−04; CLIC4, −1.2E+01, 7.6E−04; BTF3, −1.2E+01, 1.5E−04; |
| | APEX1, −1.2E+01, 4.0E−05; DBI, −1.2E+01, 2.6E−05; AKIRIN1, −1.2E+01, 4.5E−04; SUPT16H, −1.2E+01, 8.4E−04; XRCC6, −1.2E+01, 8.4E−04; TARS1, |
| | −1.2E+01, 1.3E−03; HNRNPDL, −1.2E+01, 8.8E−04; RPL37A, −1.2E+01, 1.2E−03; ATP5PD, −1.2E+01, 1.8E−05; SF3B1, −1.2E+01, 1.2E−03; DNAJA1, −1.2E+01, |
| | 2.5E−04; MSH6, −1.2E+01, 1.1E−03; COX5B, −1.2E+01, 1.7E−05; IQGAP1, −1.2E+01, 9.4E−04; RPS21, −1.2E+01, 7.4E−04; YWHAG, −1.2E+01, 7.7E−04; SLIRP, |
| | −1.2E+01, 8.8E−05; ST13, −1.1E+01, 2.9E−04; OAZ1, −1.1E+01, 5.9E−05; CCT7, −1.1E+01, 1.9E−05; DDX5, −1.1E+01, 2.5E−03; HSPA5, −1.1E+01, 2.0E−03; |
| | CDC42, −1.1E+01, 1.0E−04; CSE1L, −1.1E+01, 1.5E−03; IGF2BP1, −1.1E+01, 1.4E−03; SMC3, −1.1E+01, 1.7E−03; COX7C, −1.1E+01, 8.5E−04; RBMX, |
| | −1.1E+01, 1.4E−03; TRIM28, −1.1E+01, 1.8E−04; EIF1, −1.1E+01, 1.1E−04; PODXL, −1.1E+01, 8.3E−04; IFITM1, −1.1E+01, 3.7E−06; ARL6IP1, −1.1E+01, 7.7E−04; |
| | DSTN, −1.1E+01, 8.0E−04; SNHG5, −1.1E+01, 1.7E−04; RPL23A, −1.1E+01, 2.4E−04; H2AZ2, −1.1E+01, 4.0E−05; FLNA, −1.1E+01, 2.7E−03; SERF2, |
| | −1.1E+01, 7.7E−05; NOLC1, −1.1E+01, 8.8E−04; UGP2, −1.1E+01, 3.9E−04; DEK, −1.1E+01, 4.0E−03; PSMA4, −1.1E+01, 8.1E−04; EIF2S3, −1.1E+01, 2.3E−03; |
| | UBTF, −1.0E+01, 2.9E−05; SEPHS1, −1.0E+01, 3.3E−03; DENR, −1.0E+01, 1.4E−03; MCM4, −1.0E+01, 5.9E−03; RN7SK, −1.0E+01, 3.6E−03; ALDOA, −1.0E+01, |
| | 5.9E−04; CCNB1, −1.0E+01, 7.8E−04; TARDBP, −1.0E+01, 2.0E−03; HSBP1, −1.0E+01, 8.7E−05; LDHA, −1.0E+01, 4.7E−05; CD63, −1.0E+01, 5.3E−04; COX1, |
| | −1.0E+01, 1.1E−14; HMGN2, −1.0E+01, 1.4E−03; AZIN1, −1.0E+01, 2.4E−03; PEG10, −1.0E+01, 6.8E−04; H2AC11, −1.0E+01, 1.7E−04; NDUFS5, −1.0E+01, |
| | 1.4E−03; TOMM20, −1.0E+01, 2.5E−03; SRRM2, −1.0E+01, 7.5E−03; TFAM, −1.0E+01, 3.2E−04; ACVR2B, −1.0E+01, 4.2E−03; NUDT21, −1.0E+01, 8.8E−04; |
| | SNRNP200, −1.0E+01, 3.1E−03; STIP1, −1.0E+01, 2.5E−03; CLU, −1.0E+01, 1.6E−03; MAPRE1, −9.9E+00, 6.9E−04; G3BP1, −9.9E+00, 1.2E−02; RANBP2, |
| | −9.9E+00, 1.1E−02; SERPINB9, −9.8E+00, 8.8E−04; SKIL, −9.8E+00, 1.3E−02; NAP1L1, −9.8E+00, 5.0E−03; DCP2, −9.8E+00, 8.2E−03; ABCF1, −9.8E+00, 7.7E−04; |
| | MCM6, −9.8E+00, 2.4E−03; PKM, −9.7E+00, 6.2E−03; HDLBP, −9.7E+00, 1.3E−02; PDIA6, −9.7E+00, 9.4E−03; ATP6, −9.7E+00, 4.4E−09; PPP1CC, |
| | −9.7E+00, 6.2E−03; ND1, −9.7E+00, 3.3E−04; SOD1, −9.7E+00, 1.5E−04; TMED2, −9.7E+00, 7.8E−04; COX2, −9.6E+00, 3.7E−06; HNRNPD, −9.6E+00, 1.6E−02; |
| | ARPC2, −9.6E+00, 3.1E−03; PRRC2A, −9.6E+00, 1.5E−03; CNOT1, −9.6E+00, 1.3E−02; YWHAQ, −9.5E+00, 1.6E−02; TOP2A, −9.5E+00, 3.0E−02; MLEC, |
| | −9.5E+00, 1.1E−02; ND4L, −9.5E+00, 1.3E−02; SLC16A1, −9.5E+00, 1.6E−02; MTHFD2, −9.5E+00, 1.8E−03; HNRNPR, −9.5E+00, 1.3E−02; CNBP, −9.4E+00, |
| | 7.7E−03; TUBB2B, −9.4E+00, 1.0E−04; PSIP1, −9.4E+00, 2.0E−02; KRT18, −9.4E+00, 6.1E−05; SRSF7, −9.4E+00, 5.0E−03; KRT8, −9.3E+00, 2.4E−04; FBL, |
| | −9.3E+00, 2.0E−03; SLC2A3, −9.3E+00, 9.4E−04; GSPT1, −9.3E+00, 1.0E−03; RBM3, −9.3E+00, 6.2E−04; PDIA4, −9.3E+00, 7.9E−03; YBX3, −9.2E+00, 1.8E−03; |
| | ERH, −9.2E+00, 1.6E−03; SERPINH1, −9.2E+00, 3.2E−03; DPPA4, −9.1E+00, 1.7E−02; H3C4, −9.1E+00, 1.3E−03; EZR, −9.1E+00, 2.2E−02; ACTR2, −9.1E+00, |
| | 1.0E−02; PSME3, −9.1E+00, 3.3E−04; ZNF770, −9.1E+00, 8.0E−03; RSL1D1, −9.1E+00, 1.1E−02; TPM4, −9.0E+00, 2.2E−02; GLO1, −9.0E+00, 5.8E−03; ATP8, |
| | −9.0E+00, 1.8E−02; ND2, −9.0E+00, 7.5E−04; C14orf166, −9.0E+00, 6.4E−03; EIF2S2, −9.0E+00, 6.3E−03; CFAP298, −9.0E+00, 2.8E−03; TUBA1A, −8.9E+00, |
| | 1.1E−03; SEPTIN2, −8.9E+00, 3.0E−02; MARCKS, −8.9E+00, 2.5E−03; UBA2, −8.9E+00, 1.1E−02; NFE2L1, −8.9E+00, 5.6E−03; PSMB1, −8.9E+00, 3.0E−03; |
| | PABPC4, −8.9E+00, 1.2E−03; SOX11, −8.9E+00, 6.7E−03; BZW1, −8.9E+00, 2.0E−03; THRAP3, −8.8E+00, 2.9E−02; ND4, −8.8E+00, 1.6E−13; RPL7L1, |
| | −8.8E+00, 1.1E−03; PAIP2, −8.8E+00, 6.0E−03; PGD, −8.8E+00, 3.7E−03; SOX4, −8.8E+00, 1.8E−03; FSCN1, −8.7E+00, 1.2E−04; SUB1, −8.7E+00, 6.4E−03; |
| | PPAT, −8.7E+00, 5.4E−03; HSPA9, −8.7E+00, 3.4E−02; IDH1, −8.7E+00, 3.6E−02; ATP5PB, −8.7E+00, 2.9E−03; CKB, −8.7E+00, 8.4E−04; TMA7, −8.6E+00, |
| | 2.8E−04; BEX3, −8.6E+00, 1.4E−02; SELENOW, −8.6E+00, 1.0E−03; ILF2, −8.6E+00, 6.4E−03; H3C2, −8.6E+00, 1.3E−02; ZFP42, −8.6E+00, 1.2E−02; MYH10, |
| | −8.6E+00, 1.6E−02; FDFT1, −8.6E+00, 4.4E−02; SFRP1, −8.6E+00, 3.6E−02; CCNG1, −8.6E+00, 2.9E−02; JPT2, −8.5E+00, 2.0E−02; ATP5MG, −8.5E+00, |
| | 1.2E−03; PTBP1, −8.5E+00, 1.8E−02; UBE21, −8.5E+00, 4.4E−03; H3C6, −8.5E+00, 1.7E−04; FUS, −8.5E+00, 4.2E−02; APLP2, −8.5E+00, 4.3E−02; EIF5A, −8.4E+00, |
| | 2.0E−02; PSMB4, −8.4E+00, 6.1E−04; DUT, −8.4E+00, 6.9E−03; USP7, −8.4E+00, 2.4E−02; RPL41, −8.4E+00, 2.6E−03; SARAF, −8.4E+00, 2.1E−03; NUDC, |
| | −8.4E+00, 6.2E−03; LTA4H, −8.4E+00, 3.5E−03; TMEM97, −8.3E+00, 5.2E−03; GNL3, −8.3E+00, 1.6E−02; ZC3H15, −8.3E+00, 1.1E−02; DBN1, −8.3E+00, |
| | 1.3E−02; MAP1LC3B, −8.3E+00, 2.9E−04; ID1, −8.3E+00, 1.4E−03; LAPTM4A, −8.2E+00, 4.0E−03; PSAP, −8.2E+00, 3.4E−02; TFRC, −8.2E+00, 1.5E−02; RNF168, |
| | −8.2E+00, 1.3E−02; EIF5, −8.2E+00, 4.0E−02; UBAP2L, −8.2E+00, 3.6E−02; CNN3, −8.2E+00, 3.5E−02; EIF3L, −8.2E+00, 2.8E−02; IMPDH2, −8.2E+00, 7.9E−03; |
| | CBX1, −8.2E+00, 2.4E−02; GHITM, −8.2E+00, 5.9E−04; MRFAP1, −8.2E+00, 9.3E−03; AHCY, −8.1E+00, 6.1E−03; EIF4G1, −8.1E+00, 4.4E−02; TMED10, |
| | −8.1E+00, 8.8E−03; USP1, −8.0E+00, 7.9E−03; EDF1, −8.0E+00, 1.2E−02; DDX21, −8.0E+00, 4.8E−02; ZNF146, −8.0E+00, 4.2E−02; RPN2, −8.0E+00, 2.3E−02; |
| | EID1, −7.9E+00, 2.3E−02; RAB1A, −7.9E+00, 8.6E−03; ATP5PO, −7.9E+00, 2.2E−02; EIF4EBP2, −7.9E+00, 2.6E−02; SLC25A3, −7.9E+00, 3.4E−02; XPO1, |
| | −7.9E+00, 4.3E−02; ATXN7L3B, −7.9E+00, 5.1E−03; ZFAND5, −7.9E+00, 3.7E−02; VAT1, −7.9E+00, 2.6E−03; CDC37, −7.9E+00, 2.4E−03; PSMA7, −7.8E+00, |
| | 4.2E−02; ATP5MF, −7.8E+00, 2.9E−03; CLIC1, −7.7E+00, 2.4E−03; XPOT, −7.7E+00, 4.2E−02; HELLS, −7.7E+00, 3.9E−02; STRAP, −7.7E+00, 2.7E−02; |
| | CDC123, −7.7E+00, 1.7E−02; KARS1, −7.7E+00, 1.2E−02; H2AC8, −7.6E+00, 3.5E−03; CAP1, −7.6E+00, 2.8E−02; SSR3, −7.6E+00, 2.4E−02; PCBP1, −7.6E+00, |
| | 9.1E−03; BSG, −7.6E+00, 4.0E−02; NUP50, −7.6E+00, 1.4E−02; PFDN5, −7.6E+00, 4.8E−03; GPX4, −7.6E+00, 4.9E−03; KHSRP, −7.6E+00, 2.7E−02; CNN2, |
| | −7.5E+00, 2.7E−02; ZNF106, −7.5E+00, 3.9E−02; NDUFS6, −7.5E+00, 7.1E−03; CCND2, −7.5E+00, 4.5E−02; LMAN1, −7.5E+00, 1.4E−02; RPL13AP5, −7.5E+00, |
| | 4.4E−03; VRTN, −7.5E+00, 2.6E−03; MCM7, −7.4E+00, 7.7E−03; ENY2, −7.4E+00, 1.6E−02; PRDX5, −7.4E+00, 6.0E−04; MRPL47, −7.4E+00, 5.2E−04; NHP2, |
| | −7.3E+00, 1.6E−03; ATP5MC3, −7.3E+00, 2.9E−02; RPN1, −7.3E+00, 9.2E−03; HINT1, −7.3E+00, 2.9E−02; SNAR−E, −7.3E+00, 4.4E−03; POLR1D, −7.3E+00, |
| | 1.4E−02; POLR2L, −7.3E+00, 1.2E−03; BAZ2A, −7.3E+00, 3.5E−02; HYOU1, −7.3E+00, 3.7E−02; PRMT1, −7.2E+00, 2.4E−02; DCTN1, −7.2E+00, 7.0E−03; |
| | COX5A, −7.2E+00, 1.1E−02; S100A10, −7.2E+00, 4.4E−04; EIF2AK2, −7.2E+00, 3.4E−02; NIPSNAP1, −7.2E+00, 4.2E−02; ATP5J, −7.1E+00, 6.9E−03; SGO2, |
| | −7.1E+00, 8.4E−03; PGK1, −7.1E+00, 3.3E−02; SNRPD2, −7.1E+00, 4.1E−02; COX7A2, −7.1E+00, 1.7E−02; COX8A, −7.1E+00, 1.3E−02; RDH11, −7.1E+00, 5.1E−03; |
| | RRP1B, −7.1E+00, 2.7E−02; C1QBP, −7.1E+00, 9.5E−03; SF3A3, −7.1E+00, 4.6E−02; FERMT2, −7.0E+00, 3.9E−02; EIF3K, −7.0E+00, 1.8E−02; NDUFA13, |
| | −7.0E+00, 3.4E−02; PPDPF, −7.0E+00, 5.1E−03; ATP6V1G1, −6.9E+00, 1.4E−02; SPARC, −6.9E+00, 1.0E−02; PHB, −6.9E+00, 2.6E−02; PSMD2, −6.9E+00, |
| | 4.2E−02; TCEB2, −6.9E+00, 1.1E−02; RTF1, −6.9E+00, 2.9E−02; PPT1, −6.8E+00, 5.4E−03; HIST1H2AJ, −6.8E+00, 1.4E−02; PRDX2, −6.8E+00, 2.3E−02; |
| | MRPL51, −6.8E+00, 1.3E−02; GMFB, −6.8E+00, 2.3E−02; RANBP1, −6.8E+00, 3.2E−02; COX7B, −6.8E+00, 5.0E−03; SNRPF, −6.7E+00, 2.7E−02; SERP1, |
| | −6.7E+00, 2.6E−02; PCYOX1, −6.7E+00, 8.0E−03; EIF3I, −6.6E+00, 2.3E−02; NME4, −6.6E+00, 7.7E−03; MSN, −6.6E+00, 1.6E−02; SP1, −6.6E+00, 3.7E−02; |
| | WIPI2, −6.6E+00, 4.0E−03; RPL36AL, −6.6E+00, 4.6E−02; SLC25A5, −6.6E+00, 2.7E−02; PLA2G16, −6.5E+00, 3.0E−03; YWHAH, −6.5E+00, 2.3E−02; |
| | MTHFD1, −6.5E+00, 4.6E−02; OSTC, −6.5E+00, 4.5E−02; WDR82, −6.5E+00, 9.4E−03; SNRPE, −6.5E+00, 3.9E−02; EI24, −6.4E+00, 1.7E−03; DKC1, −6.4E+00, |
| | 5.0E−02; C9orf78, −6.4E+00, 5.6E−03; TSPAN6, −6.4E+00, 2.2E−02; TUBB4B, −6.4E+00, 8.0E−03; FKBP4, −6.4E+00, 4.6E−02; NDUFB11, −6.4E+00, 2.8E−03; |
| | RMND5A, −6.4E+00, 4.1E−02; HSPA14, −6.4E+00, 1.2E−02; ARPC5, −6.4E+00, 2.5E−02; CTR9, −6.3E+00, 2.7E−02; PMAIP1, −6.2E+00, 4.4E−02; HIST1H4D, |
| | −6.2E+00, 4.8E−03; RAB13, −6.2E+00, 3.0E−02; SNRPA1, −6.2E+00, 3.3E−02; NSUN2, −6.2E+00, 3.1E−02; NDUFB10, −6.2E+00, 2.0E−02; USP9X, −6.2E+00, |
| | 3.1E−02; PHAX, −6.2E+00, 3.1E−02; NOL7, −6.2E+00, 3.5E−02; MRPL21, −6.1E+00, 1.6E−03; SCOC, −6.1E+00, 2.1E−03; CRABP1, −6.1E+00, 1.7E−02; |
| | AKR1A1, −6.1E+00, 3.7E−02; SNRPB2, −6.1E+00, 2.8E−02; EBNA1BP2, −6.1E+00, 1.3E−02; ZNF680, −6.1E+00, 2.5E−02; SAP18, −6.0E+00, 4.3E−02; COX6C, |
| | −6.0E+00, 2.5E−02; ICMT, −6.0E+00, 4.6E−02; LSM3, −5.9E+00, 3.4E−02; SURF4, −5.9E+00, 1.5E−02; NDUFB8, −5.9E+00, 2.4E−02; NIFK, −5.8E+00, 2.6E−02; |
| | TIMM44, −5.8E+00, 2.1E−03; COA4, −5.8E+00, 4.8E−02; CHP1, −5.7E+00, 3.4E−02; TGIF1, −5.7E+00, 2.5E−02; KDELR1, −5.7E+00, 3.0E−02; HSPE1, |
| | −5.7E+00, 4.6E−02; PSMB6, −5.7E+00, 4.9E−02; UMPS, −5.6E+00, 1.8E−02; UQCRC1, −5.6E+00, 3.3E−02; SNU13, −5.6E+00, 7.9E−03; VIM, −5.6E+00, 4.1E−02; |
| | PSMB3, −5.6E+00, 1.1E−02; LYAR, −5.5E+00, 8.0E−03; TMEM258, −5.5E+00, 1.8E−02; MRPL45, −5.5E+00, 3.9E−03; ZCRB1, −5.5E+00, 2.1E−02; |
| | MYBBP1A, −5.4E+00, 2.7E−03; NOSIP, −5.4E+00, 2.0E−03; PSMD8, −5.4E+00, 4.6E−02; GID8, −5.4E+00, 2.7E−02; NDUFB7, −5.4E+00, 2.3E−02; PSMC4, |
| | −5.3E+00, 7.8E−03; HIST1H3H, −5.3E+00, 2.0E−02; CMAS, −5.3E+00, 3.9E−02; EIF3G, −5.3E+00, 2.8E−02; STOML2, −5.3E+00, 1.7E−02; AKR1B1, −5.3E+00, |
| | 4.8E−02; COPZ1, −5.2E+00, 4.6E−02; PURB, −5.2E+00, 3.6E−02; NGRN, −5.2E+00, 4.8E−02; PGAM1, −5.2E+00, 1.5E−02; HIST1H2AK, −5.2E+00, 4.9E−03; |
| | TMEM261, −5.2E+00, 4.1E−02; NDUFA11, −5.2E+00, 2.5E−02; SNRPG, −5.2E+00, 4.0E−02; PLRG1, −5.2E+00, 4.4E−02; PBX2, −5.1E+00, 2.1E−02; FKBP2, |
| | −5.1E+00, 1.7E−02; METTL5, −5.1E+00, 2.3E−02; AES, −5.1E+00, 1.8E−02; RFC2, −5.1E+00, 3.5E−02; TOMM5, −5.1E+00, 3.6E−02; AURKAIP1, −5.0E+00, |
| | 2.8E−02; NDUFA12, −5.0E+00, 4.1E−02; ARF4, −5.0E+00, 3.6E−02; WDR45B, −5.0E+00, 3.7E−02; SERINC3, −5.0E+00, 2.8E−02; MINOS1, −5.0E+00, 2.6E−02; |
| | CSTB, −4.9E+00, 2.5E−02; C14orf2, −4.9E+00, 4.9E−02; UBQLN2, −4.9E+00, 2.1E−02; ERLEC1, −4.8E+00, 3.0E−03; SSR4, −4.8E+00, 3.6E−02; IFITM3, |
| | −4.8E+00, 3.3E−02; COPS6, −4.8E+00, 3.8E−02; DNAJB1, −4.8E+00, 2.2E−02; POLR2G, −4.8E+00, 1.2E−02; ASAH1, −4.8E+00, 3.4E−02; ARHGD1A, −4.8E+00, |
| | 1.9E−02; HIST4H4, −4.7E+00, 2.1E−02; NDUFA3, −4.7E+00, 4.1E−02; YIPF6, −4.6E+00, 4.4E−02; RAD23A, −4.6E+00, 6.4E−03; EHD4, −4.6E+00, 4.2E−02; |
| | UQCRQ, −4.6E+00, 1.1E−02; DYNLT1, −4.5E+00, 4.1E−02; SPAG7, −4.5E+00, 1.6E−02; SGCB, −4.5E+00, 4.5E−02; DSCC1, −4.4E+00, 1.2E−02; MTERF3, |
| | −4.4E+00, 3.0E−02; LLPH, −4.4E+00, 2.0E−03; ZNHIT1, −4.3E+00, 4.4E−02; RRS1, −4.3E+00, 1.4E−02; PKN1, −4.3E+00, 4.5E−02; THYN1, −4.2E+00, 2.1E−02; |
| | EIF1AY, −4.1E+00, 3.4E−02; SMOC1, −4.0E+00, 1.4E−02; SPP1, −4.0E+00, 8.5E−04; APOPT1, −4.0E+00, 4.2E−02; C8orf33, −3.8E+00, 3.3E−02; HIST2H2BF, |
| | −3.7E+00, 2.7E−02; PEA15, −3.7E+00, 1.3E−02; HSD17B10, −3.7E+00, 4.9E−02; SYT4, −3.6E+00, 3.2E−03; ZNF330, −3.6E+00, 3.5E−02; SIVA1, −3.5E+00, |
| | 3.3E−02; NABP2, −3.5E+00, 2.1E−02; MRPL36, −3.5E+00, 2.3E−02; SURF2, −3.4E+00, 1.1E−02; PRMT6, −3.4E+00, 2.1E−02; WDR18, −3.4E+00, 8.6E−03; |
| | COPS7A, −3.1E+00, 3.1E−02; RMI2, −2.9E+00, 4.1E−02; MAPK3, −2.8E+00, 1.0E−02; TMEM128, −2.8E+00, 3.5E−02; CABLES2, −2.6E+00, 8.6E−03; ELOVL1, |
| | −2.6E+00, 2.9E−02; HHLA1, −2.5E+00, 3.8E−02; KPTN, −2.1E+00, 1.3E−02; ZSCAN31, −2.0E+00, 4.3E−02; PHLDA3, −1.7E+00, 4.6E−02; LOC100996447, |
| | −1.6E+00, 2.5E−02; LOC105372457, −1.6E+00, 4.9E−03; GLI4, −1.5E+00, 4.8E−02; TMEM215, −1.1E+00, 4.6E−02; LOC105373186, −9.8E−01, 1.5E−02; |
| | GHET1, −7.2E−01, 4.0E−02; LOC101929532, −6.0E−01, 2.6E−02; DPPA5, −5.7E−01, 4.5E−02; NXF2B, 2.9E−01, 2.1E−02; RASAL2-AS1, 3.1E−01, 1.4E−02; |
| | SNORD14A, 3.9E−01, 3.7E−02; TMEM88B, 4.1E−01, 2.9E−02; LINC01498, 4.1E−01, 1.6E−02; MIR1267, 4.2E−01, 3.7E−02; LOC102724046, 4.7E−01, 2.6E−02; |
| | LOC102724615, 4.7E−01, 3.4E−02; ZBTB20-AS4, 5.1E−01, 1.6E−02; LOC105374313, 5.3E−01, 1.4E−02; LOC107984704, 5.4E−01, 4.6E−02; |
| | LOC105370647, 5.5E−01, 3.0E−02; LOC105373174, 6.0E−01, 9.7E−03; LOC102723879, 6.4E−01, 3.0E−02; LINC01338, 6.4E−01, 4.8E−02; LOC107984530, |
| | 6.8E−01, 4.6E−02; CCDC129, 6.9E−01, 4.0E−02; FGF16, 8.6E−01, 4.9E−03; LOC105378340, 8.9E−01, 3.3E−02; LOC105377977, 8.9E−01, 1.6E−03; |
| | LOC107984718, 1.0E+00, 2.0E−02; CCDC63, 1.1E+00, 2.3E−02; LOC107986807, 1.2E+00, 1.0E−02; GNB3, 1.3E+00, 4.0E−02; XACT, 1.4E+00, 7.6E−03; |
| | LOC105374970, 1.4E+00, 3.2E−02; LOC105376086, 1.6E+00, 3.0E−02; TMEM108-AS1, 1.6E+00, 2.1E−02; LOC101928731, 1.7E+00, 3.7E−03; |
| | LOC107984492, 1.8E+00, 1.9E−02; LEMD1, 1.8E+00, 2.8E−02; PTH2R, 1.8E+00, 1.6E−02; PLAC4, 2.0E+00, 2.4E−02; LOC105370824, 2.0E+00, 3.1E−02; |
| | LOC100505938, 2.1E+00, 2.7E−02; LOC107986901, 2.1E+00, 4.0E−03; LOC105371657, 2.1E+00, 2.2E−02; NME8, 2.1E+00, 9.1E−04; TBC1D9, 2.2E+00, |
| | 1.4E−02; HNF4G, 2.3E+00, 4.2E−02; STUM, 2.3E+00, 3.4E−03; FAM185A, 2.4E+00, 4.2E−02; LOC101927359, 2.5E+00, 3.0E−03; TRMO, 2.5E+00, 1.2E−02; |
| | HIVEP3, 2.5E+00, 6.9E−03; GPR141, 2.6E+00, 3.2E−02; RNF43, 2.6E+00, 2.6E−02; LOC107985195, 2.6E+00, 8.3E−04; LOC283194, 2.7E+00, 4.0E−02; |
| | PHACTR2-AS1, 2.7E+00, 4.2E−03; ZNF250, 2.7E+00, 3.7E−02; LOC107984754, 2.7E+00, 1.9E−02; XK, 2.8E+00, 2.0E−02; LINC00645, 2.8E+00, 8.4E−03; |
| | LOC100505918, 2.8E+00, 2.7E−02; KCNQ5, 2.8E+00, 4.1E−02; LOC105377130, 2.8E+00, 1.7E−02; LOC105374839, 2.8E+00, 6.9E−03; EBF1, 2.8E+00, |
| | 3.5E−02; LOC105372532, 2.9E+00, 2.6E−03; ABCB5, 2.9E+00, 2.0E−02; LOC107987171, 3.0E+00, 3.1E−02; FBN1, 3.0E+00, 3.6E−02; LOC105370558, |
| | 3.0E+00, 4.8E−02; RRN3P1, 3.0E+00, 3.0E−02; BCL6, 3.1E+00, 2.2E−02; LOC102724861, 3.1E+00, 7.5E−04; FANK1, 3.2E+00, 1.2E−02; LOC105370213, |
| | 3.2E+00, 5.9E−04; SEMA3C, 3.3E+00, 3.2E−02; RGS20, 3.3E+00, 3.8E−02; DDX11-AS1, 3.3E+00, 2.6E−02; OLFM3, 3.3E+00, 1.8E−02; C3orf35, 3.4E+00, |
| | 1.5E−02; LOC105374493, 3.4E+00, 2.6E−02; LOC101927286, 3.4E+00, 6.1E−03; LOC107987081, 3.5E+00, 7.9E−03; KCNK13, 3.5E+00, 1.5E−03; ZIC4, |
| | 3.5E+00, 4.9E−02; NFATC1, 3.5E+00, 3.1E−02; GOLGA8B, 3.5E+00, 9.3E−03; LOC107986293, 3.5E+00, 3.1E−02; PLXNC1, 3.5E+00, 3.3E−02; SUSD1, |
| | 3.6E+00, 2.3E−02; MDFIC, 3.6E+00, 2.1E−02; LINC01339, 3.7E+00, 4.9E−02; NOMO1, 3.7E+00, 2.3E−02; LOC105372633, 3.8E+00, 3.6E−02; PRKCH, |
| | 3.8E+00, 4.2E−02; STPG2-AS1, 3.8E+00, 1.3E−03; PID1, 3.9E+00, 4.3E−02; PPP4R1L, 3.9E+00, 4.4E−02; TNFSF4, 3.9E+00, 7.1E−03; CLEC2A, 3.9E+00, |
| | 6.5E−04; GABRB2, 3.9E+00, 8.0E−03; SLC16A12, 4.0E+00, 1.7E−02; FRMD3, 4.0E+00, 1.7E−02; MIR2052HG, 4.0E+00, 1.5E−02; PTER, 4.1E+00, 1.4E−02; |
| | MBP, 4.1E+00, 3.2E−02; TGFBRAP1, 4.1E+00, 1.6E−02; LPIN1, 4.2E+00, 2.3E−02; TMLHE, 4.2E+00, 2.7E−02; HERC2P3, 4.2E+00, 1.4E−02; PAQR8, |
| | 4.2E+00, 2.8E−02; CELF4, 4.3E+00, 3.1E−02; DENND1B, 4.3E+00, 4.7E−02; ST8SIA6, 4.4E+00, 1.2E−02; ASB18, 4.4E+00, 1.2E−03; NPAS2, 4.4E+00, 6.4E−03; |
| | SERTAD2, 4.4E+00, 4.6E−02; LOC101929077, 4.5E+00, 2.4E−03; C8orf34, 4.5E+00, 4.9E−02; SLC10A7, 4.5E+00, 2.1E−02; PLEKHG1, 4.6E+00, |
| | 1.3E−02; CASC9, 4.6E+00, 1.4E−02; TAPT1-AS1, 4.6E+00, 8.2E−03; TNFAIP8L3, 4.6E+00, 2.3E−02; ARSB, 4.7E+00, 2.5E−02; LDLRAD4, 4.7E+00, 2.9E−02; |
| | LOC107986813, 4.7E+00, 8.0E−04; LOC105373153, 4.7E+00, 1.6E−03; EML5, 4.7E+00, 4.7E−03; LOC105373785, 4.7E+00, 2.8E−02; LOC105371077, |
| | 4.8E+00, 6.2E−03; CACNA1C, 4.8E+00, 4.6E−02; LOC107986022, 4.8E+00, 8.3E−03; FAM73A, 4.8E+00, 2.4E−02; LOC107984294, 4.9E+00, 6.4E−03; |
| | TBC1D22B, 4.9E+00, 3.0E−02; IL1RAPL2, 4.9E+00, 2.6E−02; LOC105377803, 4.9E+00, 7.8E−03; ACVR1B, 5.0E+00, 1.7E−02; ADRA1A, 5.0E+00, 2.6E−03; |
| | NAALAD2, 5.0E+00, 3.9E−02; LINC00937, 5.0E+00, 2.1E−02; PAX7, 5.0E+00, 4.6E−03; MCM9, 5.1E+00, 8.0E−03; B4GALT6, 5.1E+00, 4.2E−02; ANKRD6, |
| | 5.1E+00, 4.1E−02; ME1, 5.1E+00, 1.5E−02; PDGFD, 5.1E+00, 3.3E−02; LM03, 5.1E+00, 9.8E−03; NAPB, 5.2E+00, 9.7E−03; TRHDE, 5.2E+00, 8.2E−03; |
| | LOC101926942, 5.3E+00, 2.7E−03; CASP2, 5.3E+00, 1.1E−02; FAM53B, 5.3E+00, 2.2E−02; TANK, 5.3E+00, 3.7E−02; LINC01057, 5.3E+00, 3.8E−02; |
| | FLRT2, 5.3E+00, 1.1E−02; MCTP2, 5.3E+00, 8.0E−03; ZNF385B, 5.4E+00, 2.6E−02; PDGFC, 5.4E+00, 7.3E−03; KIRREL3, 5.5E+00, 6.3E−04; NKAIN2, |
| | 5.5E+00, 3.7E−02; DHRS7B, 5.5E+00, 4.1E−02; SERGEF, 5.5E+00, 4.2E−02; CAMK4, 5.6E+00, 4.8E−02; LOC105377700, 5.6E+00, 2.0E−02; COBLL1, |
| | 5.6E+00, 9.6E−03; BCAR3, 5.6E+00, 3.8E−02; SCN9A, 5.6E+00, 3.2E−03; LOC107985704, 5.7E+00, 1.8E−02; BMT2, 5.7E+00, 4.6E−02; LOC102724858, |
| | 5.7E+00, 2.8E−07; C9orf85, 5.7E+00, 3.2E−02; LYPD6, 5.7E+00, 3.0E−02; CDH8, 5.7E+00, 2.5E−02; PTCHD1, 5.7E+00, 6.7E−03; VPS50, 5.7E+00, 2.1E−02; |
| | PPARGC1B, 5.8E+00, 3.0E−02; HECW1, 5.8E+00, 4.6E−03; STEAP2, 5.9E+00, 2.4E−02; RORB, 5.9E+00, 4.2E−03; STIM2, 6.0E+00, 6.4E−03; GRB14, |
| | 6.0E+00, 1.3E−02; LRRC1, 6.0E+00, 1.9E−03; CHIC2, 6.0E+00, 2.3E−02; FSTL4, 6.0E+00, 9.2E−03; KHDRBS3, 6.0E+00, 8.2E−03; HCG17, 6.0E+00, 2.4E−02; |
| | EVA1C, 6.0E+00, 1.4E−02; RSRP1, 6.0E+00, 6.4E−03; CEP85L, 6.0E+00, 3.6E−03; LOC105371953, 6.1E+00, 1.5E−02; FKTN, 6.1E+00, 3.1E−03; |
| | ARHGEF26, 6.1E+00, 1.8E−02; USP3, 6.1E+00, 4.0E−03; ZFAT, 6.2E+00, 1.7E−04; RBMS3, 6.2E+00, 1.8E−02; NTN1, 6.2E+00, 3.2E−02; PDE10A, 6.2E+00, |
| | 4.1E−03; TMEM51, 6.2E+00, 3.5E−02; DLEU2, 6.2E+00, 3.1E−02; C1orf101, 6.2E+00, 5.3E−04; RUFY3, 6.2E+00, 4.4E−02; LOC105377959, 6.2E+00, 6.6E−06; |
| | HS6ST2, 6.2E+00, 3.8E−02; SDCCAG8, 6.3E+00, 2.1E−02; CCDC144NL-AS1, 6.3E+00, 1.2E−02; AMOTL1, 6.4E+00, 4.2E−03; FAR2, 6.4E+00, 1.8E−02; |
| | LOC645513, 6.4E+00, 2.0E−02; LOC107987083, 6.4E+00, 4.9E−02; LOC101929563, 6.5E+00, 1.0E−03; FRY, 6.5E+00, 1.5E−02; TSPAN18, 6.5E+00, |
| | 1.1E−02; SLCO5A1, 6.5E+00, 1.1E−03; NRP2, 6.5E+00, 3.7E−03; RPS6KA5, 6.5E+00, 1.1E−02; XRN1, 6.5E+00, 2.9E−02; DGKH, 6.5E+00, 4.7E−02; EPHA4, |
| | 6.5E+00, 4.7E−02; BMP7, 6.5E+00, 1.9E−03; ITGB8, 6.6E+00, 1.9E−03; EMB, 6.6E+00, 2.5E−02; SDC2, 6.6E+00, 3.5E−02; ANKDD1A, 6.6E+00, 3.7E−02; |
| | ABTB2, 6.6E+00, 3.2E−03; GDA, 6.6E+00, 4.8E−03; NEK7, 6.7E+00, 2.3E−02; UMAD1, 6.7E+00, 2.3E−02; FAM193A, 6.7E+00, 4.8E−02; TNRC18, 6.7E+00, |
| | 5.4E−03; VAV2, 6.7E+00, 3.3E−02; C6orf141, 6.7E+00, 3.8E−03; RIC1, 6.7E+00, 2.4E−02; LYPLAL1, 6.7E+00, 4.3E−02; SVIL, 6.8E+00, 1.8E−02; HECW2, |
| | 6.8E+00, 3.6E−03; SLC01A2, 6.8E+00, 7.0E−04; LRP1B, 6.8E+00, 1.9E−03; ZFHX3, 6.8E+00, 1.4E−02; FBXL4, 6.8E+00, 1.2E−02; CDHR3, 6.8E+00, 9.3E−03; |
| | SMAD3, 6.9E+00, 2.3E−02; TDRD3, 6.9E+00, 1.8E−02; IQCB1, 6.9E+00, 1.6E−02; LOC107983984, 6.9E+00, 2.0E−02; UGT8, 6.9E+00, 2.5E−02; |
| | LOC105374455, 6.9E+00, 9.2E−03; ANKH, 7.0E+00, 4.4E−05; AR, 7.0E+00, 1.9E−02; ZNF236, 7.0E+00, 9.2E−03; RNF13, 7.0E+00, 3.4E−02; SMOC2, |
| | 7.0E+00, 1.1E−04; SHROOM2, 7.0E+00, 1.3E−03; FCHSD2, 7.0E+00, 2.0E−02; OPHN1, 7.0E+00, 3.2E−02; PRKY, 7.0E+00, 1.9E−02; BCL11B, 7.1E+00, 3.5E−03; |
| | HTR2C, 7.1E+00, 2.2E−02; MIR124−2HG, 7.1E+00, 9.6E−06; UNC79, 7.1E+00, 1.0E−02; FAM13B, 7.1E+00, 3.4E−02; SLC22A23, 7.1E+00, 4.8E−03; |
| | SCMH1, 7.1E+00, 4.3E−02; FBXL20, 7.1E+00, 6.3E−03; EPN2, 7.1E+00, 3.3E−02; MEMO1, 7.1E+00, 4.7E−02; PPP1R12B, 7.2E+00, 2.5E−02; KANSL1L, |
| | 7.2E+00, 1.6E−02; AGBL4, 7.2E+00, 1.3E−03; LINC01122, 7.2E+00, 2.6E−02; POU6F2, 7.2E+00, 5.2E−03; LRP12, 7.2E+00, 1.7E−03; RAD54B, 7.2E+00, |
| | 4.5E−02; MRPS28, 7.2E+00, 3.5E−02; FGGY, 7.2E+00, 1.5E−02; FAM35A, 7.2E+00, 7.7E−03; JARID2, 7.3E+00, 2.3E−02; RREB1, 7.3E+00, 2.5E−02; TSSC1, |
| | 7.3E+00, 1.5E−02; SDHAP3, 7.3E+00, 1.2E−02; KCNH7, 7.3E+00, 1.1E−03; FAM189A1, 7.4E+00, 2.3E−02; CBFA2T2, 7.4E+00, 3.9E−02; ZNF75D, 7.4E+00, |
| | 2.0E−02; LOC101928437, 7.4E+00, 5.5E−03; RPS6KC1, 7.4E+00, 4.2E−02; REPS1, 7.4E+00, 4.5E−02; UHRF2, 7.4E+00, 1.6E−02; RNF138P1, 7.5E+00, |
| | 7.1E−04; PPHLN1, 7.5E+00, 4.2E−02; FRMD4B, 7.5E+00, 3.6E−04; SNX25, 7.5E+00, 9.5E−03; MEGF10, 7.5E+00, 4.9E−02; DOPEY1, 7.5E+00, 1.2E−02; |
| | MYO1D, 7.5E+00, 4.8E−02; CLCN3, 7.5E+00, 1.4E−02; LOC105369617, 7.5E+00, 2.4E−03; FNIP1, 7.5E+00, 1.9E−02; ETV1, 7.6E+00, 1.4E−02; NRF1, |
| | 7.6E+00, 2.1E−02; SMURF2, 7.6E+00, 2.4E−03; TET3, 7.6E+00, 1.6E−02; LAMA2, 7.6E+00, 5.6E−03; STXBP4, 7.6E+00, 1.0E−02; TBC1D4, 7.6E+00, 2.9E−02; |
| | PDE4D, 7.6E+00, 9.2E−03; EYA1, 7.6E+00, 1.3E−03; MALAT1, 7.6E+00, 2.0E−08; CDK5RAP2, 7.7E+00, 4.4E−02; LOC101928217, 7.7E+00, 1.3E−03; |
| | MIR325HG, 7.7E+00, 4.4E−03; CENPC, 7.7E+00, 4.9E−03; NOVA1, 7.7E+00, 1.0E−02; WNK2, 7.7E+00, 8.4E−03; ANO6, 7.7E+00, 3.3E−02; HCN1, 7.8E+00, |
| | 1.4E−02; CTIF, 7.8E+00, 2.7E−02; NUMB, 7.8E+00, 3.0E−02; SYN3, 7.8E+00, 3.9E−02; GMDS−AS1, 7.8E+00, 8.6E−03; RHBDD1, 7.8E+00, 4.5E−03; IKZF2, |
| | 7.8E+00, 1.0E−03; MON2, 7.8E+00, 1.7E−02; ZNF519, 7.8E+00, 1.8E−02; LOC100506990, 7.8E+00, 1.2E−02; GPR137C, 7.8E+00, 9.8E−03; LPAR1, |
| | 7.9E+00, 1.8E−05; TSHZ3, 7.9E+00, 4.7E−05; GSTCD, 7.9E+00, 1.5E−02; DCBLD2, 7.9E+00, 4.6E−02; CTDSPL, 7.9E+00, 9.2E−03; KATNBL1, 7.9E+00, 7.5E−03; |
| | RTTN, 7.9E+00, 6.4E−03; ANAPC10, 7.9E+00, 3.1E−03; FANCL, 8.0E+00, 3.6E−02; BAZ1A, 8.0E+00, 2.2E−03; ATG7, 8.0E+00, 1.4E−02; ZBTB20, |
| | 8.0E+00, 1.1E−02; NHS, 8.0E+00, 1.1E−02; RIC8B, 8.0E+00, 8.7E−03; LINC00630, 8.0E+00, 6.9E−05; CDK6, 8.0E+00, 3.3E−02; FUT8, 8.0E+00, 1.7E−02; |
| | FTO, 8.1E+00, 4.5E−02; FRMD4A, 8.1E+00, 4.4E−02; MAPK10, 8.1E+00, 8.7E−03; ATP2C1, 8.1E+00, 3.2E−02; C1GALT1, 8.1E+00, 3.3E−02; NELL2, |
| | 8.1E+00, 2.9E−02; LINC00693, 8.1E+00, 1.4E−03; HECTD4, 8.1E+00, 1.2E−02; NNT, 8.2E+00, 8.9E−05; FGF13, 8.2E+00, 8.0E−03; LIMS1, 8.2E+00, |
| | 1.6E−02; KIF21A, 8.2E+00, 3.0E−02; PDE3A, 8.2E+00, 3.5E−02; ZNF407, 8.2E+00, 9.7E−03; LSAMP, 8.2E+00, 4.2E−02; FOXN3, 8.2E+00, 8.9E−04; 4.4E+04, |
| | 8.2E+00, 2.1E−03; CHN1, 8.3E+00, 3.7E−02; PKNOX2, 8.3E+00, 1.2E−04; MAN1A1, 8.3E+00, 1.6E−04; C5orf46, 8.3E+00, 3.4E−03; CEP192, 8.3E+00, |
| | 1.9E−02; C1QTNF3-AMACR, 8.3E+00, 1.5E−03; SEMA5A, 8.3E+00, 5.2E−03; SLX4IP, 8.3E+00, 7.2E−03; KIAA1109, 8.3E+00, 2.8E−02; PHF20L1, 8.3E+00, 7.4E−04; |
| | CPNE8, 8.4E+00, 3.5E−05; DLEU1, 8.4E+00, 1.6E−02; MYO3A, 8.4E+00, 7.7E−04; UBE3D, 8.4E+00, 4.5E−02; ZNF876P, 8.4E+00, 3.5E−05; EPB41L5, |
| | 8.4E+00, 2.5E−02; LRRC16A, 8.4E+00, 4.3E−02; PDZRN3, 8.4E+00, 1.2E−02; TMEM245, 8.4E+00, 1.5E−02; RBM26, 8.4E+00, 4.1E−02; SNX9, 8.4E+00, |
| | 6.8E−03; ACBD6, 8.4E+00, 2.9E−02; ARHGEF9, 8.4E+00, 5.4E−03; LOC105377860, 8.4E+00, 5.7E−03; PIBF1, 8.4E+00, 7.7E−03; MB21D2, 8.5E+00, |
| | 1.0E−02; ERICH1, 8.5E+00, 9.6E−03; AP1S2, 8.5E+00, 4.1E−02; DMXL1, 8.5E+00, 2.9E−02; VWDE, 8.5E+00, 9.0E−03; PELI2, 8.5E+00, 1.6E−02; RBM33, 8.5E+00, |
| | 1.0E−02; ZMIZ1, 8.5E+00, 2.0E−02; KCNIP4, 8.6E+00, 3.1E−03; RICTOR, 8.6E+00, 5.9E−03; STRN3, 8.6E+00, 3.5E−02; DYRK1A, 8.6E+00, 3.7E−02; KIF16B, |
| | 8.6E+00, 8.7E−04; CADPS2, 8.6E+00, 1.6E−02; LDAH, 8.6E+00, 8.0E−03; ATF7IP2, 8.6E+00, 3.1E−03; KCNQ10T1, 8.6E+00, 3.5E−02; LIN7A, 8.6E+00, |
| | 3.5E−03; TMEM131, 8.6E+00, 3.4E−03; CHIC1, 8.6E+00, 1.3E−03; ATP8A1, 8.6E+00, 5.0E−04; PLEKHA1, 8.6E+00, 4.6E−03; PDSS2, 8.7E+00, 1.8E−02; |
| | KIAA1328, 8.7E+00, 2.8E−03; ZHX2, 8.7E+00, 5.2E−03; CDH2, 8.7E+00, 2.9E−03; NSMCE2, 8.7E+00, 2.9E−02; TDRP, 8.7E+00, 2.1E−02; BTBD9, 8.7E+00, |
| | 1.1E−02; ATRX, 8.8E+00, 3.2E−02; MICAL3, 8.8E+00, 8.5E−03; PCNX1, 8.8E+00, 2.3E−02; FGF2, 8.8E+00, 3.0E−02; FNDC3A, 8.8E+00, 2.4E−02; DCAF6, |
| | 8.8E+00, 7.2E−03; SSBP2, 8.8E+00, 3.0E−02; ARHGEF11, 8.8E+00, 4.3E−03; CADM1, 8.9E+00, 9.1E−03; GHR, 8.9E+00, 1.4E−06; TCF7L2, 8.9E+00, 3.8E−03; |
| | HS6ST3, 8.9E+00, 2.4E−03; PTPRZ1, 8.9E+00, 1.9E−02; RAPGEF5, 8.9E+00, 6.8E−03; SPIRE1, 8.9E+00, 5.3E−04; LOC107985675, 8.9E+00, 1.6E−02; |
| | LOC100288637, 8.9E+00, 4.3E−03; DGKI, 8.9E+00, 2.0E−05; BCL11A, 9.0E+00, 2.6E−02; AP3B1, 9.0E+00, 2.5E−02; TRIM44, 9.0E+00, 1.6E−03; CAPRIN2, |
| | 9.0E+00, 1.6E−03; TMEM178B, 9.0E+00, 2.3E−02; DPH6, 9.0E+00, 1.2E−02; FAM172A, 9.0E+00, 1.6E−02; GSE1, 9.0E+00, 2.9E−02; ZGRF1, 9.0E+00, 2.6E−03; |
| | LOC107987166, 9.0E+00, 1.4E−03; LCOR, 9.0E+00, 1.1E−02; CHRM3, 9.0E+00, 1.5E−03; STAG1, 9.1E+00, 2.4E−02; SIK3, 9.1E+00, 2.3E−02; RBPMS, |
| | 9.1E+00, 1.7E−02; NUTM2B-AS1, 9.1E+00, 2.3E−04; LYN, 9.1E+00, 1.6E−04; RFC3, 9.1E+00, 2.3E−02; SLC2A13, 9.1E+00, 1.4E−03; TMTC2, 9.1E+00, 2.0E−02; |
| | KCNMA1, 9.1E+00, 2.7E−03; PPARGC1A, 9.1E+00, 9.7E−03; RALGPS2, 9.1E+00, 9.0E−03; CWC27, 9.1E+00, 1.0E−02; WDR7, 9.1E+00, 7.8E−04; |
| | ARHGAP44, 9.1E+00, 8.7E−04; SBF2, 9.1E+00, 2.2E−02; BRWD3, 9.2E+00, 2.4E−02; MAN2A1, 9.2E+00, 2.2E−02; ST6GALNAC5, 9.2E+00, 1.7E−03; SYNE2, |
| | 9.2E+00, 2.2E−02; CERS6, 9.2E+00, 1.9E−02; SRGAP3, 9.2E+00, 3.9E−04; LOC105377134, 9.2E+00, 2.4E−03; SUCLG2, 9.2E+00, 3.8E−03; ERC1, 9.2E+00, |
| | 2.4E−02; MED12L, 9.2E+00, 3.2E−03; NOS1AP, 9.2E+00, 6.5E−04; FARP1, 9.2E+00, 1.9E−02; POU2F1, 9.2E+00, 2.0E−02; MIPOL1, 9.3E+00, 1.1E−02; |
| | SASH1, 9.3E+00, 1.9E−03; ATP11A, 9.3E+00, 8.5E−03; PHLPP1, 9.3E+00, 1.8E−02; 4.4E+04, 9.3E+00, 1.3E−03; UBE2W, 9.3E+00, 3.2E−03; PARK2, |
| | 9.3E+00, 2.0E−04; CDK13, 9.3E+00, 9.4E−03; ADK, 9.3E+00, 1.8E−02; COA1, 9.3E+00, 1.6E−02; GULP1, 9.3E+00, 1.8E−02; XKR6, 9.4E+00, 1.3E−02; |
| | 4.4E+04, 9.4E+00, 1.2E−02; FBX011, 9.4E+00, 9.6E−03; RUNX1T1, 9.4E+00, 7.6E−03; SCN8A, 9.4E+00, 7.7E−03; GABRB3, 9.4E+00, 1.5E−02; CLASP2, |
| | 9.4E+00, 1.4E−02; NBAS, 9.4E+00, 3.2E−03; WWC1, 9.4E+00, 1.4E−03; TANC2, 9.5E+00, 1.7E−04; COL4A2, 9.5E+00, 1.2E−03; RPS6KA2, 9.5E+00, 7.0E−03; |
| | USP34, 9.5E+00, 1.5E−02; MYO5A, 9.5E+00, 1.2E−03; KCNQ3, 9.5E+00, 1.9E−03; NINL, 9.5E+00, 4.1E−03; SLC22A3, 9.5E+00, 1.4E−05; CMIP, 9.5E+00, |
| | 1.3E−02; EXOC2, 9.5E+00, 1.2E−02; MICU3, 9.5E+00, 1.5E−05; RIMS1, 9.5E+00, 8.2E−05; HIVEP1, 9.6E+00, 8.0E−03; RERE, 9.6E+00, 5.1E−03; PALLD, |
| | 9.6E+00, 2.6E−03; LRP6, 9.6E+00, 9.2E−03; FOXJ3, 9.6E+00, 3.3E−03; DOCK4, 9.6E+00, 2.9E−03; COL4A6, 9.6E+00, 7.9E−05; RNF130, 9.6E+00, 1.1E−02; |
| | EDA, 9.6E+00, 1.5E−02; METTL15, 9.7E+00, 5.0E−03; RNF38, 9.7E+00, 1.4E−02; PIGN, 9.7E+00, 2.0E−04; PGAP1, 9.7E+00, 5.5E−03; LINC-PINT, 9.7E+00, |
| | 1.7E−04; KCNN2, 9.8E+00, 2.0E−03; GPM6A, 9.8E+00, 9.1E−07; GSK3B, 9.8E+00, 8.8E−03; BABAM2, 9.8E+00, 6.0E−04; DISP1, 9.8E+00, 4.7E−04; PDE9A, |
| | 9.8E+00, 7.5E−04; PAK3, 9.8E+00, 1.5E−03; SRGAP1, 9.8E+00, 8.4E−05; RBMS1, 9.8E+00, 9.1E−03; ASAP1, 9.8E+00, 1.6E−02; LCORL, 9.8E+00, 4.2E−03; |
| | MAP7, 9.8E+00, 1.1E−02; CUX1, 9.8E+00, 9.3E−03; NCOA2, 9.8E+00, 1.3E−02; LINC01060, 9.8E+00, 1.0E−04; CNTN4, 9.8E+00, 1.6E−03; DACH2, 9.9E+00, |
| | 2.4E−06; ADAM23, 9.9E+00, 1.1E−03; CHST9, 9.9E+00, 3.3E−03; ADAMTS3, 9.9E+00, 1.5E−06; CNOT2, 9.9E+00, 3.0E−03; TASP1, 9.9E+00, 1.9E−03; |
| | SLC16A2, 9.9E+00, 1.8E−05; UTRN, 1.0E+01, 8.1E−03; SH3RF1, 1.0E+01, 3.5E−04; TNKS, 1.0E+01, 8.8E−03; BAZ2B, 1.0E+01, 1.1E−02; TMTC1, 1.0E+01, |
| | 2.7E−03; PPP2R5E, 1.0E+01, 4.9E−03; COL4A5, 1.0E+01, 4.6E−03; GPM6B, 1.0E+01, 9.2E−03; ZNF292, 1.0E+01, 1.2E−02; STAU2, 1.0E+01, 7.5E−03; |
| | DMTF1, 1.0E+01, 3.0E−03; ERBIN, 1.0E+01, 5.4E−03; PHACTR1, 1.0E+01, 9.6E−03; AFF1, 1.0E+01, 1.1E−02; BBS9, 1.0E+01, 7.7E−03; FAM160A1, |
| | 1.0E+01, 4.8E−03; TBC1D5, 1.0E+01, 8.4E−03; TBC1D32, 1.0E+01, 3.8E−04; LOC105378031, 1.0E+01, 6.0E−04; GPC6, 1.0E+01, 1.7E−02; VIPR2, 1.0E+01, |
| | 3.7E−06; PTPRN2, 1.0E+01, 5.6E−03; CAMK1D, 1.0E+01, 1.6E−03; PTPN14, 1.0E+01, 4.1E−03; ASCC3, 1.0E+01, 7.7E−03; LOC101928096, 1.0E+01, 5.6E−05; |
| | PATJ, 1.0E+01, 6.8E−03; CSRNP3, 1.0E+01, 3.0E−04; FARS2, 1.0E+01, 1.9E−03; KCTD1, 1.0E+01, 8.6E−06; SSH2, 1.0E+01, 1.2E−03; PIAS2, 1.0E+01, |
| | 2.1E−03; SPATA6, 1.0E+01, 5.1E−05; ATAD2B, 1.0E+01, 6.8E−04; LOC102724001, 1.0E+01, 1.5E−04; DST, 1.0E+01, 9.1E−04; FAM13A, 1.0E+01, 9.8E−04; |
| | FAM169A, 1.0E+01, 9.0E−04; SCLT1, 1.0E+01, 1.0E−03; MBOAT2, 1.0E+01, 1.4E−04; AFF2, 1.0E+01, 1.3E−04; SDK2, 1.0E+01, 7.5E−04; BCKDHB, 1.0E+01, |
| | 7.5E−03; IMMP1L, 1.0E+01, 9.0E−05; PTCHD1-AS, 1.0E+01, 7.0E−04; UBAC2, 1.0E+01, 1.5E−03; TEAD1, 1.0E+01, 6.8E−03; KIAA1217, 1.0E+01, 2.8E−03; |
| | UBE3C, 1.0E+01, 2.1E−03; ONECUT1, 1.1E+01, 1.9E−13; LHFPL3, 1.1E+01, 7.9E−08; HIBCH, 1.1E+01, 7.0E−04; NIN, 1.1E+01, 1.0E−04; NEBL, 1.1E+01, |
| | 4.0E−04; ADAMTS6, 1.1E+01, 3.9E−06; PTK2, 1.1E+01, 3.1E−03; CUX2, 1.1E+01, 2.5E−03; SNTG2, 1.1E+01, 1.3E−03; VAV3, 1.1E+01, 3.1E−05; GAB1, |
| | 1.1E+01, 7.6E−05; SLMAP, 1.1E+01, 7.8E−04; MTHFD1L, 1.1E+01, 1.3E−03; CEP170, 1.1E+01, 1.2E−03; SIPA1L1, 1.1E+01, 5.9E−03; SLC24A3, 1.1E+01, |
| | 6.3E−05; ATP9B, 1.1E+01, 4.4E−04; SRPK2, 1.1E+01, 4.6E−03; CRIM1, 1.1E+01, 4.9E−04; JMJD1C, 1.1E+01, 1.5E−04; FSD1L, 1.1E+01, 1.2E−06; WDR70, |
| | 1.1E+01, 6.3E−04; ARHGEF10, 1.1E+01, 3.8E−03; TRMT11, 1.1E+01, 7.5E−04; CDC42BPA, 1.1E+01, 3.0E−03; ROR2, 1.1E+01, 6.0E−05; KALRN, 1.1E+01, |
| | 5.0E−05; STOX2, 1.1E+01, 3.9E−04; MYCBP2, 1.1E+01, 1.7E−03; MTCL1, 1.1E+01, 3.5E−04; ADAMTS12, 1.1E+01, 4.2E−04; STXBP5, 1.1E+01, 8.5E−05; |
| | ST6GAL2, 1.1E+01, 2.5E−05; WDFY2, 1.1E+01, 1.2E−03; PKD2, 1.1E+01, 3.1E−04; LOC107985962, 1.1E+01, 3.5E−05; KLF8, 1.1E+01, 1.5E−03; TSPAN5, |
| | 1.1E+01, 1.0E−04; TULP4, 1.1E+01, 1.8E−03; BARD1, 1.1E+01, 9.4E−05; PLEKHA5, 1.1E+01, 1.3E−04; RNGTT, 1.1E+01, 8.4E−04; KIF13A, 1.1E+01, |
| | 1.6E−03; ZRANB3, 1.1E+01, 8.6E−04; FOCAD, 1.1E+01, 2.0E−03; FBXL17, 1.1E+01, 2.4E−04; RALGAPA2, 1.1E+01, 2.4E−04; AHCYL2, 1.1E+01, 1.2E−03; TTC17, |
| | 1.1E+01, 1.8E−03; SATB2, 1.1E+01, 2.8E−07; PCNX2, 1.1E+01, 2.2E−03; CDYL, 1.1E+01, 1.9E−03; PRICKLE2, 1.1E+01, 9.6E−05; LOC102467213, 1.1E+01, |
| | 4.4E−04; ZC4H2, 1.1E+01, 1.7E−04; AKT3, 1.1E+01, 9.5E−04; CDH6, 1.1E+01, 4.1E−06; MBNL1, 1.1E+01, 2.7E−05; KCTD8, 1.1E+01, 6.5E−05; FRYL, |
| | 1.1E+01, 6.8E−04; CADM2, 1.1E+01, 4.8E−05; MEF2A, 1.2E+01, 6.8E−04; CDC73, 1.2E+01, 1.9E−04; ZFAND3, 1.2E+01, 1.3E−03; KIAA1958, 1.2E+01, |
| | 1.4E−03; PLPP3, 1.2E+01, 8.3E−04; HDAC9, 1.2E+01, 4.6E−05; FAM135A, 1.2E+01, 2.9E−04; DNAH14, 1.2E+01, 2.4E−04; FNDC3B, 1.2E+01, 1.5E−03; GNAQ, |
| | 1.2E+01, 1.3E−03; NAALADL2, 1.2E+01, 7.8E−06; JAKMIP2, 1.2E+01, 4.2E−04; MAML3, 1.2E+01, 1.2E−04; PLCH1, 1.2E+01, 7.4E−04; HIVEP2, 1.2E+01, |
| | 1.9E−06; TMEM131L, 1.2E+01, 1.1E−04; GREB1L, 1.2E+01, 7.9E−05; PARD3B, 1.2E+01, 3.7E−04; DDX10, 1.2E+01, 2.3E−04; MID1, 1.2E+01, 6.9E−04; |
| | SND1, 1.2E+01, 8.5E−04; CCNY, 1.2E+01, 3.9E−04; PVT1, 1.2E+01, 1.3E−03; SUGCT, 1.2E+01, 1.3E−06; FMNL2, 1.2E+01, 1.5E−03; ATXN1, 1.2E+01, 2.6E−04; |
| | NEGR1, 1.2E+01, 5.5E−06; RAP1GDS1, 1.2E+01, 4.4E−05; NECTIN3, 1.2E+01, 4.3E−04; PRIM2, 1.2E+01, 6.9E−04; LINC01572, 1.2E+01, 7.6E−04; |
| | PCSK5, 1.2E+01, 1.9E−05; CBLB, 1.2E+01, 9.0E−05; MLLT10, 1.2E+01, 7.3E−04; CSMD2, 1.2E+01, 8.0E−04; PPP2R3A, 1.2E+01, 9.1E−05; ZNF423, 1.2E+01, |
| | 6.9E−04; MCTP1, 1.2E+01, 1.2E−06; NTM, 1.2E+01, 1.4E−03; FBXW11, 1.2E+01, 5.8E−04; TRABD2B, 1.2E+01, 3.9E−06; LTBP1, 1.2E+01, 1.2E−04; |
| | LOC107986215, 1.2E+01, 8.5E−07; RAPGEF2, 1.2E+01, 3.9E−04; LRRFIP2, 1.2E+01, 7.2E−07; FOXO1, 1.2E+01, 6.0E−04; STK3, 1.2E+01, 2.0E−04; JAZF1, |
| | 1.2E+01, 5.5E−04; RSRC1, 1.2E+01, 1.1E−04; PAM, 1.2E+01, 3.3E−05; NAV3, 1.2E+01, 8.7E−07; MAGI3, 1.2E+01, 4.7E−05; SYT14, 1.2E+01, 3.2E−04; COP1, |
| | 1.2E+01, 2.3E−04; GRHL2, 1.2E+01, 2.9E−04; GLS, 1.2E+01, 9.0E−05; EPHA7, 1.2E+01, 3.2E−07; DPP10, 1.2E+01, 5.2E−04; KANSL1, 1.2E+01, 1.6E−04; |
| | NR3C2, 1.2E+01, 5.7E−08; NEDD4L, 1.2E+01, 4.9E−04; KMT2C, 1.2E+01, 4.4E−04; PRDM5, 1.2E+01, 1.7E−05; ARID2, 1.2E+01, 3.3E−04; TOX3, 1.2E+01, |
| | 7.4E−05; CAMK2D, 1.2E+01, 4.0E−08; ZNF804B, 1.2E+01, 4.9E−10; UBE2E1, 1.3E+01, 1.5E−04; MAP4K3, 1.3E+01, 3.1E−04; TUSC3, 1.3E+01, 1.7E−04; |
| | STK39, 1.3E+01, 8.3E−06; AGPAT4, 1.3E+01, 4.5E−05; PSPC1, 1.3E+01, 1.7E−04; RFX7, 1.3E+01, 3.1E−04; PKN2, 1.3E+01, 1.0E−04; NR5A2, 1.3E+01, |
| | 1.5E−10; CNTN1, 1.3E+01, 5.8E−05; MNAT1, 1.3E+01, 1.0E−04; PUM2, 1.3E+01, 2.0E−04; PRKD1, 1.3E+01, 5.4E−06; MCF2L, 1.3E+01, 9.9E−08; DOCK3, |
| | 1.3E+01, 3.3E−04; MAPK8, 1.3E+01, 1.1E−04; TBL1XR1, 1.3E+01, 9.7E−05; DOK6, 1.3E+01, 8.0E−12; TBC1D22A, 1.3E+01, 4.4E−05; AKAP13, 1.3E+01, |
| | 1.4E−04; C15orf41, 1.3E+01, 7.5E−07; FIGN, 1.3E+01, 9.1E−05; P3H2, 1.3E+01, 3.7E−08; ELP4, 1.3E+01, 4.3E−05; PPP3CA, 1.3E+01, 3.3E−05; |
| | LOC100420587, 1.3E+01, 1.8E−04; RNF220, 1.3E+01, 1.8E−04; KCNT2, 1.3E+01, 1.6E−04; USP25, 1.3E+01, 4.3E−05; TIAM1, 1.3E+01, 1.2E−04; AUH, |
| | 1.3E+01, 1.8E−05; BMPR1A, 1.3E+01, 1.3E−04; PBX3, 1.3E+01, 6.7E−05; LOC285500, 1.3E+01, 2.5E−07; DOCK1, 1.3E+01, 8.8E−05; LINC01515, 1.3E+01, |
| | 4.9E−06; PBX1, 1.3E+01, 1.1E−10; LOC100288798, 1.3E+01, 1.3E−06; PLCB4, 1.3E+01, 4.5E−05; LRRTM4, 1.4E+01, 7.9E−05; TNS3, 1.4E+01, 3.6E−06; |
| | FER, 1.4E+01, 8.0E−06; RAB28, 1.4E+01, 3.3E−06; CHD7, 1.4E+01, 5.8E−05; ASTN2, 1.4E+01, 6.8E−05; IGF2BP2, 1.4E+01, 7.3E−05; LOC107985710, |
| | 1.4E+01, 3.3E−05; CRADD, 1.4E+01, 4.1E−08; COMMD10, 1.4E+01, 6.8E−05; OSBPL10, 1.4E+01, 4.7E−05; ELMO1, 1.4E+01, 2.5E−07; THRB, 1.4E+01, |
| | 2.1E−06; ASIC2, 1.4E+01, 2.9E−06; ITPR2, 1.4E+01, 8.5E−07; CTNND2, 1.4E+01, 4.3E−05; SYT6, 1.4E+01, 4.7E−05; ATRNL1, 1.4E+01, 1.3E−06; ZSWIM6, |
| | 1.4E+01, 4.5E−06; PCDH11X, 1.4E+01, 3.7E−05; KCNG3, 1.4E+01, 5.6E−05; PITPNC1, 1.4E+01, 9.0E−06; ADGRB3, 1.4E+01, 6.2E−07; IL1RAPL1, 1.4E+01, |
| | 1.1E−08; LINC01021, 1.4E+01, 6.9E−07; PAN3, 1.4E+01, 1.9E−05; VTI1A, 1.4E+01, 1.3E−05; EDIL3, 1.4E+01, 1.1E−05; AGAP1, 1.4E+01, 1.6E−05; |
| | SLC24A2, 1.4E+01, 5.4E−06; EXOC6B, 1.4E+01, 2.5E−05; ATXN7L1, 1.4E+01, 1.2E−05; RALYL, 1.4E+01, 9.0E−07; ST6GAL1, 1.4E+01, 3.7E−05; THSD7A, |
| | 1.4E+01, 1.2E−06; LOC105377561, 1.4E+01, 1.8E−14; LUZP2, 1.4E+01, 1.3E−04; B3GALT1, 1.4E+01, 2.0E−09; UNC5C, 1.4E+01, 1.7E−09; PPP1R9A, |
| | 1.5E+01, 1.5E−05; MBD5, 1.5E+01, 1.5E−05; NLGN4Y, 1.5E+01, 1.1E−05; CHD9, 1.5E+01, 1.0E−05; MSI2, 1.5E+01, 5.3E−06; ZNF516, 1.5E+01, 3.6E−09; |
| | SSBP3, 1.5E+01, 8.6E−06; MRTFB, 1.5E+01, 1.5E−06; ULK4, 1.5E+01, 1.9E−06; ALCAM, 1.5E+01, 1.1E−05; MGAT5, 1.5E+01, 1.6E−05; MAP2, 1.5E+01, |
| | 2.1E−06; GTDC1, 1.5E+01, 2.1E−07; FTX, 1.5E+01, 2.0E−08; LRBA, 1.5E+01, 5.3E−06; TMEM135, 1.5E+01, 1.4E−06; PARP8, 1.5E+01, 4.4E−07; GMDS, |
| | 1.5E+01, 7.6E−06; SHROOM3, 1.5E+01, 7.2E−07; FRMD5, 1.5E+01, 1.0E−05; TOX, 1.5E+01, 2.4E−06; NCOA1, 1.5E+01, 5.7E−07; SPATA5, 1.5E+01, 9.5E−06; |
| | LOC107985037, 1.5E+01, 4.7E−08; LOC107986777, 1.5E+01, 2.4E−05; TCF12, 1.5E+01, 4.0E−06; PTPRK, 1.5E+01, 8.6E−06; TMCC1, 1.5E+01, |
| | 1.9E−06; CDH4, 1.5E+01, 1.0E−05; NKAIN3, 1.5E+01, 2.0E−08; PPM1L, 1.5E+01, 6.7E−07; PCCA, 1.5E+01, 5.0E−06; LINC01162, 1.5E+01, 1.4E−06; ZNF827, |
| | 1.5E+01, 7.3E−07; CHST11, 1.5E+01, 8.0E−07; COG5, 1.5E+01, 5.7E−07; IGF1R, 1.5E+01, 5.2E−07; DIP2C, 1.5E+01, 1.3E−06; STK33, 1.5E+01, 2.7E−06; |
| | RAD51B, 1.5E+01, 3.1E−06; TLE4, 1.5E+01, 2.8E−07; SFMBT2, 1.5E+01, 9.5E−09; UTY, 1.6E+01, 1.6E−06; TBL1X, 1.6E+01, 7.4E−07; ST6GALNAC3, |
| | 1.6E+01, 1.7E−06; CDKAL1, 1.6E+01, 1.0E−06; PTPN4, 1.6E+01, 1.4E−06; PTBP2, 1.6E+01, 8.5E−07; ITFG1, 1.6E+01, 1.0E−07; BNC2, 1.6E+01, 1.1E−08; |
| | GALNT17, 1.6E+01, 1.0E−07; NTRK3, 1.6E+01, 3.9E−11; TNIK, 1.6E+01, 2.0E−08; CEP128, 1.6E+01, 8.4E−08; PTPRG, 1.6E+01, 3.6E−13; TMEM108, |
| | 1.6E+01, 3.6E−08; CCDC91, 1.6E+01, 5.3E−08; FGD4, 1.6E+01, 1.8E−08; KDM4C, 1.6E+01, 1.4E−07; FGF12, 1.6E+01, 1.1E−08; TCF4, 1.6E+01, 1.1E−07; |
| | LRIG1, 1.6E+01, 4.6E−08; SEMA6A, 1.6E+01, 3.2E−09; TMEM132B, 1.6E+01, 1.0E−06; PARD3, 1.6E+01, 2.7E−08; ADCY2, 1.6E+01, 8.5E−07; TMEM132D, |
| | 1.6E+01, 6.2E−07; SHISA9, 1.6E+01, 2.4E−07; EXOC4, 1.6E+01, 6.3E−08; ADGRL3, 1.6E+01, 8.7E−09; SDK1, 1.6E+01, 2.1E−07; GALNT7, 1.7E+01, 3.7E−07; |
| | NRXN1, 1.7E+01, 2.7E−09; CTTNBP2, 1.7E+01, 7.6E−08; TRAPPC9, 1.7E+01, 2.9E−09; TBCK, 1.7E+01, 4.1E−09; MAML2, 1.7E+01, 9.1E−08; |
| | LOC101928570, 1.7E+01, 3.2E−10; DPP6, 1.7E+01, 2.2E−08; LOC729732, 1.7E+01, 1.1E−07; BCAS3, 1.7E+01, 2.8E−08; CACNB2, 1.7E+01, 1.9E−08; |
| | ARHGAP42, 1.7E+01, 9.0E−08; BICD1, 1.7E+01, 2.4E−09; WDPCP, 1.7E+01, 7.2E−08; ARHGAP32, 1.7E+01, 4.4E−08; GPHN, 1.7E+01, 7.8E−08; LDLRAD3, |
| | 1.7E+01, 4.6E−08; FRAS1, 1.7E+01, 1.2E−10; FAF1, 1.7E+01, 4.8E−08; PLPP1, 1.7E+01, 1.3E−07; RASAL2, 1.7E+01, 3.6E−08; CACNA2D3, 1.7E+01, |
| | 1.4E−07; ANK2, 1.7E+01, 4.4E−15; TENM2, 1.7E+01, 5.8E−16; SYNDIG1, 1.7E+01, 2.7E−09; VPS13B, 1.8E+01, 4.7E−08; TRPC4, 1.8E+01, 7.8E−10; PSD3, |
| | 1.8E+01, 2.3E−08; ELAVL2, 1.8E+01, 1.2E−13; VWA8, 1.8E+01, 2.3E−10; LGR4, 1.8E+01, 2.2E−08; ARID1B, 1.8E+01, 3.7E−11; SLC35F1, 1.8E+01, 5.8E−10; |
| | GRIN2A, 1.8E+01, 1.3E−12; HS2ST1, 1.8E+01, 1.2E−08; LOC105377862, 1.8E+01, 9.5E−10; EXT1, 1.8E+01, 7.1E−09; CDH9, 1.8E+01, 1.8E−10; ANK3, |
| | 1.8E+01, 1.5E−08; LPP, 1.8E+01, 1.1E−08; DLG2, 1.8E+01, 2.7E−08; ANKRD18CP, 1.8E+01, 9.7E−12; MGAT4C, 1.8E+01, 1.5E−07; ROBO2, 1.8E+01, 2.2E−08; |
| | CAMKMT, 1.8E+01, 5.6E−09; PTPRD, 1.8E+01, 9.2E−09; RIMS2, 1.9E+01, 2.3E−15; SORBS2, 1.9E+01, 4.9E−10; NHSL1, 1.9E+01, 4.6E−09; ERC2, |
| | 1.9E+01, 3.3E−09; RMST, 1.9E+01, 1.3E−09; CHODL, 1.9E+01, 1.1E−09; PLXDC2, 1.9E+01, 3.9E−10; NLGN4X, 1.9E+01, 7.1E−10; FBN2, 1.9E+01, 2.4E−11; |
| | LOC728755, 1.9E+01, 3.5E−09; BBX, 1.9E+01, 2.0E−09; RORA, 1.9E+01, 5.9E−10; SUPT3H, 1.9E+01, 2.9E−10; PLD5, 1.9E+01, 2.3E−11; LARGE, 2.0E+01, |
| | 1.7E−11; MAGI1, 2.0E+01, 1.3E−14; PLCB1, 2.0E+01, 2.4E−10; FOXP1, 2.0E+01, 6.5E−11; TRPS1, 2.0E+01, 9.6E−11; DLGAP1, 2.0E+01, 1.2E−16; MED13L, |
| | 2.0E+01, 5.2E−10; IMMP2L, 2.0E+01, 5.5E−11; LOC102724623, 2.0E+01, 3.0E−14; LOC107986324, 2.0E+01, 4.7E−19; ROBO1, 2.0E+01, 2.2E−10; TENM1, |
| | 2.0E+01, 2.5E−15; GLI3, 2.0E+01, 1.6E−13; LOC644919, 2.0E+01, 1.3E−10; TRIO, 2.1E+01, 6.0E−11; NRXN3, 2.1E+01, 1.9E−10; MACROD2, 2.1E+01, |
| | 1.5E−13; NFIB, 2.1E+01, 3.0E−13; CACNA2D1, 2.1E+01, 5.9E−12; GALNT13, 2.1E+01, 8.6E−13; GRB10, 2.1E+01, 1.9E−12; LINGO2, 2.1E+01, 5.5E−11; UST, |
| | 2.1E+01, 1.3E−11; WWOX, 2.1E+01, 2.5E−13; ARL15, 2.1E+01, 3.8E−12; LDB2, 2.1E+01, 8.4E−12; LINC01098, 2.1E+01, 4.0E−10; XKR4, 2.2E+01, |
| | 1.1E−13; ZNF521, 2.2E+01, 4.2E−14; ADAMTS19, 2.2E+01, 9.6E−13; PRKG1, 2.3E+01, 7.4E−13; CASC15, 2.3E+01, 4.1E−19; SLC1A3, 2.3E+01, 2.2E−16; |
| | FAM155A, 2.3E+01, 2.1E−19; RBFOX1, 2.3E+01, 6.7E−15; TENM3, 2.3E+01, 1.1E−17; TRPM3, 2.3E+01, 6.4E−14; SPIDR, 2.3E+01, 4.1E−14; ROR1, |
| | 2.3E+01, 2.1E−25; KAZN, 2.4E+01, 1.6E−15; PCDH7, 2.4E+01, 3.0E−15; FHIT, 2.4E+01, 8.8E−15; SMYD3, 2.4E+01, 4.6E−15; NBEA, 2.4E+01, 3.6E−16; |
| | GRID2, 2.5E+01, 2.3E−93; RFX3, 2.5E+01, 3.8E−16; RYR2, 2.5E+01, 1.8E−14; SYT1, 2.5E+01, 2.0E−15; ZC3H12B, 2.5E+01, 2.1E−14; HS3ST4, 2.5E+01, |
| | 3.5E−15; LOC107986770, 2.5E+01, 6.1E−15; UBE2E2, 2.5E+01, 5.0E−17; MIR924HG, 2.5E+01, 1.9E−14; TENM4, 2.5E+01, 1.0E−15; LOC101929378, |
| | 2.5E+01, 3.6E−16; SLC25A21, 2.5E+01, 3.9E−16; ADGRV1, 2.5E+01, 1.3E−23; CDK14, 2.6E+01, 1.0E−17; FBXL7, 2.6E+01, 4.4E−19; KLF12, 2.6E+01, 9.9E−18; |
| | GRIP1, 2.6E+01, 5.6E−21; FAT3, 2.6E+01, 2.0E−17; NLGN1, 2.7E+01, 1.9E−18; LOC339862, 2.8E+01, 8.2E−20; KHDRBS2, 2.8E+01, 4.7E−20; MCC, |
| | 2.9E+01, 5.0E−21; SOX5, 2.9E+01, 9.4E−21; NFIA, 3.0E+01, 6.9E−28; NPAS3, 3.1E+01, 7.5E−26; EGFEM1P, 3.1E+01, 1.1E−23; PRKCA, 3.2E+01, 1.4E−24; |
| | SNTG1, 3.3E+01, 2.7E−26; MAGI2, 3.4E+01, 4.8E−32; CTNNA3, 3.8E+01, 1.3E−33; NRG3, 3.9E+01, 8.9E−51; MECOM, 3.9E+01, 2.1E−37 |
| 7-0 | CDH6, −1.3E+01, 4.2E−10; PRTG, −1.2E+01, 8.5E−13; CTNNA2, −9.1E+00, 8.1E−09; GREB1L, −8.9E+00, 3.1E−08; RMST, −8.1E+00, 3.5E−07; DACH1, |
| | −7.5E+00, 1.8E−06; MAPK10, −7.4E+00, 2.7E−06; NRG3, −6.2E+00, 1.9E−04; SOX5, −5.7E+00, 6.3E−03; UNC5C, −5.6E+00, 1.0E−02; TRPM3, −5.6E+00, |
| | 1.7E−03; SEMA6A, −5.5E+00, 2.5E−04; ZNF423, −5.5E+00, 7.2E−04; ADGRL3, −5.4E+00, 7.7E−04; MAP2, −5.2E+00, 3.5E−03; CASC15, −5.2E+00, 2.4E−03; NR6A1, |
| | −5.1E+00, 1.7E−03; ZNF521, −5.0E+00, 2.5E−03; LRRC4C, −5.0E+00, 2.7E−02; PRKG1, −4.8E+00, 3.2E−02; PLEKHA5, −4.7E+00, 6.8E−03; NLGN1, −4.6E+00, |
| | 3.9E−02; PBX1, −4.6E+00, 1.4E−03; PLEKHG4B, −4.4E+00, 4.3E−03; ZFHX4, −4.4E+00, 3.1E−03; TMTC2, −4.1E+00, 4.2E−02; SDK2, −4.1E+00, 2.8E−02; |
| | NRXN1, −4.0E+00, 4.5E−02; EPHA7, −4.0E+00, 9.7E−03; LRP2, −4.0E+00, 1.0E−03; TRIM71, −3.9E+00, 2.9E−02; CRABP1, −3.9E+00, 3.5E−03; PSD3, |
| | −3.8E+00, 4.2E−02; FHOD3, −3.4E+00, 3.3E−02; COL4A6, −3.3E+00, 3.2E−02; FGFBP3, −3.0E+00, 1.7E−02; GRID2, −2.8E+00, 2.0E−04; TMEM132C, −2.6E+00, |
| | 3.0E−02; CCDC160, −2.5E+00, 1.7E−04; SLC16A10, −2.4E+00, 4.5E−02; RIPOR2, −2.2E+00, 2.7E−02; SLC16A2, −2.2E+00, 4.4E−02; MAL2, −2.1E+00, 9.1E−03; |
| | BSX, 1.5E−01, 8.3E−07; COL18A1-AS2, 1.5E−01, 8.3E−07; CTAGE11P, 1.5E−01, 8.3E−07; LOC101928563, 1.5E−01, 8.3E−07; OR5H6, 1.5E−01, 8.3E−07; |
| | FAM90A1, 1.7E−01, 2.0E−03; LOC105374193, 1.8E−01, 3.3E−02; MIR4668, 1.8E−01, 3.3E−02; FOXF2, 1.8E−01, 1.0E−02; LOC105373386, 1.8E−01, |
| | 1.0E−02; LOC105376236, 1.8E−01, 1.0E−02; LOC105378149, 1.8E−01, 1.0E−02; LOC107984772, 1.8E−01, 1.0E−02; LOC107985700, 1.8E−01, 1.0E−02; |
| | LOC107986113, 1.8E−01, 1.0E−02; L3MBTL4-AS1, 1.8E−01, 8.1E−06; LOC102724104, 1.8E−01, 8.1E−06; LOC105371106, 1.8E−01, 8.1E−06; |
| | LOC105372460, 1.8E−01, 8.1E−06; LOC105377022, 1.8E−01, 8.1E−06; MIR130B, 1.8E−01, 8.1E−06; LOC105376603, 2.2E−01, 7.6E−03; LOC107987291, |
| | 2.3E−01, 3.1E−03; LOC105374249, 2.3E−01, 4.7E−03; LOC105371060, 2.4E−01, 4.4E−03; LINC02872, 2.4E−01, 1.8E−03; PFN1P2, 2.4E−01, 2.2E−02; |
| | ERAP2, 2.4E−01, 3.7E−03; GP6, 2.5E−01, 2.4E−04; PPP4R1-AS1, 2.5E−01, 6.6E−04; COX7B2, 2.5E−01, 9.0E−03; LOC101928373, 2.5E−01, 8.4E−04; WDFY4, |
| | 2.5E−01, 1.2E−02; LOC107985352, 2.6E−01, 3.1E−08; LOC107986635, 2.6E−01, 3.1E−08; WT1, 2.6E−01, 3.1E−08; LOC101927801, 2.6E−01, 7.1E−04; |
| | LOC105373372, 2.6E−01, 5.7E−03; LOC107985156, 2.7E−01, 1.0E−02; LINC00692, 2.7E−01, 4.4E−03; CXCL2, 2.7E−01, 2.0E−03; LOC105377367, 2.7E−01, |
| | 2.2E−03; LOC107985950, 2.7E−01, 3.8E−02; CDKN2D, 2.7E−01, 2.4E−02; LOC107986764, 2.8E−01, 2.2E−02; TCAF2, 2.8E−01, 8.3E−03; LOC105371301, |
| | 2.8E−01, 1.7E−03; LOC105371775, 2.8E−01, 1.7E−03; LOC105373863, 2.8E−01, 1.7E−03; MIR548K, 2.8E−01, 1.7E−03; LOC101929450, 2.9E−01, 6.4E−04; |
| | APOD, 3.0E−01, 1.2E−07; KLHL6, 3.0E−01, 1.2E−07; LOC105373186, 3.0E−01, 1.2E−07; LOC105378286, 3.0E−01, 1.2E−07; LOC107986555, 3.0E−01, |
| | 1.2E−07; CCL20, 3.0E−01, 4.1E−02; LOC105373514, 3.1E−01, 4.5E−05; LOC105376072, 3.3E−01, 3.7E−04; LOC101060254, 3.3E−01, 2.1E−02; LOC105371654, |
| | 3.4E−01, 4.1E−03; LOC105373287, 3.4E−01, 4.2E−03; LOC107986077, 3.5E−01, 5.8E−04; LOC105370563, 3.5E−01, 2.0E−02; JSRP1, 3.6E−01, 4.4E−02; |
| | LOC105374596, 3.7E−01, 2.5E−03; LOC105376871, 3.7E−01, 5.0E−03; LOC105377271, 3.7E−01, 1.5E−07; TMCO5B, 3.8E−01, 6.3E−05; LINC02209, 4.1E−01, |
| | 3.3E−03; ARHGD1B, 4.1E−01, 2.4E−02; HMGB4, 4.3E−01, 4.9E−06; OVCH1- S1, 4.3E−01, 1.4E−02; LOC401312, 4.3E−01, 2.6E−02; LOC105377165, 4.3E−01, |
| | 5.6E−03; LRRC32, 4.4E−01, 3.5E−02; PADI1, 4.4E−01, 1.3E−02; LOC407835, 4.6E−01, 8.6E−03; SP100, 5.1E−01, 4.4E−02; LINC00159, 5.1E−01, 2.5E−02; |
| | LOC101929426, 5.4E−01, 7.6E−03; CRYBB2, 5.6E−01, 1.8E−02; ZC2HC1C, 5.8E−01, 2.4E−02; HOXB7, 5.9E−01, 1.7E−02; LOC100506844, 6.5E−01, 1.1E−02; |
| | LOC107986108, 6.6E−01, 8.0E−03; MYOZ2, 6.7E−01, 2.8E−02; LOC100506731, 6.7E−01, 1.3E−03; SNHG9, 7.2E−01, 8.5E−03; LOC107983956, 7.5E−01, |
| | 6.6E−03; LOC101927283, 7.9E−01, 4.8E−03; CFH, 8.1E−01, 4.8E−05; LOC102724210, 8.4E−01, 4.8E−02; SPATA16, 8.5E−01, 1.6E−02; CXCL1, 8.6E−01, |
| | 1.6E−03; LOC100506178, 8.7E−01, 6.9E−03; DCN, 8.9E−01, 8.3E−03; PXDC1, 9.1E−01, 1.8E−03; LOC107986566, 9.2E−01, 1.8E−02; SRPX2, 9.4E−01, 1.3E−04; |
| | GLRA3, 9.4E−01, 1.4E−05; TMEM88, 9.6E−01, 4.9E−02; HOPX, 9.6E−01, 1.6E−08; H19, 9.8E−01, 1.5E−02; TBXT, 1.0E+00, 3.1E−08; DUSP5, 1.0E+00, 3.0E−02; |
| | SFTA1P, 1.0E+00, 1.5E−03; NNMT, 1.0E+00, 2.8E−03; LOC105373997, 1.0E+00, 4.3E−06; WFDC3, 1.0E+00, 5.3E−03; PPP1R3C, 1.1E+00, 5.5E−04; |
| | BMP1, 1.1E+00, 1.7E−02; RUNX1, 1.1E+00, 1.3E−02; NSG1, 1.1E+00, 4.4E−02; C1orf50, 1.2E+00, 1.3E−02; CDKN2B, 1.2E+00, 4.3E−05; BOP1, 1.2E+00, |
| | 8.8E−03; LINC01592, 1.2E+00, 2.4E−02; HAUS7, 1.2E+00, 2.5E−02; MIR503HG, 1.2E+00, 5.0E−05; TNNI1, 1.2E+00, 1.8E−03; PELO, 1.3E+00, 4.6E−02; |
| | NPAS2, 1.3E+00, 4.5E−03; SPX, 1.3E+00, 6.3E−03; ENPEP, 1.3E+00, 2.1E−02; CA3, 1.3E+00, 7.7E−08; RBM24, 1.3E+00, 2.1E−07; EHD2, 1.3E+00, 3.8E−02; |
| | ONECUT2, 1.3E+00, 2.2E−02; BHLHE40, 1.4E+00, 5.6E−03; LOC101927815, 1.4E+00, 1.4E−02; NPPB, 1.4E+00, 5.0E−03; PHLDA2, 1.4E+00, 1.4E−06; |
| | LINC00540, 1.4E+00, 1.5E−02; STAMBPL1, 1.4E+00, 1.5E−02; TLNRD1, 1.4E+00, 5.6E−04; LZTS1, 1.4E+00, 3.3E−02; AKTIP, 1.5E+00, 5.8E−03; TGM2, |
| | 1.5E+00, 2.6E−06; GAS6, 1.5E+00, 2.4E−02; RFK, 1.5E+00, 2.0E−02; NDUFAF3, 1.5E+00, 6.3E−03; PIAS3, 1.5E+00, 3.1E−02; CXCL6, 1.5E+00, 4.6E−07; |
| | LINC00458, 1.5E+00, 1.4E−02; LOC105747689, 1.5E+00, 2.0E−06; DAAM2, 1.6E+00, 2.4E−02; HBEGF, 1.6E+00, 8.0E−04; TM4SF1, 1.6E+00, 5.5E−04; |
| | CMTM3, 1.6E+00, 9.6E−03; JPH2, 1.6E+00, 3.3E−02; MICAL2, 1.6E+00, 2.4E−02; ZNF778, 1.6E+00, 4.2E−02; ATP7B, 1.6E+00, 2.0E−02; ITPRIPL2, |
| | 1.6E+00, 5.5E−04; RNH1, 1.6E+00, 2.4E−02; YPEL2, 1.6E+00, 2.2E−02; SYNM, 1.6E+00, 2.0E−03; GADD45B, 1.7E+00, 5.1E−06; MYRIP, 1.7E+00, 4.2E−02; |
| | MATN3, 1.7E+00, 8.1E−07; LOC101929710, 1.8E+00, 3.3E−02; DYNLT3, 1.8E+00, 2.7E−03; ARHGEF17, 1.8E+00, 4.5E−02; PLXND1, 1.8E+00, 3.2E−02; |
| | NDUFAF8, 1.8E+00, 2.4E−02; TXN2, 1.8E+00, 4.5E−02; EPSTI1, 1.8E+00, 3.4E−04; TGFBI, 1.8E+00, 5.7E−04; GYG1, 1.8E+00, 6.3E−03; EOGT, 1.8E+00, |
| | 1.9E−04; ZBTB2, 1.8E+00, 1.8E−02; CAV2, 1.8E+00, 1.1E−08; KCNH1, 1.9E+00, 5.6E−03; SGK1, 1.9E+00, 7.3E−03; ALAS1, 1.9E+00, 1.3E−02; ASAP3, |
| | 1.9E+00, 4.4E−02; RFTN1, 1.9E+00, 1.8E−03; ELOVL2, 1.9E+00, 7.3E−03; LPL, 1.9E+00, 2.8E−04; ARL2BP, 1.9E+00, 8.8E−03; LOC105377378, 2.0E+00, |
| | 2.3E−06; ODF2, 2.0E+00, 2.7E−02; DAB2, 2.0E+00, 3.8E−02; SERTAD4, 2.0E+00, 2.0E−06; LOC100996643, 2.0E+00, 5.4E−04; LGALS1, 2.0E+00, 2.5E−03; |
| | ZHX3, 2.0E+00, 2.3E−02; RGS3, 2.0E+00, 3.3E−03; CCDC80, 2.0E+00, 2.6E−02; NDUFS2, 2.0E+00, 4.8E−02; NDEL1, 2.0E+00, 1.7E−02; LOC105374007, |
| | 2.0E+00, 9.0E−09; FRG1CP, 2.0E+00, 2.7E−04; POLR2C, 2.0E+00, 4.4E−02; GRHPR, 2.0E+00, 3.6E−02; SLC25A43, 2.0E+00, 4.5E−04; FAM114A1, 2.1E+00, |
| | 1.0E−02; SETD7, 2.1E+00, 1.5E−02; MGLL, 2.1E+00, 1.5E−10; BGN, 2.1E+00, 1.5E−03; GPAT4, 2.1E+00, 4.9E−02; PMP22, 2.1E+00, 7.3E−05; TIPARP, |
| | 2.1E+00, 1.7E−02; TACC1, 2.1E+00, 4.8E−02; PAG1, 2.2E+00, 3.4E−04; PCGF5, 2.2E+00, 4.7E−03; RUSC2, 2.2E+00, 3.6E−02; VGLL3, 2.2E+00, 2.5E−02; |
| | AKAP6, 2.2E+00, 1.7E−03; EFEMP1, 2.2E+00, 3.3E−03; PDGFRB, 2.2E+00, 3.2E−03; RGS20, 2.2E+00, 9.3E−03; FLI1, 2.2E+00, 1.9E−08; CPQ, 2.2E+00, 4.9E−03; |
| | MCAM, 2.3E+00, 5.6E−03; TNFRSF12A, 2.3E+00, 1.0E−02; RIN2, 2.3E+00, 2.1E−03; IFFO2, 2.3E+00, 1.6E−03; CPEB4, 2.3E+00, 2.1E−02; CLMN, |
| | 2.3E+00, 1.4E−03; GYPC, 2.3E+00, 2.5E−05; COBLL1, 2.3E+00, 3.3E−03; ARHGAP29, 2.3E+00, 3.4E−02; PLK2, 2.4E+00, 4.1E−02; AMOTL2, 2.4E+00, 4.8E−02; |
| | DPYD, 2.4E+00, 1.8E−03; DNAJC15, 2.4E+00, 4.9E−02; ZYX, 2.4E+00, 4.2E−02; SBDS, 2.4E+00, 1.9E−02; GSR, 2.4E+00, 2.8E−02; BMP4, 2.5E+00, 9.0E−05; |
| | MSRB3, 2.5E+00, 3.6E−02; IER3, 2.5E+00, 9.6E−06; IQGAP3, 2.5E+00, 5.6E−03; UBASH3B, 2.5E+00, 5.9E−03; COLGALT2, 2.5E+00, 7.3E−04; CMPK1, |
| | 2.5E+00, 1.1E−02; COPS4, 2.6E+00, 3.3E−02; CAVIN1, 2.6E+00, 1.0E−02; TMEM178A, 2.6E+00, 3.8E−04; KCTD16, 2.6E+00, 1.9E−04; SNAPC1, 2.6E+00, |
| | 5.5E−03; RIOK3, 2.6E+00, 3.1E−02; SLC2A1, 2.6E+00, 2.5E−02; AXL, 2.6E+00, 5.2E−03; SYTL2, 2.6E+00, 5.8E−05; DDR2, 2.6E+00, 9.3E−05; BIRC2, |
| | 2.6E+00, 3.2E−02; RNF152, 2.6E+00, 1.8E−02; ZFPM2, 2.6E+00, 4.8E−02; MIR181A1HG, 2.7E+00, 3.2E−02; ANXA6, 2.7E+00, 3.1E−02; CCDC85A, 2.7E+00, |
| | 5.3E−04; MCUR1, 2.7E+00, 1.4E−02; GUCY1A2, 2.7E+00, 1.5E−02; GNG11, 2.7E+00, 8.1E−06; ZC3H18, 2.7E+00, 4.0E−02; GNG12, 2.8E+00, 2.3E−02; |
| | LINC00152, 2.8E+00, 3.7E−04; RBMS2, 2.8E+00, 1.0E−02; CPED1, 2.8E+00, 4.3E−06; CCDC141, 2.8E+00, 1.1E−04; TAGLN2, 2.9E+00, 5.6E−04; ST3GAL1, |
| | 2.9E+00, 8.1E−06; RASA3, 2.9E+00, 5.5E−04; MAP3K20, 2.9E+00, 8.6E−03; CREM, 2.9E+00, 2.8E−02; NOP10, 2.9E+00, 3.1E−02; ADAMTS5, 2.9E+00, |
| | 1.3E−11; MLLT11, 2.9E+00, 1.9E−02; LOC100506718, 2.9E+00, 1.3E−12; VPS29, 2.9E+00, 3.7E−02; FRMD4B, 3.0E+00, 1.4E−02; GALNT10, 3.0E+00, 1.1E−02; |
| | SLC20A1, 3.0E+00, 2.8E−02; ADAMTS1, 3.0E+00, 7.4E−07; RBM20, 3.0E+00, 3.5E−04; CAV1, 3.0E+00, 2.8E−06; LOXL2, 3.0E+00, 1.1E−03; SNX3, 3.0E+00, |
| | 1.0E−03; AFAP1, 3.1E+00, 1.2E−02; MEF2C, 3.1E+00, 3.7E−03; GOLGA3, 3.1E+00, 2.3E−02; EEA1, 3.1E+00, 4.1E−02; TXNDC17, 3.1E+00, 3.7E−02; DPP6, |
| | 3.1E+00, 4.8E−02; SEC23A, 3.1E+00, 1.5E−02; ARID5B, 3.2E+00, 2.0E−03; SAMD5, 3.2E+00, 4.2E−04; COL12A1, 3.2E+00, 6.2E−05; PHTF2, 3.2E+00, 2.0E−02; |
| | ARSJ, 3.2E+00, 3.5E−07; MARCHF1, 3.2E+00, 4.6E−02; ARF4, 3.2E+00, 1.8E−02; NRK, 3.2E+00, 7.0E−08; NECTIN2, 3.2E+00, 2.8E−02; PSMA6, 3.2E+00, |
| | 3.9E−02; PCBP1, 3.3E+00, 1.7E−02; MCM10, 3.3E+00, 2.7E−02; PRR11, 3.3E+00, 3.8E−02; PALM2AKAP2, 3.3E+00, 7.7E−05; LINC-PINT, 3.3E+00, 3.3E−03; |
| | CNTN6, 3.3E+00, 2.1E−03; CDC123, 3.4E+00, 4.2E−02; MYL12A, 3.4E+00, 4.5E−02; SEC24D, 3.4E+00, 3.0E−03; ARHGAP10, 3.4E+00, 1.1E−02; |
| | ADGRG6, 3.4E+00, 2.5E−06; PDGFC, 3.4E+00, 1.8E−03; TTTY15, 3.4E+00, 1.9E−04; EDIL3, 3.4E+00, 3.5E−02; DOCK9, 3.5E+00, 1.7E−03; TUBA1A, |
| | 3.5E+00, 3.8E−02; RSU1, 3.5E+00, 3.1E−02; PRKAG2, 3.5E+00, 1.1E−04; COL5A1, 3.5E+00, 3.3E−04; EDN1, 3.5E+00, 1.4E−06; TMTC1, 3.5E+00, 2.4E−02; |
| | CDC42, 3.5E+00, 4.4E−02; LOC151760, 3.6E+00, 6.4E−05; WDR1, 3.6E+00, 3.3E−02; KLF6, 3.6E+00, 5.9E−05; RUNX2, 3.6E+00, 2.1E−09; TENM2, 3.6E+00, |
| | 3.9E−02; NUAK1, 3.6E+00, 1.7E−04; EIF4G2, 3.6E+00, 4.9E−02; MALAT1, 3.6E+00, 3.2E−07; STARD13, 3.6E+00, 4.1E−07; PCNX4, 3.7E+00, 2.0E−02; |
| | CLSTN2, 3.7E+00, 3.2E−06; P3H2, 3.7E+00, 3.5E−02; CYCS, 3.7E+00, 3.7E−02; KAT6A, 3.7E+00, 2.5E−02; ACTR3, 3.7E+00, 4.8E−02; SPATS2L, 3.7E+00, |
| | 3.6E−02; TFPI2, 3.7E+00, 1.4E−08; CSRP1, 3.7E+00, 7.0E−06; LUM, 3.7E+00, 2.7E−08; KRT8, 3.7E+00, 2.0E−02; CAST, 3.8E+00, 4.7E−04; CEP170, 3.8E+00, |
| | 4.6E−02; SGIP1, 3.8E+00, 4.4E−09; MYL9, 3.8E+00, 7.4E−03; MYL12B, 3.8E+00, 1.9E−03; SWAP70, 3.8E+00, 8.3E−03; PRKCA, 3.8E+00, 3.6E−02; |
| | MARCHF4, 3.8E+00, 3.8E−09; RHOA, 3.9E+00, 3.5E−02; MAMDC2, 3.9E+00, 5.5E−03; GNB4, 3.9E+00, 3.7E−04; ELK3, 3.9E+00, 3.4E−05; PRDX6, 3.9E+00, |
| | 2.9E−02; RAB6A, 3.9E+00, 1.1E−02; FHL1, 3.9E+00, 1.7E−05; CAP1, 3.9E+00, 2.8E−02; LDHA, 3.9E+00, 7.5E−03; MBNL2, 3.9E+00, 4.7E−05; RAB31, |
| | 4.0E+00, 1.4E−04; ATXN1, 4.0E+00, 3.7E−03; C2CD3, 4.0E+00, 1.4E−03; IDI1, 4.0E+00, 7.9E−03; OGFRL1, 4.0E+00, 3.1E−08; PLS3, 4.0E+00, 4.3E−02; |
| | ETS1, 4.0E+00, 7.4E−06; PPP6R3, 4.0E+00, 3.6E−02; TJP1, 4.0E+00, 3.8E−02; RHOBTB3, 4.0E+00, 1.9E−05; MYH10, 4.1E+00, 1.7E−02; NEXN, 4.1E+00, |
| | 3.1E−04; TPM2, 4.1E+00, 2.6E−02; TNFRSF21, 4.1E+00, 4.1E−03; ANTXR1, 4.1E+00, 8.4E−03; SKP1, 4.1E+00, 4.6E−02; PTPRM, 4.1E+00, 4.8E−02; UGCG, |
| | 4.1E+00, 5.9E−06; IGFBP3, 4.1E+00, 1.6E−07; S100A10, 4.2E+00, 1.9E−04; KIF5B, 4.2E+00, 1.5E−02; CNN3, 4.2E+00, 2.6E−02; FAM126A, 4.2E+00, 6.0E−03; |
| | TMEM123, 4.2E+00, 1.4E−03; ILF2, 4.2E+00, 1.6E−02; RNF217, 4.2E+00, 1.7E−03; TRAM2, 4.2E+00, 4.4E−05; ADGRL4, 4.2E+00, 5.5E−12; PPFIBP1, |
| | 4.3E+00, 2.4E−03; ROCK2, 4.3E+00, 8.7E−03; DUSP6, 4.3E+00, 1.9E−05; SYNE1, 4.3E+00, 1.3E−08; HIF1A, 4.3E+00, 1.2E−02; FLNC, 4.3E+00, 2.8E−04; |
| | CALR, 4.3E+00, 1.8E−02; ACAT2, 4.4E+00, 9.0E−03; NTM, 4.4E+00, 2.9E−02; USP53, 4.4E+00, 2.8E−05; LAMB1, 4.4E+00, 7.5E−03; HSPA5, 4.4E+00, 9.3E−03; |
| | ARPC2, 4.4E+00, 8.8E−03; CDH13, 4.5E+00, 4.0E−05; DNMT1, 4.5E+00, 4.2E−03; RAI14, 4.5E+00, 1.2E−02; PFKP, 4.5E+00, 9.2E−05; EIF4G1, 4.6E+00, |
| | 6.7E−03; SYTL5, 4.6E+00, 1.9E−09; MBNL1, 4.6E+00, 2.0E−04; TANC1, 4.6E+00, 9.3E−05; HOOK3, 4.7E+00, 9.7E−05; PLXNA2, 4.7E+00, 7.4E−10; OSBPL8, |
| | 4.7E+00, 4.7E−03; TFPI, 4.7E+00, 8.2E−06; MAP4, 4.7E+00, 5.5E−03; HMCN1, 4.7E+00, 2.1E−04; NQO1, 4.7E+00, 5.6E−07; MSN, 4.8E+00, 5.9E−04; CALU, |
| | 4.8E+00, 4.7E−03; DSTN, 4.8E+00, 6.5E−03; NT5C2, 4.8E+00, 2.3E−03; ADAMTS12, 4.8E+00, 7.3E−03; CCT6A, 4.8E+00, 4.5E−03; SPTBN1, 4.8E+00, 5.0E−03; |
| | DIAPH3, 4.9E+00, 1.3E−02; TUBB6, 4.9E+00, 1.3E−06; SH3BP4, 4.9E+00, 3.9E−05; CLIC1, 4.9E+00, 2.4E−04; LAMC1, 5.0E+00, 2.0E−04; SSR3, 5.0E+00, |
| | 2.9E−04; TES, 5.0E+00, 2.8E−10; PRSS23, 5.0E+00, 1.2E−07; NEK7, 5.0E+00, 1.0E−05; ATRNL1, 5.0E+00, 2.0E−04; ELL2, 5.0E+00, 9.5E−06; TLN1, |
| | 5.0E+00, 1.2E−05; KTN1, 5.1E+00, 1.3E−03; COPG2, 5.1E+00, 1.9E−03; SHISA9, 5.1E+00, 7.6E−03; COL1A2, 5.1E+00, 1.2E−03; CCND1, 5.1E+00, 1.9E−03; |
| | YWHAZ, 5.2E+00, 1.4E−03; INPP4B, 5.2E+00, 3.3E−05; MAP1B, 5.2E+00, 1.1E−03; CCND2, 5.2E+00, 2.0E−03; ALPK2, 5.3E+00, 9.5E−14; LIMS1, 5.4E+00, |
| | 1.3E−04; PFN1, 5.4E+00, 2.8E−03; FLNA, 5.4E+00, 1.0E−03; CLIC4, 5.4E+00, 4.5E−04; FTL, 5.5E+00, 4.8E−04; PARVA, 5.5E+00, 9.3E−08; RIC1, 5.5E+00, |
| | 6.7E−06; CAPN2, 5.5E+00, 5.0E−09; ACTB, 5.5E+00, 8.3E−07; NEDD9, 5.6E+00, 1.4E−06; CAP2, 5.6E+00, 1.2E−06; TUBA1B, 5.6E+00, 5.5E−04; CORO1C, |
| | 5.6E+00, 7.8E−06; COL3A1, 5.7E+00, 5.6E−13; S100A11, 5.8E+00, 3.3E−07; ITGA1, 5.8E+00, 4.8E−10; MYOF, 5.8E+00, 8.8E−09; SERPINE1, 5.9E+00, 4.0E−12; |
| | COL5A2, 5.9E+00, 8.3E−07; CDK6, 5.9E+00, 3.1E−05; ZEB2, 5.9E+00, 4.7E−05; NEAT1, 6.0E+00, 6.2E−04; ACTA2, 6.1E+00, 1.3E−10; MYL6, 6.1E+00, |
| | 1.2E−04; ACTC1, 6.2E+00, 2.7E−07; NES, 6.2E+00, 1.1E−04; FLNB, 6.4E+00, 1.1E−05; TMSB10, 6.5E+00, 1.8E−04; TRIO, 6.5E+00, 7.7E−05; GLS, 6.6E+00, |
| | 2.1E−07; ACTG1, 6.7E+00, 9.7E−07; FSTL1, 6.7E+00, 3.8E−06; DKK2, 6.8E+00, 7.4E−18; ADAM19, 6.8E+00, 3.5E−12; SERPINE2, 6.8E+00, 6.7E−12; MACF1, |
| | 6.9E+00, 7.8E−08; MEST, 7.1E+00, 1.2E−07; ACTN4, 7.1E+00, 1.4E−07; SMURF2, 7.1E+00, 4.4E−12; SORBS2, 7.1E+00, 7.8E−08; PALLD, 7.2E+00, 6.4E−06; |
| | SAMD4A, 7.4E+00, 5.1E−06; SPARC, 7.5E+00, 9.0E−09; DLC1, 7.5E+00, 5.1E−20; LPP, 7.6E+00, 7.6E−07; SPP1, 7.6E+00, 4.6E−12; FRMD6, 7.7E+00, |
| | 7.1E−16; PPME1, 8.0E+00, 4.9E−13; COL1A1, 8.0E+00, 1.8E−11; TPM4, 8.1E+00, 7.7E−09; TGFB2, 8.4E+00, 2.6E−22; PICALM, 8.6E+00, 1.5E−10; TMSB4X, |
| | 9.0E+00, 7.7E−09; ACTN1, 9.2E+00, 7.4E−11; EXT1, 9.3E+00, 2.2E−09; COL4A2, 9.4E+00, 9.2E−16; THBS1, 9.6E+00, 8.4E−16; ITGB1, 9.6E+00, 4.4E−12; |
| | IGFBP7, 9.8E+00, 1.8E−35; MIR4435-2HG, 1.0E+01, 5.1E−17; MYH9, 1.0E+01, 1.2E−13; RBMS3, 1.1E+01, 8.9E−13; COL4A1, 1.1E+01, 8.5E−22; VIM, |
| | 1.1E+01, 2.2E−15; ANXA2, 1.2E+01, 9.8E−19; SEPTIN11, 1.2E+01, 8.8E−18; ITGAV, 1.2E+01, 3.1E−17; AHNAK, 1.2E+01, 2.0E−17; AKAP12, 1.2E+01, 3.4E−17; |
| | CRIM1, 1.2E+01, 1.1E−18; TPM1, 1.3E+01, 8.5E−22; ANXA1, 1.3E+01, 1.2E−27; COL8A1, 1.3E+01, 2.0E−50; CYR61, 1.3E+01, 1.1E−32; TAGLN, |
| | 1.4E+01, 4.7E−22; FLRT2, 1.4E+01, 6.8E−29; FN1, 1.4E+01, 5.3E−19; MAML2, 1.4E+01, 2.9E−23; DDAH1, 1.5E+01, 4.2E−31; CALD1, 1.6E+01, 1.5E−28; |
| | CCN2, 1.6E+01, 2.8E−38; ANKRD1, 2.9E+01, 1.2E−62 |
| 7-1 | H2AC17, −2.3E+00, 5.0E−04; H1-2, −2.2E+00, 9.1E−04; TPM1, −1.9E+00, 6.8E−04; H2AC20, −1.8E+00, 1.1E−02; H4C3, −1.7E+00, 3.1E−02; H1-5, −1.7E+00, |
| | 2.7E−02; DYNLL1, −1.7E+00, 2.7E−03; FN1, −1.6E+00, 3.4E−03; SRRM1, −1.6E+00, 1.2E−02; H2AC12, −1.5E+00, 1.8E−02; SUPT16H, −1.5E+00, 2.7E−02; |
| | SET, −1.4E+00, 2.0E−02; NDUFS5, −1.4E+00, 2.5E−02; EPCAM, −1.4E+00, 2.5E−02; NOLC1, −1.3E+00, 3.2E−02; HSPD1, −1.3E+00, 2.8E−02; MEST, −1.3E+00, |
| | 2.9E−02; H4C12, −1.3E+00, 3.4E−02; H3C10, −1.3E+00, 3.6E−02; WBP11, −1.2E+00, 7.4E−03; RPL11, −1.2E+00, 3.0E−02; ID2, −1.2E+00, 7.0E−04; IARS2, |
| | −1.1E+00, 2.0E−02; PTMA, −1.1E+00, 1.0E−02; HSP90AA1, −1.0E+00, 3.5E−02; H2BC10, −1.0E+00, 2.0E−02; BANF1, −1.0E+00, 2.9E−02; CA11, −8.4E−01, |
| | 1.8E−02; UNC5C, −7.5E−01, 3.1E−02; ID4, −6.9E−01, 4.2E−02; RPP38, −6.0E−01, 3.0E−02; RIMS4, −5.1E−01, 2.9E−02; LOC105377207, 1.8E−01, 4.7E−02; |
| | BCL6B, 2.5E−01, 4.6E−02; LOC107985892, 2.6E−01, 4.8E−02; ECSCR, 2.6E−01, 4.6E−03; DIPK2B, 3.1E−01, 3.6E−02; SULT1C3, 3.2E−01, 5.3E−03; THSD1, |
| | 3.3E−01, 1.7E−02; LINC01594, 3.3E−01, 4.7E−03; PCDH12, 3.4E−01, 5.0E−03; SH2D3C, 3.5E−01, 3.8E−02; PTPRE, 3.5E−01, 1.6E−02; HHEX, 3.6E−01, 3.6E−03; |
| | FLT4, 3.9E−01, 1.7E−02; ST8SIA4, 4.2E−01, 2.0E−02; PTPRB, 4.5E−01, 1.0E−02; TMEM255B, 4.5E−01, 3.5E−03; ESAM, 4.7E−01, 9.5E−05; PCED1B, 4.7E−01, |
| | 8.4E−03; MMRN1, 4.8E−01, 1.0E−05; TAL1, 4.9E−01, 6.7E−03; HLA-E, 5.1E−01, 1.0E−02; SULT1C2, 5.1E−01, 1.8E−02; KCNA6, 5.1E−01, 4.2E−03; PMP22, |
| | 5.2E−01, 2.5E−02; SGIP1, 5.4E−01, 1.5E−02; ENG, 5.9E−01, 1.5E−02; JCAD, 6.1E−01, 2.3E−02; AFAP1L1, 6.1E−01, 2.0E−03; LPAR6, 6.2E−01, 2.3E−02; |
| | MALAT1, 6.6E−01, 1.6E−02; PECAM1, 6.7E−01, 3.3E−05; SLC22A23, 6.8E−01, 2.2E−02; RELL1, 6.9E−01, 2.0E−02; RAMP2, 6.9E−01, 2.5E−03; PAG1, 7.1E−01, |
| | 4.7E−02; LOC105369309, 7.2E−01, 7.6E−05; SULT1C2P1, 7.3E−01, 4.6E−07; F2RL2, 7.3E−01, 2.1E−04; PLXND1, 7.4E−01, 6.7E−03; ALDH1A2, 7.5E−01, |
| | 2.2E−03; GUCY1A1, 7.5E−01, 4.5E−04; DYRK4, 7.6E−01, 3.4E−04; ITGA9, 7.7E−01, 1.8E−02; RAB3C, 8.0E−01, 4.6E−03; ERG, 8.0E−01, 9.1E−06; TIE1, 8.0E−01, |
| | 1.0E−06; FGD5, 8.2E−01, 3.4E−04; TGFBR2, 8.2E−01, 2.5E−02; CDH5, 8.3E−01, 7.0E−08; DOCK6, 8.3E−01, 3.0E−02; SYNE1, 8.3E−01, 4.5E−03; CNIH3, |
| | 8.4E−01, 1.8E−02; COL15A1, 8.5E−01, 2.1E−05; EGFL7, 8.7E−01, 9.4E−04; ARHGAP31, 8.9E−01, 3.6E−04; S1PR3, 9.1E−01, 2.6E−03; IQSEC1, 9.5E−01, 2.8E−02; |
| | ASXL1, 9.6E−01, 2.3E−02; NETO1, 9.9E−01, 3.4E−02; FAM189A1, 9.9E−01, 4.8E−02; FAM107B, 9.9E−01, 2.0E−02; GRIN2A, 1.0E+00, 4.6E−03; SHOC1, |
| | 1.0E+00, 3.2E−02; PLVAP, 1.0E+00, 9.8E−07; FAR2, 1.0E+00, 3.5E−02; MTSS1, 1.0E+00, 1.2E−03; BMP2K, 1.0E+00, 3.6E−02; CALCRL, 1.0E+00, 1.0E−06; |
| | DAB2, 1.1E+00, 3.9E−03; DYSF, 1.1E+00, 8.3E−06; ANO3, 1.1E+00, 8.0E−03; CDK17, 1.1E+00, 3.1E−02; RHOJ, 1.1E+00, 5.3E−08; RASGRP3, 1.1E+00, 6.2E−09; |
| | ATP8B4, 1.1E+00, 2.5E−04; PLEKHG1, 1.1E+00, 1.0E−06; GREM2, 1.1E+00, 9.3E−03; STARD13, 1.1E+00, 3.2E−03; DACH2, 1.1E+00, 4.8E−02; CD34, |
| | 1.2E+00, 6.2E−09; EMCN, 1.2E+00, 6.2E−09; CHRM3, 1.2E+00, 5.2E−04; SAMD5, 1.2E+00, 2.7E−02; PLXNA2, 1.3E+00, 2.2E−02; ETS1, 1.3E+00, 4.1E−04; |
| | KIF26B, 1.3E+00, 6.8E−03; MAST4, 1.3E+00, 2.2E−04; TFPI, 1.3E+00, 2.7E−02; NRP2, 1.4E+00, 1.4E−03; NHSL2, 1.4E+00, 1.0E−02; COL5A2, 1.4E+00, |
| | 2.3E−02; PRSS23, 1.4E+00, 3.3E−05; COL4A1, 1.4E+00, 1.3E−02; KDR, 1.4E+00, 9.7E−04; CPED1, 1.4E+00, 6.0E−03; GAB1, 1.5E+00, 9.7E−04; CACNA1C, |
| | 1.5E+00, 3.9E−04; ELK3, 1.5E+00, 2.7E−05; INPP4B, 1.5E+00, 2.7E−02; CALD1, 1.5E+00, 2.0E−02; ITPR1, 1.5E+00, 1.1E−03; FLT1, 1.5E+00, 5.7E−03; |
| | MEF2A, 1.5E+00, 1.2E−02; SSBP2, 1.6E+00, 2.0E−02; EBF1, 1.6E+00, 1.2E−03; LDB2, 1.6E+00, 9.9E−03; SESN3, 1.7E+00, 2.7E−02; DLC1, 1.7E+00, 7.7E−03; |
| | ARL15, 1.7E+00, 2.5E−03; CDC42BPA, 1.7E+00, 2.4E−03; ZNF521, 1.7E+00, 9.7E−04; MYO6, 1.7E+00, 1.5E−04; AKT3, 1.8E+00, 1.7E−03; COL3A1, |
| | 1.8E+00, 1.8E−02; LIMCH1, 1.9E+00, 5.8E−05; TCF4, 2.0E+00, 5.2E−04; ARHGAP28, 2.0E+00, 5.9E−05; PCDH17, 2.1E+00, 5.0E−07; COL4A2, 2.1E+00, |
| | 2.2E−07; CDH13, 2.1E+00, 6.0E−09; ITGAV, 2.1E+00, 6.8E−04; ZFPM2, 2.1E+00, 2.7E−09; PTCHD4, 2.2E+00, 9.1E−06; FLRT2, 2.2E+00, 2.7E−05; PTPRM, |
| | 2.3E+00, 2.4E−05; FBN1, 2.4E+00, 4.1E−07; VAV3, 2.4E+00, 6.9E−10; GNG11, 2.4E+00, 2.0E−13; HAPLN1, 2.6E+00, 2.6E−09; ZEB1, 2.6E+00, 7.2E−11; |
| | SAMD4A, 2.6E+00, 1.8E−06; DOCK4, 2.6E+00, 1.5E−07; ROBO2, 2.7E+00, 4.0E−05; ADAM12, 3.2E+00, 4.0E−17; FLI1, 3.4E+00, 2.8E−22; KALRN, 3.7E+00, |
| | 4.0E−17; ADGRL4, 4.2E+00, 6.2E−27; MEF2C, 4.3E+00, 3.4E−27 |
| 7-2 | ATG16L2, 3.3E+00, 6.5E−03; MEF2C, 7.7E+00, 1.2E−02 |
| 8-0 | HSPA8, −3.1E+01, 1.1E−03; RPS3, −3.0E+01, 2.4E−02; NPM1, −3.0E+01, 9.4E−05; SNRPF, −2.5E+01, 3.5E−02; RPLP1, −2.4E+01, 2.3E−02; C4orf51, −1.9E+01, |
| | 3.3E−02; EEF1A1, −1.9E+01, 3.6E−02; PTMA, −1.7E+01, 1.1E−02; C19orf67, 1.0E+00, 3.5E−02; GASK1B, 1.0E+00, 3.5E−02; LINC01565, 1.0E+00, 3.5E−02; |
| | LOC101929544, 1.0E+00, 3.5E−02; LOC105373289, 1.0E+00, 3.5E−02; LOC105377508, 1.0E+00, 3.5E−02; LOC107984980, 1.0E+00, 3.5E−02; |
| | LOC107986561, 1.0E+00, 3.5E−02; PABPC1P2, 1.0E+00, 3.5E−02; RGMB-AS1, 1.7E+00, 3.1E−02; LOC101928907, 1.7E+00, 3.5E−02; LOC105379508, |
| | 1.7E+00, 3.5E−02; RNF112, 1.7E+00, 7.4E−03; LOC107985448, 1.9E+00, 3.5E−02; IL12A, 1.9E+00, 3.2E−02; MIR4419A, 2.2E+00, 3.3E−02; |
| | LOC101927281, 2.3E+00, 3.9E−04; LOC105372592, 2.3E+00, 3.9E−04; LOC151484, 2.3E+00, 3.9E−04; SNORD57, 2.3E+00, 3.5E−02; LOC101928535, |
| | 2.9E+00, 4.6E−03; ANKRD20A9P, 2.9E+00, 2.3E−03; LOC105374459, 3.1E+00, 3.3E−02; SOCS2-AS1, 3.1E+00, 3.3E−02; LOC102724419, 3.2E+00, 5.0E−02; |
| | LOC105374723, 3.5E+00, 3.2E−02; LOC105370981, 3.8E+00, 6.4E−04; LOC107986807, 4.0E+00, 8.4E−04; TIGD6, 4.1E+00, 3.1E−04; RUNX2, |
| | 4.2E+00, 5.0E−02; KLHL17, 4.4E+00, 3.2E−02; BBS5, 5.0E+00, 3.4E−05; LOC102723465, 5.2E+00, 1.1E−03; LIPH, 5.4E+00, 1.1E−03; GNB3, 6.3E+00, |
| | 1.2E−02; NPIPA1, 6.6E+00, 8.0E−03; LOC105375434, 8.3E+00, 4.4E−03; MYO1F, 1.2E+01, 3.6E−02; USH2A, 1.5E+01, 3.9E−02; ITGA9, 1.5E+01, 4.6E−03; |
| | MALAT1, 1.7E+01, 6.4E−04; LRP1B, 1.9E+01, 3.7E−02; LOC107986022, 2.1E+01, 3.9E−02; FRY, 2.1E+01, 3.3E−02; FRA10AC1, 2.2E+01, 7.4E−03; CADM1, |
| | 2.5E+01, 3.3E−02; PAM, 2.6E+01, 3.4E−02; PPP2R3A, 2.8E+01, 3.3E−02 |
| 8-1 | RPS8, −1.4E+01, 3.5E−09; RPL5, −1.4E+01, 1.7E−07; RPL10, −1.3E+01, 1.2E−05; CD24, −1.3E+01, 2.2E−10; EEF1A1, −1.3E+01, 1.1E−15; NPM1, −1.3E+01, |
| | 2.2E−10; RPS17, −1.3E+01, 8.5E−06; RPL23, −1.3E+01, 2.3E−05; PTMA, −1.3E+01, 3.9E−16; RPS6, −1.2E+01, 3.5E−09; ACTG1, −1.2E+01, 1.9E−05; RPL35A, |
| | −1.2E+01, 4.5E−05; RPS2, −1.2E+01, 6.8E−05; RPS23, −1.2E+01, 1.9E−05; RPL8, −1.2E+01, 7.9E−05; HNRNPA1, −1.2E+01, 2.4E−06; ACTB, −1.2E+01, 2.5E−09; |
| | FTH1, −1.2E+01, 1.1E−04; YBX1, −1.1E+01, 1.5E−04; RPL7A, −1.1E+01, 7.2E−05; RPL34, −1.1E+01, 2.7E−04; HDAC2, −1.1E+01, 1.3E−04; RPL13, |
| | −1.1E+01, 7.9E−05; RPL28, −1.1E+01, 2.5E−04; CALM1, −1.1E+01, 2.3E−04; RPL10A, −1.1E+01, 1.9E−04; RPL13A, −1.1E+01, 6.2E−06; GJA1, −1.1E+01, 4.1E−04; |
| | HSP90AA1, −1.1E+01, 7.1E−08; RPS5, −1.0E+01, 4.6E−04; RPL24, −1.0E+01, 8.7E−04; LDHB, −1.0E+01, 2.8E−04; RPL12, −1.0E+01, 8.3E−04; RPS9, |
| | −1.0E+01, 1.6E−03; RPL30, −1.0E+01, 1.7E−03; POU5F1, −1.0E+01, 1.6E−03; PABPC1, −1.0E+01, 9.8E−05; HSP90AB1, −1.0E+01, 2.3E−06; NCL, −1.0E+01, |
| | 2.6E−05; RPS14, −1.0E+01, 5.6E−04; TMSB4X, −1.0E+01, 1.3E−03; RPL4, −1.0E+01, 1.9E−04; RPS16, −9.9E+00, 9.1E−04; RPLPO, −9.8E+00, 1.3E−03; SET, |
| | −9.7E+00, 9.1E−04; ENO1, −9.7E+00, 2.9E−03; RPLP1, −9.6E+00, 6.4E−05; EIF4G2, −9.6E+00, 1.0E−03; EEF1G, −9.6E+00, 3.8E−03; HSPA8, −9.5E+00, 5.1E−04; |
| | CANX, −9.5E+00, 3.0E−04; TARS1, −9.5E+00, 1.7E−03; TPT1, −9.5E+00, 3.5E−03; LIN28A, −9.4E+00, 1.2E−04; RPL3, −9.4E+00, 8.1E−04; RPS12, |
| | −9.3E+00, 6.0E−03; FTL, −9.3E+00, 7.0E−03; RPLP2, −9.3E+00, 7.2E−03; RPL18A, −9.2E+00, 4.4E−03; RPL15, −9.1E+00, 4.9E−03; HSPD1, −9.1E+00, 6.3E−04; |
| | RPL21, −9.0E+00, 8.0E−03; RPS28, −9.0E+00, 3.3E−03; MAP1B, −9.0E+00, 1.2E−02; PFN1, −9.0E+00, 7.7E−03; RPL31, −9.0E+00, 5.4E−03; RPS3, −9.0E+00, |
| | 7.7E−03; RPL26, −9.0E+00, 9.2E−03; RPL9, −8.9E+00, 9.7E−03; RPL14, −8.9E+00, 1.1E−02; NACA, −8.9E+00, 1.1E−02; HMGA1, −8.9E+00, 7.4E−03; RPL32, |
| | −8.8E+00, 1.6E−02; NASP, −8.8E+00, 3.5E−03; RPSA, −8.7E+00, 1.1E−02; RPS18, −8.6E+00, 3.8E−03; SRSF3, −8.6E+00, 1.1E−02; RPS15A, −8.5E+00, |
| | 1.5E−02; GAPDH, −8.5E+00, 1.3E−03; EEF2, −8.5E+00, 1.1E−02; RPL29, −8.5E+00, 1.2E−02; H2AZ1, −8.5E+00, 1.0E−02; NORAD, −8.4E+00, 1.5E−02; EID1, |
| | −8.3E+00, 3.5E−03; RPS13, −8.3E+00, 1.7E−02; GSTP1, −8.3E+00, 3.2E−02; RPL11, −8.2E+00, 7.7E−03; RPS7, −8.2E+00, 2.5E−02; RPS11, −8.2E+00, 3.4E−02; |
| | TPM3, −8.2E+00, 2.5E−02; HNRNPE, −8.2E+00, 9.0E−03; ATP8, −8.2E+00, 1.6E−02; PRDX1, −8.2E+00, 2.6E−02; RPS27A, −8.1E+00, 2.4E−02; CSDE1, |
| | −8.1E+00, 2.0E−02; TPI1, −8.1E+00, 2.9E−02; ATP5F1B, −8.1E+00, 2.5E−02; ZNF483, −8.1E+00, 9.2E−03; SLC38A1, −8.0E+00, 3.4E−02; H3F3B, −8.0E+00, |
| | 2.6E−02; PDIA6, −8.0E+00, 2.2E−02; TDGF1, −7.9E+00, 3.0E−02; RPS24, −7.9E+00, 3.0E−02; L1TD1, −7.9E+00, 1.8E−03; MYL6, −7.8E+00, 4.1E−02; YWHAG, |
| | −7.6E+00, 4.4E−02; NDUFS5, −7.6E+00, 1.5E−02; DNAJA1, −7.6E+00, 2.9E−02; NARS1, −7.5E+00, 2.0E−02; QSER1, −7.2E+00, 3.4E−02; ATP5PD, −7.2E+00, |
| | 2.2E−02; PSMB1, −6.5E+00, 4.2E−02; SF3A3, −6.4E+00, 4.3E−02; COX1, −6.3E+00, 2.3E−07; IFITM1, −6.2E+00, 2.8E−02; COX7B, −5.8E+00, 9.6E−03; COX3, |
| | −5.7E+00, 2.7E−04; TRUB1, −5.5E+00, 1.4E−02; ND5, −4.9E+00, 2.9E−02; ATP6, −4.6E+00, 1.2E−02; ND4, −4.6E+00, 8.1E−04; CYTB, −4.5E+00, 2.4E−02; |
| | ITIH5, −2.3E+00, 1.2E−02; LOC105370761, 6.4E−01, 1.6E−02; NINJ2, 7.5E−01, 2.8E−02; MIR4432HG, 9.3E−01, 2.2E−02; LOC105379412, 1.5E+00, 2.3E−02; |
| | LOC105377359, 1.7E+00, 3.8E−02; LINC00951, 1.9E+00, 2.5E−02; PAPPA2, 2.0E+00, 2.0E−02; LOC105377561, 2.1E+00, 2.7E−02; LOC107983968, |
| | 2.1E+00, 2.9E−02; VWA2, 2.2E+00, 2.5E−02; SPINK14, 2.2E+00, 4.6E−02; SRP14-AS1, 2.3E+00, 3.6E−02; SYBU, 2.4E+00, 2.5E−03; NALCN-AS1, 2.6E+00, |
| | 1.8E−02; LOC105373187, 2.7E+00, 3.3E−02; LOC105373455, 2.8E+00, 1.7E−02; LRRTM3, 3.1E+00, 4.6E−02; LINC00989, 3.2E+00, 4.4E−02; RELL1, |
| | 3.2E+00, 2.1E−02; FSIP2, 3.5E+00, 1.7E−02; ATP10A, 3.5E+00, 2.0E−02; LOC339622, 3.6E+00, 1.1E−02; SETD4, 4.1E+00, 1.9E−02; LOC105370737, |
| | 4.1E+00, 1.3E−04; DCBLD1, 4.2E+00, 5.5E−05; LOC101927896, 4.4E+00, 5.4E−03; LOC107984393, 4.6E+00, 2.1E−03; IFRD1, 4.8E+00, 4.7E−02; NPHP4, |
| | 4.8E+00, 3.5E−02; PRKCE, 4.8E+00, 5.7E−03; LINC00632, 4.9E+00, 2.8E−02; KIF26B, 4.9E+00, 3.3E−02; LOC105373703, 5.0E+00, 3.5E−02; AASS, |
| | 5.2E+00, 8.3E−03; GRM7, 5.8E+00, 1.6E−02; LOC107986324, 5.8E+00, 1.0E−02; LOC105378308, 6.0E+00, 9.1E−03; LOC105377700, 6.1E+00, 6.9E−03; |
| | FOXN3, 6.2E+00, 7.6E−04; SLC30A7, 6.2E+00, 4.2E−02; WASF1, 6.3E+00, 2.0E−02; ECHDC2, 6.3E+00, 1.8E−03; FAM155A, 6.3E+00, 4.5E−02; PCSK6, |
| | 6.3E+00, 1.3E−02; NR3C2, 6.3E+00, 2.9E−02; PPP1R16B, 6.4E+00, 8.0E−03; B3GALT1, 6.4E+00, 8.8E−03; VCAN, 6.5E+00, 7.8E−03; RHOT1, 6.5E+00, |
| | 1.2E−02; WDR37, 6.6E+00, 1.2E−03; NHS, 6.6E+00, 4.9E−02; SNTG2, 6.7E+00, 3.1E−02; ST7, 6.8E+00, 2.2E−02; SCFD2, 6.8E+00, 5.0E−02; RALGAPB, 6.8E+00, |
| | 1.0E−02; VAV3, 7.0E+00, 4.2E−02; NFIA, 7.0E+00, 3.7E−03; FSTL4, 7.1E+00, 1.3E−02; GRIN2A, 7.1E+00, 3.6E−03; MYO5B, 7.2E+00, 1.6E−02; MTTP, |
| | 7.2E+00, 5.6E−06; CDH6, 7.2E+00, 3.5E−02; PCSK5, 7.3E+00, 4.1E−02; RCOR1, 7.3E+00, 5.0E−02; NOS1AP, 7.3E+00, 1.6E−02; FLRT2, 7.3E+00, 2.1E−03; |
| | RERE, 7.3E+00, 2.6E−02; RABGAP1L, 7.4E+00, 4.9E−03; FAM13B, 7.4E+00, 1.7E−02; FGD4, 7.4E+00, 3.1E−02; CECR2, 7.4E+00, 6.3E−03; ACSS3, 7.5E+00, |
| | 1.5E−02; SYN3, 7.6E+00, 9.6E−03; VWA8, 7.6E+00, 2.6E−02; APP, 7.8E+00, 3.8E−02; JPX, 7.8E+00, 4.5E−02; CDK8, 7.8E+00, 1.6E−02; PTK2, 7.9E+00, |
| | 1.0E−02; PHKB, 7.9E+00, 1.0E−02; PIAS1, 7.9E+00, 1.5E−02; MACROD2, 7.9E+00, 3.3E−02; GXYLT2, 7.9E+00, 1.5E−04; PTPN4, 7.9E+00, 3.3E−02; TMTC2, |
| | 7.9E+00, 3.4E−02; TTC17, 7.9E+00, 3.4E−02; DLGAP1, 7.9E+00, 7.1E−04; DLG2, 8.0E+00, 3.8E−02; MALAT1, 8.0E+00, 3.4E−10; ADGRA3, 8.0E+00, 2.4E−02; |
| | MBTD1, 8.1E+00, 1.2E−02; FTX, 8.2E+00, 1.6E−03; PHACTR2, 8.2E+00, 1.9E−02; TRIM24, 8.2E+00, 9.6E−03; ZNF577, 8.2E+00, 1.5E−03; HERC1, |
| | 8.2E+00, 3.6E−02; MSH3, 8.3E+00, 3.3E−03; TASP1, 8.4E+00, 1.8E−02; SIPA1L3, 8.4E+00, 1.7E−02; KLF8, 8.4E+00, 1.6E−02; TENM3, 8.4E+00, 9.1E−03; |
| | ADGRL2, 8.5E+00, 4.7E−03; MAP2K5, 8.5E+00, 2.0E−03; RANBP17, 8.6E+00, 2.6E−02; DAB1, 8.6E+00, 2.1E−04; PSPC1, 8.6E+00, 1.2E−02; RUNX1T1, |
| | 8.6E+00, 2.0E−02; GAB1, 8.7E+00, 5.7E−03; LOC101929194, 8.7E+00, 1.7E−02; CAMK1D, 8.7E+00, 1.0E−02; LOC339862, 8.7E+00, 1.5E−02; EDIL3, |
| | 8.7E+00, 2.0E−02; GRID2, 8.8E+00, 5.8E−16; LOC105370482, 8.8E+00, 8.5E−03; SPATS2L, 8.8E+00, 1.0E−02; PPP1R9A, 8.8E+00, 7.7E−03; KLF12, |
| | 8.9E+00, 1.2E−02; DENND1A, 8.9E+00, 1.0E−02; SVIL, 8.9E+00, 1.1E−03; MCF2L, 8.9E+00, 6.5E−04; SMYD3, 8.9E+00, 9.2E−03; MBD5, 8.9E+00, 1.1E−02; |
| | NEAT1, 9.0E+00, 8.1E−04; LOC101929231, 9.0E+00, 2.8E−05; DOCK3, 9.0E+00, 1.4E−02; PTPRG, 9.0E+00, 1.1E−06; TRAPPC9, 9.0E+00, 3.4E−03; |
| | PHACTR1, 9.1E+00, 1.3E−02; MED13L, 9.1E+00, 9.6E−03; ABCA1, 9.1E+00, 7.5E−03; AUH, 9.2E+00, 2.5E−03; PTPRD, 9.2E+00, 2.9E−03; C5orf46, |
| | 9.2E+00, 5.9E−04; ZYG11A, 9.4E+00, 7.5E−05; TBC1D22A, 9.4E+00, 4.6E−03; PLCH1, 9.4E+00, 3.4E−03; ERBIN, 9.6E+00, 3.6E−03; MAML2, 9.6E+00, 4.7E−03; |
| | TMEM135, 9.6E+00, 1.8E−03; PLCB1, 9.6E+00, 3.7E−03; DMXL1, 9.7E+00, 2.5E−03; PRKCA, 9.7E+00, 4.6E−03; PRICKLE2, 9.8E+00, 1.5E−03; LPP, |
| | 9.9E+00, 9.1E−04; CFTR, 1.0E+01, 9.5E−04; ZNF827, 1.0E+01, 1.6E−03; ACOXL, 1.0E+01, 4.7E−03; ADGRV1, 1.0E+01, 3.2E−05; ATXN7L1, 1.0E+01, 9.7E−04; |
| | RASSF8, 1.1E+01, 3.4E−05; AUTS2, 1.1E+01, 1.4E−09; KCNQ10T1, 1.1E+01, 1.2E−04; PLEKHA5, 1.1E+01, 1.6E−07; CBLB, 1.1E+01, 4.4E−04; FBXW11, |
| | 1.1E+01, 1.2E−04; SOX2-OT, 1.1E+01, 6.7E−04; KIAA0825, 1.1E+01, 4.4E−04; MGAT5, 1.1E+01, 3.7E−04; NRCAM, 1.2E+01, 2.9E−06; GMDS, 1.2E+01, |
| | 9.1E−05; PREX2, 1.2E+01, 2.1E−04; KANK1, 1.2E+01, 1.1E−04; BMP2K, 1.2E+01, 1.6E−05; TRPS1, 1.2E+01, 9.4E−05; COL8A1, 1.2E+01, 3.5E−09; PAN3, |
| | 1.3E+01, 1.2E−05; ADCY2, 1.3E+01, 1.6E−04; ADGRL3, 1.3E+01, 2.2E−11; ELF1, 1.3E+01, 3.6E−07; AGBL4, 1.3E+01, 1.1E−07; ZC3H12B, 1.3E+01, |
| | 1.6E−05; CNKSR3, 1.3E+01, 1.4E−05; TMEM132D, 1.3E+01, 2.0E−07; FOXP1, 1.3E+01, 7.1E−07; KDM4C, 1.4E+01, 1.4E−06; KAZN, 1.5E+01, 2.1E−07; CUBN, |
| | 1.5E+01, 9.9E−09; OPCML, 1.6E+01, 6.6E−11; VIPR2, 1.7E+01, 5.2E−12; CTNNA3, 1.7E+01, 7.6E−09; LOC107987166, 1.7E+01, 4.4E−08; MPPED2, |
| | 1.8E+01, 5.2E−10; AFF2, 1.8E+01, 2.5E−10; RASGRF2, 1.8E+01, 2.1E−11; LOC105370777, 2.0E+01, 6.6E−12 |
| 9-0 | LOC107986777, −2.5E+01, 2.3E−04; LOC101927668, −2.2E+01, 3.6E−03; PCAT14, −2.0E+01, 7.3E−03; APELA, −1.8E+01, 4.3E−02; GRID2, −1.1E+01, 2.9E−04; |
| | GHRL, 1.6E+00, 5.4E−05; LINC00867, 1.6E+00, 5.4E−05; LOC102723750, 1.6E+00, 5.4E−05; LOC105370425, 1.6E+00, 5.4E−05; LOC105371228, |
| | 1.6E+00, 5.4E−05; LOC105376199, 1.6E+00, 5.4E−05; LOC105378470, 1.6E+00, 5.4E−05; PHF11, 1.6E+00, 5.4E−05; LOC107986870, 1.7E+00, 2.5E−02; |
| | HOPX, 1.7E+00, 4.2E−03; TSLP, 1.8E+00, 8.0E−04; DCAF13P3, 2.0E+00, 7.6E−05; LOC105376866, 2.1E+00, 2.5E−02; LOC105372133, 2.7E+00, 3.9E−04; |
| | SLC10A3, 2.9E+00, 2.0E−02; ATP12A, 3.6E+00, 3.0E−02; VGLL1, 4.4E+00, 5.3E−03; SLC50A1, 6.5E+00, 2.5E−02; RALGDS, 6.9E+00, 2.1E−02; ANXA3, |
| | 9.1E+00, 9.2E−03; PGAP2, 9.9E+00, 4.2E−02; SLC39A8, 1.0E+01, 2.3E−02; PGGT1B, 1.0E+01, 4.1E−02; SLC8A1, 1.1E+01, 1.9E−02; LRP1B, 1.2E+01, 2.5E−02; |
| | ABCG2, 1.3E+01, 5.4E−05; VSNL1, 1.5E+01, 4.4E−02; FREM2, 1.6E+01, 3.0E−02; SAE1, 1.8E+01, 1.9E−02; TLE4, 1.8E+01, 1.9E−02; SLC2A3, 1.8E+01, |
| | 1.5E−02; AHNAK, 2.0E+01, 1.9E−02; ITGB1, 2.0E+01, 2.8E−03; GREB1L, 2.2E+01, 2.3E−04; MAGI3, 2.3E+01, 1.6E−02; DSP, 2.6E+01, 2.3E−04; PRTG, |
| | 2.9E+01, 1.6E−08; FBN2, 3.0E+01, 6.1E−05; HAPLN1, 3.8E+01, 2.1E−10 |
| 9-1 | DMD, −1.1E+01, 2.6E−04; MAGI3, −1.0E+01, 9.1E−05; FN1, −9.1E+00, 1.8E−02; PRKG1, −9.0E+00, 5.0E−04; SSBP2, −7.9E+00, 1.4E−03; PCDH11X, −6.9E+00, |
| | 7.1E−03; NLGN4X, −6.6E+00, 2.0E−02; DOK6, −5.4E+00, 3.7E−02; HS6ST2, −5.1E+00, 2.6E−02; LRRN1, −5.1E+00, 3.8E−02; PROM2, 6.6E−01, 4.3E−02; |
| | LINC00989, 6.9E−01, 3.8E−02; HSPE1-MOB4, 7.0E−01, 4.1E−02; IL36RN, 8.1E−01, 4.2E−02; LOC107985980, 8.8E−01, 3.9E−02; GORASP1, 9.3E−01, 4.3E−02; |
| | LOC105373369, 9.7E−01, 3.8E−02; LOC107984256, 1.0E+00, 2.2E−02; LINC01314, 1.0E+00, 3.5E−02; MYOCD, 1.0E+00, 4.9E−02; SCIN, 1.1E+00, |
| | 3.5E−03; MMP19, 1.1E+00, 4.6E−02; LOC101927354, 1.1E+00, 3.7E−02; DHRS9, 1.1E+00, 4.9E−02; TSEN34, 1.1E+00, 4.3E−02; GBP2, 1.1E+00, 1.8E−03; |
| | ENG, 1.3E+00, 3.5E−02; GPR78, 1.3E+00, 3.5E−02; LOC107984916, 1.4E+00, 4.6E−02; CBR3-AS1, 1.5E+00, 1.8E−03; CCR7, 1.6E+00, 2.5E−02; DRC3, |
| | 1.6E+00, 2.8E−03; LOC107986087, 1.6E+00, 5.3E−04; LOC105373347, 1.6E+00, 4.4E−03; CD96, 1.6E+00, 9.8E−04; MFAP5, 1.7E+00, 2.2E−02; SHC3, |
| | 1.8E+00, 2.2E−02; LOC107987295, 1.8E+00, 4.7E−03; PTPN5, 1.8E+00, 3.5E−02; FAP, 1.8E+00, 2.1E−04; PGF, 1.8E+00, 8.8E−03; SH3TC2, 1.8E+00, 3.8E−03; |
| | NBPF3, 1.8E+00, 4.1E−02; ANGPT4, 1.9E+00, 1.7E−02; LOC105377872, 1.9E+00, 2.9E−03; ELF5, 1.9E+00, 4.1E−02; CLIC3, 2.0E+00, 4.5E−04; KIFC3, |
| | 2.0E+00, 2.7E−02; FYB1, 2.0E+00, 1.3E−03; GCM1, 2.0E+00, 1.5E−03; TINAGL1, 2.1E+00, 1.2E−05; ERI2, 2.1E+00, 2.2E−02; PTPRE, 2.3E+00, 1.6E−02; |
| | GABRE, 2.3E+00, 3.1E−03; LOC105376942, 2.3E+00, 9.6E−03; SNAP91, 2.3E+00, 1.9E−03; CSF3R, 2.4E+00, 1.9E−04; DPF3, 2.4E+00, 2.8E−03; DGKA, |
| | 2.5E+00, 2.6E−04; LOC105376958, 2.5E+00, 4.4E−03; CGA, 2.6E+00, 2.6E−02; SPRR3, 2.7E+00, 1.8E−03; B3GNT5, 2.7E+00, 1.6E−03; SMPDL3A, 2.7E+00, |
| | 2.3E−03; GLDN, 2.7E+00, 4.1E−03; NR2F2-AS1, 2.8E+00, 3.7E−02; TENT5A, 2.8E+00, 4.6E−05; ACAD9, 2.8E+00, 2.7E−02; PMEL, 2.8E+00, 9.1E−03; |
| | HS3ST3B1, 2.9E+00, 4.3E−04; LOC646762, 2.9E+00, 6.5E−03; CREG1, 2.9E+00, 6.8E−03; ARAP2, 2.9E+00, 2.7E−02; SKAP2, 3.0E+00, 2.6E−02; C5orf17, |
| | 3.0E+00, 7.3E−06; ZBTB38, 3.0E+00, 7.5E−03; GUCY1A2, 3.0E+00, 4.3E−02; ANKMY2, 3.1E+00, 2.7E−02; SLC2A14, 3.1E+00, 5.2E−05; ACER2, 3.1E+00, |
| | 2.6E−02; TMEM200A, 3.1E+00, 1.7E−02; CDK2, 3.1E+00, 7.8E−03; GRHL3, 3.2E+00, 3.8E−02; CYP7B1, 3.2E+00, 3.6E−02; SLC16A6, 3.2E+00, 1.3E−04; |
| | LOC105377067, 3.3E+00, 9.2E−03; LINC01340, 3.3E+00, 4.1E−02; CHST3, 3.3E+00, 3.8E−03; MCTP2, 3.4E+00, 8.3E−03; LOC101927768, 3.4E+00, |
| | 1.6E−02; LOC105374689, 3.4E+00, 5.0E−04; CPEB4, 3.5E+00, 4.9E−02; LOC105374037, 3.5E+00, 8.0E−03; MALAT1, 3.5E+00, 2.2E−02; MGLL, 3.5E+00, 6.2E−06; |
| | MACIR, 3.5E+00, 2.7E−02; C2orf72, 3.5E+00, 1.5E−05; HOPX, 3.6E+00, 2.0E−07; GABBR2, 3.7E+00, 7.4E−07; LOC105377509, 3.7E+00, 3.5E−03; |
| | P2RY6, 3.7E+00, 4.2E−04; XCR1, 3.8E+00, 2.4E−04; PTN, 3.9E+00, 4.0E−02; ATP13A4, 3.9E+00, 1.9E−07; CDKN1C, 4.0E+00, 9.3E−04; ATP10B, 4.0E+00, |
| | 4.6E−05; SLC25A37, 4.0E+00, 1.6E−02; RIN3, 4.1E+00, 2.9E−03; RHOU, 4.1E+00, 5.3E−03; FLVCR2, 4.2E+00, 5.0E−04; PPARD, 4.4E+00, 2.6E−04; FHL2, |
| | 4.5E+00, 3.3E−05; NR2F2, 4.5E+00, 2.8E−03; KATNBL1, 4.6E+00, 4.1E−02; ARHGEF7, 4.6E+00, 4.3E−02; CLCN3, 4.6E+00, 3.7E−02; PLCXD3, 4.6E+00, |
| | 8.2E−10; IL1RAPL2, 4.7E+00, 6.6E−04; GRHL1, 4.7E+00, 1.8E−02; TACC1, 4.7E+00, 1.9E−02; CDC14B, 4.7E+00, 3.7E−02; TSPAN5, 4.8E+00, 3.0E−02; |
| | MB21D2, 4.8E+00, 4.1E−02; LOC101929528, 4.9E+00, 5.9E−10; LCP1, 4.9E+00, 3.1E−05; LAMA1, 4.9E+00, 3.1E−02; KRT23, 4.9E+00, 2.6E−07; SNX29, |
| | 4.9E+00, 6.1E−03; TRHDE, 4.9E+00, 5.8E−05; EVI5, 5.0E+00, 3.5E−02; ATP11B, 5.1E+00, 7.8E−03; MPRIP, 5.1E+00, 4.0E−02; ARL8B, 5.1E+00, 1.8E−03; |
| | RALBP1, 5.1E+00, 2.2E−02; NR3C2, 5.2E+00, 1.7E−02; B4GALT1, 5.2E+00, 2.6E−03; USP24, 5.3E+00, 4.4E−02; CRTC3, 5.3E+00, 1.9E−07; KLHL29, |
| | 5.3E+00, 2.7E−04; EGFR, 5.3E+00, 3.0E−02; ADCY10, 5.3E+00, 1.2E−05; ZBTB7C, 5.3E+00, 8.9E−08; SH3KBP1, 5.3E+00, 8.0E−03; LOC105370504, |
| | 5.4E+00, 4.1E−02; MYO9A, 5.4E+00, 3.0E−02; TNKS2, 5.6E+00, 3.5E−02; GLDC, 5.6E+00, 1.3E−02; RASA1, 5.6E+00, 5.4E−03; KHDRBS3, 5.6E+00, 2.5E−03; |
| | GAB1, 5.6E+00, 2.1E−02; AAK1, 5.6E+00, 3.5E−02; ST8SIA4, 5.6E+00, 1.8E−11; PSAP, 5.7E+00, 3.8E−02; MME, 5.7E+00, 1.3E−03; ARHGAP24, |
| | 5.7E+00, 8.0E−03; ACOX1, 5.8E+00, 4.6E−05; FHDC1, 5.8E+00, 5.2E−05; NEK7, 5.9E+00, 2.8E−03; WSB1, 5.9E+00, 3.0E−02; EPB41L4B, 5.9E+00, 5.9E−05; |
| | SHANK2, 6.0E+00, 4.3E−02; SLC39A8, 6.0E+00, 4.1E−05; BZW2, 6.0E+00, 1.2E−02; HOOK3, 6.1E+00, 4.4E−03; NABP1, 6.1E+00, 5.0E−06; FSTL1, |
| | 6.1E+00, 3.5E−02; REV3L, 6.1E+00, 1.2E−02; CD47, 6.1E+00, 3.0E−06; ST3GAL1, 6.2E+00, 7.3E−06; ANXA1, 6.2E+00, 1.2E−02; TRAPPC9, 6.2E+00, 6.5E−03; |
| | TNFRSF21, 6.2E+00, 2.2E−03; EPS8, 6.2E+00, 3.0E−04; PAPOLA, 6.3E+00, 3.6E−02; ERRFI1, 6.3E+00, 1.7E−03; MTNR1B, 6.3E+00, 2.3E−12; TMCC1, |
| | 6.3E+00, 1.4E−02; VAV3, 6.4E+00, 4.9E−05; ANK3, 6.5E+00, 8.1E−03; LOC101928635, 6.6E+00, 3.6E−08; CSGALNACT1, 6.6E+00, 3.3E−07; GATA3, |
| | 6.7E+00, 3.8E−07; TBC1D9, 6.7E+00, 1.4E−05; XYLT1, 6.7E+00, 2.5E−03; ENC1, 6.8E+00, 1.0E−07; NEBL, 6.8E+00, 8.0E−03; NAV2, 6.8E+00, 8.7E−03; |
| | RASAL2, 6.9E+00, 3.4E−03; CRYBG1, 6.9E+00, 1.9E−07; MYOF, 7.0E+00, 3.1E−05; WDR70, 7.1E+00, 2.6E−04; NRP1, 7.2E+00, 3.0E−08; SASH1, 7.4E+00, |
| | 2.3E−05; ARRB1, 7.4E+00, 1.2E−04; MBNL3, 7.4E+00, 3.0E−06; ELMO1, 7.4E+00, 1.7E−03; CLMP, 7.7E+00, 1.4E−05; MAN1A2, 7.8E+00, 6.1E−04; MBNL2, |
| | 7.8E+00, 2.8E−05; LOC105378334, 7.8E+00, 1.4E−07; S100A9, 7.9E+00, 2.1E−08; MAML2, 7.9E+00, 1.9E−04; CYP19A1, 8.3E+00, 1.3E−08; PIK3C2G, |
| | 8.4E+00, 5.8E−10; MUC15, 8.6E+00, 2.2E−09; ADGRL3, 8.6E+00, 2.6E−04; TANC2, 8.6E+00, 7.0E−05; LOC107986945, 8.7E+00, 1.3E−13; TMEM117, |
| | 8.8E+00, 1.8E−05; SLC7A2, 8.9E+00, 8.3E−05; RBM47, 9.0E+00, 5.6E−05; PEG10, 9.0E+00, 6.8E−04; SYNE2, 9.1E+00, 2.0E−05; THRB, 9.3E+00, 1.1E−05; |
| | LOC105374039, 9.4E+00, 1.8E−13; MAML3, 9.5E+00, 1.5E−04; STS, 9.5E+00, 7.0E−12; PPARG, 1.0E+01, 2.1E−13; ACSM1, 1.0E+01, 9.1E−18; EPAS1, |
| | 1.1E+01, 4.2E−11; PDE10A, 1.1E+01, 1.6E−09; WWC1, 1.1E+01, 8.2E−10; NEAT1, 1.1E+01, 2.0E−05; LINC00278, 1.2E+01, 7.8E−14; PRKCH, 1.4E+01, |
| | 4.6E−14; NHS, 1.4E+01, 1.1E−12; CCSER1, 1.9E+01, 2.0E−17 |
| 9-2 | UNC5C, 1.7E+01, 2.6E−02; COL5A2, 1.7E+01, 1.2E−02; CYP11A1, 1.6E+01, 2.9E−05; WNT8A, 1.1E+01, 8.9E−03; SPATA16, 8.1E+00, 1.2E−02 |
| 10 | FN1, −2.9E+00, 7.1E−08; CDH2, −2.5E+00, 2.4E−06; H2AZ1, −2.5E+00, 9.7E−06; HSP90B1, −2.5E+00, 1.8E−07; CD63, −2.2E+00, 9.1E−05; TOP2A, −2.2E+00, |
| | 2.7E−04; H3C2, −2.2E+00, 2.4E−03; HMGB2, −2.1E+00, 3.5E−04; CSRP2, −2.1E+00, 2.4E−06; H1-5, −2.0E+00, 3.8E−03; XRCC6, −2.0E+00, 1.1E−03; PEG10, |
| | −2.0E+00, 1.5E−04; ACTB, −2.0E+00, 5.8E−06; SMC4, −2.0E+00, 7.8E−04; FTL, −2.0E+00, 1.9E−03; SPARC, −1.9E+00, 3.2E−04; HSPA5, −1.9E+00, 5.2E−03; |
| | H4C3, −1.8E+00, 1.8E−02; YWHAQ, −1.8E+00, 7.5E−03; ATP5F1A, −1.8E+00, 5.3E−03; CENPF, −1.8E+00, 6.4E−03; CLIC1, −1.7E+00, 4.0E−04; STMN1, |
| | −1.7E+00, 2.4E−02; MYH10, −1.7E+00, 7.6E−03; EPB41L2, −1.7E+00, 8.7E−03; VCAN, −1.6E+00, 1.5E−02; DIAPH3, −1.6E+00, 1.7E−02; TMSB4X, −1.6E+00, |
| | 4.2E−02; GJA1, −1.6E+00, 2.4E−02; PODXL, −1.6E+00, 1.6E−02; SEPTIN11, −1.6E+00, 9.0E−03; DEK, −1.6E+00, 2.9E−02; EIF3J, −1.6E+00, 4.1E−03; SQLE, |
| | −1.6E+00, 1.3E−02; WDR43, −1.6E+00, 1.3E−02; PCNP, −1.5E+00, 1.3E−02; RPL12, −1.5E+00, 4.2E−02; NCL, −1.5E+00, 4.1E−03; COL4A1, −1.5E+00, 8.4E−03; |
| | HNRNPU, −1.5E+00, 1.8E−02; DPYSL2, −1.5E+00, 2.0E−02; CCNB1, −1.5E+00, 3.5E−02; LDHB, −1.5E+00, 4.7E−02; TUBA1A, −1.4E+00, 2.8E−03; NTS, |
| | −1.4E+00, 2.9E−06; RPS18, −1.4E+00, 4.3E−02; FADS1, −1.4E+00, 3.3E−02; NFE2L3, −1.4E+00, 4.5E−04; NNAT, −1.4E+00, 5.5E−03; HSPD1, −1.4E+00, 5.0E−02; |
| | PTMA, −1.4E+00, 3.8E−04; CYB5B, −1.3E+00, 2.8E−02; TPM2, −1.3E+00, 2.7E−02; CENPK, −1.3E+00, 1.6E−02; CKAP2, −1.3E+00, 4.3E−02; CTNNBL1, |
| | −1.2E+00, 4.3E−03; UBA2, −1.2E+00, 4.6E−02; CDCA2, −1.2E+00, 1.1E−02; H3C10, −1.2E+00, 3.7E−02; PPIB, −1.2E+00, 2.5E−02; HAUS1, −1.2E+00, 1.9E−02; |
| | RRM2, −1.2E+00, 3.8E−02; ANKRD1, −1.2E+00, 2.3E−03; PTTG1, −1.2E+00, 4.0E−02; BRCA1, −1.2E+00, 3.6E−02; VIM, −1.1E+00, 2.4E−02; HIRA, −1.1E+00, |
| | 1.9E−02; POLQ, −1.1E+00, 2.8E−02; DIPK1A, −1.1E+00, 7.0E−04; NIM1K, −1.1E+00, 4.8E−06; LOC105378008, −1.1E+00, 1.9E−08; H3C7, −1.1E+00, 2.3E−02; |
| | ELK3, −1.1E+00, 1.5E−03; SNRPE, −1.1E+00, 4.9E−02; MTCH1, −1.1E+00, 1.0E−02; TGFBI, −1.1E+00, 1.4E−02; PTP4A1, −1.1E+00, 5.0E−02; TNFRSF10B, |
| | −1.1E+00, 3.1E−03; EEF1A1, −1.1E+00, 2.4E−02; LYN, −1.1E+00, 1.1E−02; PMAIP1, −1.0E+00, 4.3E−02; CCDC141, −1.0E+00, 1.5E−03; COL1A1, −9.7E−01, |
| | 3.2E−02; ELP1, −9.5E−01, 1.8E−02; MRS2, −9.4E−01, 3.2E−02; LINC01504, −8.7E−01, 2.4E−06; COL2A1, −8.6E−01, 2.0E−02; RHOBTB3, −8.6E−01, 4.7E−02; |
| | BICC1, −8.6E−01, 8.8E−04; LOC102723704, −8.5E−01, 1.9E−04; COL5A2, −8.4E−01, 2.3E−02; EML6, −8.2E−01, 1.2E−03; MRPS17, −8.2E−01, 2.0E−02; ABCF2, |
| | −8.2E−01, 1.9E−02; GALM, −8.0E−01, 4.6E−02; KCNQ5, −7.9E−01, 1.9E−03; ZBTB2, −7.8E−01, 1.8E−02; ZEB2, −7.7E−01, 3.4E−02; POLG2, −7.7E−01, 1.4E−02; |
| | FBN1, −7.1E−01, 1.6E−02; ZEB1, −7.1E−01, 2.6E−02; FRMD3, −7.0E−01, 1.3E−02; DNAH12, −7.0E−01, 3.8E−05; CPM, −6.9E−01, 1.1E−03; PCDH17, −6.8E−01, |
| | 2.5E−03; CMYA5, −6.8E−01, 4.0E−03; SCD5, −6.7E−01, 1.2E−02; SNX31, −6.6E−01, 3.7E−05; CPQ, −6.2E−01, 1.4E−02; LGR5, −6.2E−01, 1.9E−03; TFPI, |
| | −6.1E−01, 4.0E−03; MSH4, −5.4E−01, 4.9E−03; FREM3, −5.2E−01, 2.4E−04; SYTL3, −5.1E−01, 2.2E−02; LOC105370575, −5.1E−01, 6.0E−03; ADCY10, −5.0E−01, 4.5E−03; |
| | LOC105369873, −5.0E−01, 2.5E−04; MAP3K19, −4.9E−01, 2.2E−03; NKD1, −4.7E−01, 3.8E−02; COLEC12, −4.7E−01, 4.7E−02; OVOS2, −4.5E−01, 1.0E−03; |
| | ADAM32, −4.5E−01, 1.4E−02; KLB, −4.4E−01, 8.8E−03; C8orf89, −4.2E−01, 2.3E−02; LOC105378316, −4.1E−01, 7.8E−04; LOC101928012, −4.1E−01, 6.0E−03; |
| | KIAA0319, −3.9E−01, 2.3E−02; LOC105377901, −3.9E−01, 3.7E−02; LOC101927156, −3.9E−01, 3.1E−02; ARHGEF6, −3.7E−01, 2.6E−02; RPS10−NUDT3, |
| | −3.7E−01, 4.1E−02; LINC01507, −3.5E−01, 1.2E−02; POF1B, −3.4E−01, 2.7E−02; ITGAM, −3.4E−01, 2.5E−02; LOC101929505, −3.3E−01, 1.3E−02; DAPP1, |
| | −3.3E−01, 2.7E−02; MILR1, −3.2E−01, 1.0E−02; APLNR, −3.1E−01, 3.6E−02; IMPG1, −2.7E−01, 3.3E−02; TMEM236, −2.7E−01, 4.2E−02; MRC1, −2.7E−01, 4.4E−02; |
| | CYP2C18, −2.6E−01, 2.2E−02; LINC01344, −2.5E−01, 4.0E−02; HSPE1-MOB4, −2.4E−01, 3.3E−02; LOC105378644, −2.4E−01, 2.7E−02; CARMN, −2.2E−01, |
| | 4.1E−02; LOC105377616, 8.0E−02, 1.9E−02; LOC105374257, 1.1E−01, 2.2E−02; TCTE1, 1.2E−01, 4.7E−02; LOC107987064, 1.4E−01, 4.3E−02; DIO30S, |
| | 1.4E−01, 3.1E−02; LOC107984311, 1.4E−01, 1.3E−02; LOC105369880, 1.5E−01, 4.3E−02; LOC105370844, 1.6E−01, 4.8E−02; RAD51AP2, 1.7E−01, 3.9E−02; |
| | LINC00282, 1.8E−01, 4.2E−02; FGF12-AS3, 1.8E−01, 2.8E−02; LOC100996573, 1.8E−01, 2.8E−02; LOC107984429, 1.9E−01, 8.4E−03; LINC01349, 2.3E−01, |
| | 4.0E−02; LOC101929805, 2.3E−01, 3.2E−02; LINC00333, 2.4E−01, 2.0E−02; LOC105379102, 2.5E−01, 4.6E−02; LOC105377030, 2.6E−01, 2.7E−02; |
| | LOC107986755, 2.7E−01, 2.2E−03; NKPD1, 2.7E−01, 2.5E−04; LOC101927366, 2.8E−01, 4.1E−04; SMN2, 2.9E−01, 2.0E−02; LOC105373813, 2.9E−01, 2.3E−04; |
| | METRNL, 3.0E−01, 4.2E−02; LOC105373716, 3.0E−01, 1.6E−02; ALDH1L1, 3.3E−01, 3.1E−02; LOC102723370, 3.3E−01, 2.0E−02; LOC107986961, 3.4E−01, |
| | 2.6E−02; LOC105375626, 3.4E−01, 4.9E−02; SLC1A2, 3.5E−01, 8.4E−03; LOC105378787, 3.5E−01, 7.2E−03; KIF6, 3.7E−01, 2.4E−02; LOC105378786, |
| | 3.7E−01, 4.6E−03; MEOX1, 3.7E−01, 2.0E−03; GSTM3, 3.8E−01, 3.1E−02; SPRR2F, 3.8E−01, 2.5E−02; LOC105377352, 3.8E−01, 1.2E−02; MAFB, 3.8E−01, |
| | 2.5E−02; ELF5, 3.9E−01, 1.9E−02; LOC105369410, 4.0E−01, 7.0E−03; BRINP3, 4.2E−01, 3.0E−03; LOC642366, 4.2E−01, 3.0E−02; CFAP299, 4.2E−01, |
| | 1.5E−02; PLEKHM1P1, 4.4E−01, 1.4E−02; LOC105372323, 4.4E−01, 5.3E−03; LOC105378789, 4.5E−01, 2.0E−04; LOC107986813, 4.5E−01, 2.1E−02; ITGA9-AS1, |
| | 4.5E−01, 4.2E−02; ONECUT1, 4.6E−01, 8.4E−03; LOC107983981, 4.6E−01, 4.5E−03; LOC107986674, 4.7E−01, 5.3E−03; LOC105374057, 4.7E−01, 3.3E−02; |
| | CCDC191, 4.8E−01, 2.5E−02; LAMA4, 4.9E−01, 6.6E−03; LOC101929077, 5.0E−01, 8.4E−03; LOC107985967, 5.1E−01, 3.3E−02; XDH, 5.1E−01, 1.7E−02; |
| | FSHR, 5.1E−01, 3.9E−03; ZBTB7C, 5.1E−01, 2.7E−02; USH1C, 5.2E−01, 7.5E−03; RTN4RL1, 5.3E−01, 9.5E−04; LOC105377512, 5.6E−01, 6.2E−05; DCLK2, |
| | 5.6E−01, 4.1E−02; ARHGEF26-AS1, 5.6E−01, 1.9E−03; ZMAT1, 5.7E−01, 2.5E−02; NOX4, 5.8E−01, 3.3E−02; LOC101927745, 5.8E−01, 2.1E−04; SPAM1, 5.8E−01, |
| | 3.0E−04; TAC3, 5.8E−01, 2.7E−02; FRK, 5.9E−01, 2.9E−02; LOC105377338, 5.9E−01, 1.0E−03; LOC105370737, 5.9E−01, 1.6E−02; AHSA2P, 6.0E−01, |
| | 4.2E−02; LOC105374505, 6.1E−01, 2.1E−03; DSCAML1, 6.2E−01, 1.6E−03; LOC105370731, 6.4E−01, 2.2E−02; LOC100506885, 6.4E−01, 3.3E−02; PTK2B, |
| | 6.4E−01, 3.7E−02; ERP27, 6.5E−01, 2.1E−02; TXLNB, 6.6E−01, 3.0E−02; XCR1, 6.6E−01, 1.8E−04; LOC105377067, 6.7E−01, 1.2E−05; FTCDNL1, 6.7E−01, |
| | 1.0E−07; MEIS1, 6.8E−01, 1.7E−02; ATP13A4, 6.8E−01, 5.3E−05; ACKR2, 6.9E−01, 3.0E−04; TRIM38, 7.0E−01, 5.7E−03; ZNF552, 7.2E−01, 5.3E−03; |
| | LOC102724687, 7.2E−01, 2.2E−02; SUSD4, 7.3E−01, 7.5E−04; STAC, 7.3E−01, 4.8E−02; CCDC80, 7.3E−01, 4.5E−02; CATSPERG, 7.4E−01, 2.7E−02; MID2, |
| | 7.4E−01, 4.6E−06; PROS1, 7.5E−01, 4.1E−02; RNF180, 7.5E−01, 4.5E−02; LOC100507487, 7.6E−01, 2.6E−03; LOC105747689, 7.7E−01, 7.3E−04; SETD7, |
| | 7.7E−01, 2.6E−03; GPR157, 7.8E−01, 7.4E−08; FAM83B, 7.8E−01, 3.8E−02; PCED1B, 7.9E−01, 1.4E−02; SLCO4C1, 7.9E−01, 3.0E−04; TMPRSS11D, 8.0E−01, |
| | 4.0E−03; LOC105379049, 8.0E−01, 5.3E−03; KIAA0513, 8.0E−01, 2.5E−03; LOC107985779, 8.1E−01, 5.2E−07; LMX1B, 8.2E−01, 1.7E−03; RASGRP1, 8.4E−01, |
| | 7.3E−04; LINC00331, 8.4E−01, 1.7E−05; CYP1B1, 8.5E−01, 1.4E−02; MUC15, 8.6E−01, 9.7E−07; LOC105378531, 8.7E−01, 1.9E−02; ZFHX4, 8.8E−01, |
| | 3.9E−02; LOC105378308, 8.8E−01, 2.6E−03; SORCS2, 8.9E−01, 2.8E−02; EMX2OS, 9.0E−01, 1.9E−06; SYNPR, 9.0E−01, 1.2E−02; ARMCX5−GPRASP2, 9.0E−01, |
| | 8.0E−03; KCTD16, 9.2E−01, 5.3E−05; MYO5C, 9.2E−01, 4.0E−02; SLC35F4, 9.5E−01, 1.0E−03; VWC2L, 9.6E−01, 7.7E−04; LYST, 9.6E−01, 1.8E−05; |
| | DOCK10, 9.7E−01, 3.8E−02; LOC107985783, 9.8E−01, 7.8E−04; ARL4C, 9.8E−01, 7.1E−03; CLEC2D, 9.9E−01, 4.6E−03; RNF144A, 1.0E+00, 3.0E−02; NDST3, |
| | 1.0E+00, 1.8E−06; ZNF493, 1.0E+00, 4.3E−02; SHOC1, 1.0E+00, 2.8E−02; LOC101928278, 1.0E+00, 1.9E−04; MBD2, 1.0E+00, 1.8E−02; LINC00869, |
| | 1.0E+00, 4.1E−04; ARHGAP29, 1.0E+00, 5.6E−03; TCAIM, 1.1E+00, 1.5E−02; KCTD1, 1.1E+00, 2.5E−02; DNAH11, 1.1E+00, 5.0E−02; LOC105378785, |
| | 1.1E+00, 1.3E−09; GRHL3, 1.1E+00, 9.2E−06; SLC2A13, 1.1E+00, 1.4E−02; KLHL13, 1.1E+00, 1.8E−02; GCNT1, 1.1E+00, 4.7E−02; RAP2C-AS1, 1.1E+00, |
| | 7.2E−05; HOXD4, 1.1E+00, 1.4E−03; LOC100132057, 1.1E+00, 7.4E−05; MTM1, 1.1E+00, 9.2E−04; NR3C2, 1.1E+00, 9.0E−03; LPAR1, 1.1E+00, 2.6E−03; |
| | RNF149, 1.1E+00, 8.4E−03; USH2A, 1.1E+00, 9.3E−06; ACVR2A, 1.1E+00, 2.5E−02; TMCC3, 1.1E+00, 4.6E−03; ATP8B1, 1.1E+00, 1.3E−02; ANXA4, |
| | 1.1E+00, 1.1E−03; LDAH, 1.2E+00, 2.3E−02; PLEKHG1, 1.2E+00, 3.8E−03; SPOCK1, 1.2E+00, 7.2E−03; ZNF804A, 1.2E+00, 3.3E−03; HIVEP2, 1.2E+00, |
| | 2.2E−02; PTCHD4, 1.2E+00, 1.9E−02; CPNE3, 1.2E+00, 6.8E−03; LOC105379057, 1.2E+00, 6.4E−04; MECOM, 1.2E+00, 1.9E−03; IGSF3, 1.2E+00, 1.4E−02; |
| | LINC01356, 1.2E+00, 1.9E−04; ADAMTS6, 1.2E+00, 4.3E−02; FOXO3, 1.2E+00, 3.1E−02; ABCG2, 1.2E+00, 3.0E−02; PARK2, 1.2E+00, 6.5E−03; SNRPN, |
| | 1.2E+00, 6.0E−04; ZC3H12C, 1.2E+00, 1.4E−02; GCNT2, 1.3E+00, 1.9E−02; PRLR, 1.3E+00, 7.8E−04; LOC105369165, 1.3E+00, 7.1E−03; SYBU, 1.3E+00, |
| | 8.0E−06; HOOK3, 1.3E+00, 4.3E−02; GRHL1, 1.3E+00, 7.3E−08; LYPLAL1, 1.3E+00, 2.2E−02; SNX13, 1.3E+00, 2.8E−02; CHIC1, 1.3E+00, 6.0E−04; ARMC9, |
| | 1.3E+00, 1.5E−02; TRAPPC9, 1.3E+00, 2.5E−02; VWA8, 1.3E+00, 2.1E−02; DTNB, 1.3E+00, 2.5E−02; ASXL3, 1.3E+00, 1.2E−02; LYPD6B, 1.3E+00, 5.4E−03; |
| | PKP2, 1.3E+00, 1.7E−02; C20orf194, 1.3E+00, 1.6E−03; SUMF1, 1.3E+00, 2.8E−03; HOXD3, 1.3E+00, 4.1E−04; LOC102723638, 1.3E+00, 2.3E−12; |
| | TRANK1, 1.4E+00, 8.1E−04; ABRACL, 1.4E+00, 2.9E−02; FTO, 1.4E+00, 4.0E−02; SH3BGRL2, 1.4E+00, 1.4E−02; CNGB3, 1.4E+00, 3.9E−10; LINC00922, |
| | 1.4E+00, 8.6E−05; IKZF2, 1.4E+00, 4.1E−03; TPO, 1.4E+00, 1.4E−07; LTBP1, 1.4E+00, 2.8E−02; PIBF1, 1.4E+00, 9.9E−03; GPR137C, 1.4E+00, 6.3E−03; |
| | MBNL2, 1.4E+00, 5.5E−04; CBLB, 1.4E+00, 4.0E−02; FAM110B, 1.4E+00, 9.3E−05; LOC101928438, 1.4E+00, 8.1E−05; MCC, 1.4E+00, 2.2E−02; KLF8, |
| | 1.4E+00, 1.6E−02; DOCK1, 1.4E+00, 4.9E−02; FZD6, 1.5E+00, 1.2E−03; ARHGEF38, 1.5E+00, 1.7E−11; COL25A1, 1.5E+00, 3.1E−03; BACH1, 1.5E+00, |
| | 1.3E−02; MAGI3, 1.5E+00, 2.7E−02; MGA, 1.5E+00, 2.8E−02; IL1RAPL1, 1.5E+00, 1.8E−03; UGGT2, 1.5E+00, 2.5E−02; WSB1, 1.5E+00, 8.4E−03; KLF12, 1.5E+00, |
| | 3.3E−02; FLNB, 1.5E+00, 4.6E−02; LOC105377369, 1.5E+00, 1.9E−09; CRACD, 1.5E+00, 1.1E−03; CBR4, 1.5E+00, 3.6E−03; PATJ, 1.5E+00, 4.1E−02; |
| | ANKRD34B, 1.5E+00, 3.0E−08; RASSF3, 1.5E+00, 2.5E−03; TBC1D1, 1.5E+00, 9.7E−03; DPH6-AS1, 1.5E+00, 7.9E−08; BCAS3, 1.5E+00, 1.8E−02; KDM6A, |
| | 1.6E+00, 4.0E−02; GLRA2, 1.6E+00, 1.6E−08; MACROD2, 1.6E+00, 3.8E−03; AFAP1, 1.6E+00, 9.7E−04; ZFYVE16, 1.6E+00, 2.6E−03; SLC39A8, 1.6E+00, |
| | 1.3E−05; SLC16A1, 1.6E+00, 2.5E−02; TMTC1, 1.6E+00, 2.5E−03; EXOC6B, 1.6E+00, 2.4E−02; GLI3, 1.6E+00, 9.8E−03; MAN1A2, 1.7E+00, 2.6E−03; RERE, |
| | 1.7E+00, 9.1E−03; MED12L, 1.7E+00, 8.9E−04; ZNF423, 1.7E+00, 1.2E−02; TMEM132B, 1.7E+00, 1.1E−02; CNTN5, 1.7E+00, 2.6E−07; VPS13C, 1.7E+00, |
| | 1.1E−03; SH3GL2, 1.7E+00, 1.4E−04; NOTCH2, 1.7E+00, 1.0E−04; PCDH11X, 1.7E+00, 1.9E−02; TFAP2B, 1.7E+00, 1.3E−10; RIN2, 1.7E+00, 4.2E−08; |
| | SCHLAP1, 1.7E+00, 2.4E−05; ZNF385D, 1.7E+00, 1.3E−04; RUNX1T1, 1.7E+00, 7.8E−04; EGFEM1P, 1.7E+00, 5.2E−03; ESYT2, 1.7E+00, 1.4E−04; |
| | TMEM131, 1.7E+00, 2.2E−03; TMEM106B, 1.7E+00, 2.3E−05; KALRN, 1.7E+00, 2.6E−04; BCKDHB, 1.7E+00, 7.1E−03; FAM13A, 1.7E+00, 2.2E−02; LPP, |
| | 1.8E+00, 1.3E−02; LMX1A, 1.8E+00, 5.2E−09; WDSUB1, 1.8E+00, 2.6E−07; CNTNAP4, 1.8E+00, 2.9E−11; MAP2, 1.8E+00, 1.6E−03; UBE2E2, 1.8E+00, |
| | 8.4E−03; PARD3B, 1.8E+00, 4.9E−03; CDK19, 1.8E+00, 9.8E−04; STK3, 1.8E+00, 1.5E−03; NCKAP5, 1.8E+00, 7.7E−07; ZNF609, 1.9E+00, 1.6E−03; |
| | IMMP2L, 1.9E+00, 8.4E−03; MLLT3, 1.9E+00, 1.9E−02; LRRC4C, 1.9E+00, 2.9E−02; LOC729732, 1.9E+00, 2.1E−03; MAML3, 1.9E+00, 9.2E−04; ZZZ3, |
| | 1.9E+00, 2.5E−04; REPS1, 1.9E+00, 1.0E−04; C8orf34, 1.9E+00, 2.3E−08; FOCAD, 1.9E+00, 1.1E−03; PAPPA, 1.9E+00, 1.7E−08; GUCY1A1, 1.9E+00, 2.6E−13; |
| | TPD52L1, 1.9E+00, 1.2E−07; FREM2, 1.9E+00, 2.7E−05; ARID1B, 1.9E+00, 1.8E−03; EEA1, 1.9E+00, 5.2E−06; FZD3, 1.9E+00, 9.0E−05; MALAT1, |
| | 1.9E+00, 9.8E−17; STON2, 1.9E+00, 4.1E−05; GRHL2, 1.9E+00, 1.8E−04; GRIA3, 2.0E+00, 2.5E−10; FTX, 2.0E+00, 2.5E−04; PAX7, 2.0E+00, 5.0E−12; |
| | HMGA2, 2.0E+00, 2.7E−03; KMT2C, 2.0E+00, 1.6E−03; EXOC4, 2.0E+00, 9.7E−04; FER, 2.0E+00, 1.8E−04; WWOX, 2.0E+00, 5.6E−04; KCNJ3, 2.0E+00, |
| | 8.2E−10; MBD5, 2.1E+00, 5.9E−04; PTPN14, 2.1E+00, 1.7E−03; NEBL, 2.1E+00, 1.4E−04; LOC107986022, 2.1E+00, 2.1E−08; DST, 2.1E+00, 5.6E−05; |
| | HDAC8, 2.1E+00, 5.1E−06; ZBTB20, 2.1E+00, 3.0E−04; MSI2, 2.1E+00, 3.3E−04; SFMBT2, 2.1E+00, 4.3E−07; ELF1, 2.1E+00, 5.7E−06; SMYD3, 2.1E+00, |
| | 1.0E−03; STT3B, 2.1E+00, 1.7E−04; TTTY14, 2.1E+00, 8.2E−05; ESRP1, 2.2E+00, 2.3E−05; LINC01456, 2.2E+00, 7.9E−08; MID1, 2.2E+00, 2.0E−04; |
| | CCSER1, 2.2E+00, 2.0E−06; TANC1, 2.2E+00, 1.0E−05; NABP1, 2.2E+00, 1.4E−11; FBXL21P, 2.2E+00, 2.0E−17; TMEM108, 2.2E+00, 1.2E−06; PTPN13, |
| | 2.3E+00, 9.5E−05; PTPRK, 2.3E+00, 1.0E−04; NAALADL2, 2.3E+00, 4.9E−07; OLFM3, 2.3E+00, 8.2E−13; DNAJC15, 2.4E+00, 1.2E−07; PRKCH, 2.4E+00, |
| | 1.2E−15; LINC00673, 2.4E+00, 5.1E−08; NLGN1, 2.4E+00, 4.9E−04; C15orf41, 2.4E+00, 1.9E−07; LOC105379109, 2.4E+00, 3.1E−18; CDK13, 2.4E+00, |
| | 9.4E−06; BBS9, 2.4E+00, 2.8E−06; LOC100288798, 2.4E+00, 8.4E−09; ANK3, 2.4E+00, 1.0E−05; LOC101927182, 2.4E+00, 2.3E−18; NHS, 2.5E+00, 4.9E−07; |
| | LOC644919, 2.5E+00, 3.9E−06; PBX1, 2.5E+00, 3.7E−08; MAP3K20, 2.5E+00, 1.8E−13; ADGRL2, 2.5E+00, 5.2E−06; FHIT, 2.5E+00, 1.5E−07; |
| | ANKRD50, 2.5E+00, 2.8E−07; SGCD, 2.6E+00, 1.3E−20; MEIS2, 2.6E+00, 6.0E−12; PCDH11Y, 2.6E+00, 5.9E−09; TSHZ2, 2.6E+00, 5.6E−07; SEMA3C, |
| | 2.7E+00, 2.9E−13; OPHN1, 2.7E+00, 7.1E−11; UTRN, 2.7E+00, 1.4E−07; THRB, 2.7E+00, 4.6E−07; HS3ST3A1, 2.8E+00, 7.6E−13; LINC00278, 2.8E+00, |
| | 6.1E−25; MAPK10, 2.8E+00, 3.1E−10; SPAG16, 2.9E+00, 2.0E−11; RORA, 2.9E+00, 5.1E−07; CAST, 2.9E+00, 6.5E−10; NCOA7, 2.9E+00, 3.6E−16; CA10, |
| | 2.9E+00, 1.8E−12; CASC15, 3.0E+00, 9.4E−10; TMEFF2, 3.0E+00, 5.5E−20; TSPAN5, 3.1E+00, 3.2E−11; PKNOX2, 3.1E+00, 4.5E−13; FRAS1, 3.1E+00, 4.0E−10; |
| | CPNE8, 3.2E+00, 6.3E−12; ROBO2, 3.2E+00, 2.4E−06; SSBP2, 3.2E+00, 2.0E−09; CNTN4, 3.2E+00, 5.7E−09; ZC3H12B, 3.2E+00, 6.2E−10; KCNH7, |
| | 3.2E+00, 3.5E−17; ACSS3, 3.4E+00, 1.2E−15; PDE10A, 3.4E+00, 1.5E−11; EDIL3, 3.4E+00, 6.3E−12; THSD7A, 3.5E+00, 1.8E−12; VAV3, 3.5E+00, 3.0E−18; |
| | KIAA1217, 3.5E+00, 4.4E−13; PRSS23, 3.5E+00, 7.8E−19; PARP8, 3.6E+00, 3.5E−13; FREM1, 3.6E+00, 5.1E−12; SLC27A6, 3.7E+00, 5.1E−25; GREB1L, |
| | 3.7E+00, 1.3E−11; ASTN2, 3.7E+00, 1.3E−13; PTPRD, 3.7E+00, 4.5E−12; TANC2, 3.8E+00, 7.1E−17; PRKG1, 3.9E+00, 1.2E−12; NRXN3, 3.9E+00, 7.1E−11; |
| | DSP, 3.9E+00, 2.5E−13; CREB5, 3.9E+00, 1.2E−15; IL1RAPL2, 4.1E+00, 3.9E−18; PDE4D, 4.3E+00, 3.0E−13; DACH1, 4.3E+00, 3.8E−20; HAPLN1, 4.5E+00, |
| | 5.0E−21; ERBB4, 4.5E+00, 1.4E−18; LRRC7, 4.5E+00, 9.5E−28; ARL15, 4.6E+00, 4.4E−20; LOC284294, 4.7E+00, 1.6E−23; FBN2, 4.8E+00, 3.8E−18; |
| | ANKRD6, 5.1E+00, 2.3E−30; LOC107986324, 5.5E+00, 1.1E−33; ZNF385B, 5.7E+00, 6.7E−23; SORBS2, 5.8E+00, 2.3E−28; SLIT2, 6.4E+00, 2.3E−30; |
| | BMPER, 6.5E+00, 4.3E−51; MIR4300HG, 7.5E+00, 2.5E−65; LRP1B, 9.4E+00, 3.4E−62; HS6ST3, 1.1E+01, 2.2E−92 |
| 11-0 | LRRTM4, −2.0E+00, 1.4E−05; DSP, −2.0E+00, 6.4E−07; KRT18, −1.9E+00, 4.5E−08; TTN, −1.9E+00, 1.6E−03; LAMB1, −1.8E+00, 8.5E−07; CASC15, −1.8E+00, |
| | 4.2E−05; RBFOX1, −1.8E+00, 2.7E−04; ANK3, −1.7E+00, 1.2E−04; S100A10, −1.7E+00, 1.7E−06; KIAA1217, −1.6E+00, 1.6E−04; DST, −1.6E+00, 3.9E−04; |
| | SLC2A3, −1.6E+00, 3.8E−04; COL4A1, −1.5E+00, 3.8E−04; SPTBN1, −1.5E+00, 1.7E−03; HAS2, −1.4E+00, 1.5E−03; LOC339862, −1.4E+00, 5.1E−03; LAMA1, |
| | −1.4E+00, 9.1E−04; DLGAP1, −1.4E+00, 1.4E−03; SERPINE2, −1.4E+00, 3.0E−02; FAM184A, −1.4E+00, 3.7E−04; USO1, −1.4E+00, 3.0E−03; CHODL, −1.4E+00, |
| | 2.1E−04; NLGN4Y, −1.3E+00, 1.4E−02; CCDC141, −1.3E+00, 9.7E−03; RPS9, −1.3E+00, 7.4E−03; PATJ, −1.3E+00, 1.4E−02; KAZN, −1.3E+00, 1.6E−02; FRAS1, |
| | −1.3E+00, 1.5E−02; LOC107985961, −1.2E+00, 1.3E−04; NRCAM, −1.2E+00, 3.8E−04; CALM1, −1.2E+00, 2.8E−02; LOC105378798, −1.2E+00, 2.7E−07; |
| | ANXA2, −1.2E+00, 6.2E−03; RPS15, −1.2E+00, 2.8E−02; FGD6, −1.2E+00, 6.9E−03; FOXP1, −1.2E+00, 3.1E−02; FLNB, −1.2E+00, 1.6E−02; NSD1, −1.2E+00, |
| | 2.6E−02; SPARC, −1.2E+00, 8.6E−03; TET1, −1.2E+00, 4.2E−02; SERINC5, −1.2E+00, 2.6E−02; RBMS1, −1.2E+00, 4.5E−02; LOC100505817, −1.2E+00, 7.0E−05; |
| | VCAN, −1.2E+00, 1.8E−02; LOC107986777, −1.1E+00, 2.0E−02; ARHGAP42, −1.1E+00, 4.7E−02; PRICKLE2, −1.1E+00, 6.0E−03; LOC107986770, |
| | −1.1E+00, 2.3E−02; LOC728755, −1.1E+00, 3.1E−02; CADM2, −1.1E+00, 3.7E−02; DLGAP5, −1.1E+00, 2.8E−02; LOC105377901, −1.1E+00, 5.5E−05; PKP2, |
| | −1.1E+00, 1.7E−04; RBM47, −1.1E+00, 2.0E−02; ADGRA3, −1.1E+00, 4.6E−02; PRKCA, −1.0E+00, 3.4E−02; ZNF544, −1.0E+00, 4.1E−03; EPHA6, −1.0E+00, |
| | 1.0E−02; LOC107985962, −1.0E+00, 6.7E−03; DTWD2, −1.0E+00, 2.2E−03; KRT19, −1.0E+00, 1.4E−02; LOC107985037, −9.8E−01, 9.2E−03; RPS6, |
| | −9.8E−01, 1.7E−02; TPD52, −9.8E−01, 1.1E−02; MSN, −9.7E−01, 4.9E−02; LOC107985661, −9.6E−01, 3.4E−02; CD109, −9.6E−01, 3.4E−04; LOC102467213, |
| | −9.5E−01, 1.2E−02; RPL13A, −9.5E−01, 1.6E−02; ABHD12B, −9.4E−01, 2.3E−05; PCAT14, −9.0E−01, 1.7E−03; LAMA2, −8.8E−01, 4.4E−02; LRFN5, −8.6E−01, 1.3E−02; |
| | ITGB5, −8.4E−01, 4.6E−02; LOC105369876, −8.2E−01, 1.5E−02; IFITM1, −8.2E−01, 4.9E−02; LINC00428, −8.2E−01, 3.0E−02; LOC101928283, −8.1E−01, 7.2E−04; |
| | LINC00922, −8.1E−01, 3.1E−02; STOX2, −8.1E−01, 3.9E−03; TRMT9B, −8.1E−01, 1.4E−02; SLC2A1, −8.0E−01, 6.9E−04; OSBP, −8.0E−01, 2.6E−02; GRID2, |
| | −7.8E−01, 2.4E−04; CD177, −7.5E−01, 1.3E−03; ASAP3, −7.3E−01, 1.8E−02; SAMHD1, −7.2E−01, 3.1E−02; PPFIBP2, −7.2E−01, 3.5E−02; MRS2, −7.1E−01, 2.2E−02; |
| | ZNF611, −7.1E−01, 4.7E−02; BDNF-AS, −7.1E−01, 1.6E−02; COL6A3, −7.0E−01, 3.8E−02; ANXA1, −6.9E−01, 2.1E−03; LOC101927768, −6.9E−01, 2.8E−02; |
| | LYPD6B, −6.8E−01, 3.9E−03; SLC4A8, −6.8E−01, 1.8E−02; LINC00673, −6.8E−01, 6.7E−03; CPNE8, −6.7E−01, 3.4E−02; RHPN2, −6.7E−01, 2.9E−02; ZNF85, |
| | −6.6E−01, 4.0E−02; ATP6, −6.6E−01, 4.0E−02; LOC107987087, −6.6E−01, 2.2E−04; ST3GAL1, −6.5E−01, 1.7E−03; PCSK9, −6.5E−01, 2.8E−02; LINC00261, |
| | −6.5E−01, 2.2E−03; LOC105370826, −6.4E−01, 1.2E−03; AMOT, −6.3E−01, 3.5E−03; LCP1, −6.2E−01, 9.5E−03; ERRFI1, −6.1E−01, 4.1E−02; ANXA3, −6.1E−01, |
| | 1.0E−03; ASRGL1, −6.1E−01, 1.1E−02; MRPS7, −6.0E−01, 3.5E−02; LOC107985710, −6.0E−01, 3.1E−02; ND4, −5.9E−01, 7.4E−03; HPGD, −5.9E−01, 4.8E−03; |
| | CARD11, −5.8E−01, 1.1E−02; LAMC2, −5.8E−01, 1.1E−02; TEK, −5.6E−01, 4.0E−02; SYNPR, −5.6E−01, 3.2E−02; MFAP3L, −4.9E−01, 2.8E−02; WNT8A, |
| | −4.9E−01, 6.0E−03; F3, −4.7E−01, 2.5E−03; TBXT, −4.2E−01, 2.6E−02; LOC107984117, −4.2E−01, 2.3E−02; HNF4A, −4.1E−01, 1.5E−02; LOC107986620, −3.9E−01, |
| | 1.6E−02; LOC105372044, −3.4E−01, 2.1E−02; HBZ, 9.9E−02, 3.9E−02; LOC105372104, 1.1E−01, 3.2E−02; LRRC36, 1.2E−01, 3.4E−02; LOC102724055, |
| | 1.3E−01, 1.6E−02; LOC105377061, 1.4E−01, 2.3E−02; LOC286083, 1.6E−01, 3.6E−02; SFRP5, 1.7E−01, 7.2E−04; LOC105369463, 2.0E−01, 1.8E−02; |
| | LOC101927080, 2.1E−01, 1.7E−02; LTBP3, 2.2E−01, 4.1E−04; LOC107984120, 2.7E−01, 3.9E−02; STX11, 2.8E−01, 5.0E−03; TMEM186, 3.0E−01, 2.3E−03; |
| | LOC105371078, 3.0E−01, 3.4E−02; LOC105369464, 3.4E−01, 1.8E−04; JHY, 3.5E−01, 3.4E−03; HDC, 3.5E−01, 3.4E−04; FAM13C, 3.6E−01, 9.6E−03; |
| | LOC105379880, 3.7E−01, 1.9E−02; SLIT1, 4.0E−01, 1.4E−02; LINC00446, 4.0E−01, 2.0E−03; IFT22, 4.0E−01, 2.5E−02; ISG20, 4.1E−01, 4.4E−02; WNT9B, |
| | 4.2E−01, 2.6E−02; LOC105375138, 4.5E−01, 4.2E−02; LOC105369360, 4.7E−01, 4.9E−04; LOC105374464, 4.7E−01, 1.9E−03; PLG, 4.8E−01, 1.6E−03; |
| | LOC105374277, 5.0E−01, 2.5E−03; PLAGL1, 5.0E−01, 1.2E−02; LOC105375551, 5.0E−01, 3.5E−04; MAMLD1, 5.1E−01, 3.9E−03; LOC105374957, 5.2E−01, |
| | 2.8E−05; LOC107986134, 5.2E−01, 1.7E−03; SLC1A1, 5.3E−01, 4.4E−03; LOC107986178, 5.3E−01, 1.8E−04; GUCY1A1, 5.4E−01, 5.4E−03; LOC101926941, |
| | 5.6E−01, 4.1E−02; PI15, 5.7E−01, 1.9E−03; SLC4A10, 5.8E−01, 4.2E−05; KCNJ5, 6.0E−01, 1.7E−03; B3GAT2, 6.0E−01, 3.5E−05; LOC105372121, 6.0E−01, |
| | 1.5E−03; ADAM12, 6.0E−01, 4.1E−02; LOC105372763, 6.1E−01, 4.3E−06; SETD7, 6.2E−01, 3.8E−02; GABRB2, 6.2E−01, 3.1E−02; TBR1, 6.4E−01, 3.9E−06; |
| | ARHGAP20, 6.4E−01, 9.8E−07; LOC105373696, 6.5E−01, 4.1E−04; KIF24, 6.5E−01, 1.3E−03; WDR86, 6.6E−01, 1.8E−02; LOC101927359, 6.8E−01, 7.7E−04; |
| | AGPAT3, 6.8E−01, 2.8E−02; GATM, 6.9E−01, 5.9E−04; ACOX3, 6.9E−01, 3.2E−02; PCDH20, 6.9E−01, 2.7E−07; NAB1, 7.0E−01, 2.9E−02; LINC00907, 7.1E−01, |
| | 7.4E−03; LOC105374211, 7.2E−01, 1.3E−04; LOC105374276, 7.2E−01, 6.4E−08; TEX9, 7.2E−01, 4.6E−02; LINC01592, 7.2E−01, 2.8E−05; LOC105374145, |
| | 7.2E−01, 3.9E−06; FSTL5, 7.2E−01, 2.1E−03; TRG-AS1, 7.3E−01, 2.7E−03; NDST4, 7.3E−01, 1.9E−04; LOC105374312, 7.4E−01, 3.3E−03; CLDN11, 7.4E−01, |
| | 1.0E−04; EOGT, 7.4E−01, 1.2E−03; STK17A, 7.5E−01, 8.1E−04; EEFSEC, 7.6E−01, 4.6E−02; SYT9, 7.6E−01, 9.6E−05; FBN1, 7.7E−01, 1.9E−02; LOC102723471, |
| | 7.7E−01, 2.1E−04; DDR2, 7.7E−01, 2.7E−07; TSPAN12, 7.9E−01, 4.8E−03; LYST, 7.9E−01, 1.6E−04; EPS8, 8.0E−01, 7.9E−03; ANGPT1, 8.0E−01, 6.0E−03; |
| | COL24A1, 8.0E−01, 3.8E−06; BMPR1B, 8.1E−01, 1.4E−02; HIVEP2, 8.3E−01, 4.9E−02; GNG12-AS1, 8.3E−01, 3.7E−04; TRPC3, 8.4E−01, 1.3E−06; CSMD3, |
| | 8.6E−01, 3.7E−03; ST8SIA1, 8.7E−01, 3.9E−04; FAM189A2, 8.8E−01, 2.2E−04; NR5A2, 8.9E−01, 1.9E−07; TPK1, 8.9E−01, 1.9E−02; HDAC9, 9.1E−01, 4.6E−02; |
| | LOC105374189, 9.1E−01, 2.8E−05; DSEL, 9.2E−01, 2.4E−04; DGKB, 9.4E−01, 3.8E−02; MIR4500HG, 9.6E−01, 1.3E−07; DKK1, 9.6E−01, 3.3E−06; |
| | TGFBR3, 9.8E−01, 9.4E−03; DENND1B, 1.0E+00, 6.0E−03; LINC00113, 1.0E+00, 3.2E−08; CFLAR, 1.0E+00, 1.5E−03; LOC101927708, 1.0E+00, 3.9E−03; |
| | LRRCC1, 1.0E+00, 2.5E−04; ATAD2, 1.0E+00, 3.6E−02; FGF10, 1.0E+00, 2.1E−08; TENM2, 1.1E+00, 6.9E−03; LOC105370507, 1.1E+00, 8.8E−08; SDK2, |
| | 1.1E+00, 3.0E−02; VAV3, 1.1E+00, 9.4E−03; SMAD6, 1.1E+00, 6.6E−03; AEN, 1.1E+00, 2.3E−04; ST6GALNAC5, 1.1E+00, 9.2E−03; GLIS3, 1.1E+00, 3.8E−05; |
| | LOC105369250, 1.1E+00, 1.2E−03; ACVR2A, 1.1E+00, 2.0E−03; LOC105370610, 1.1E+00, 1.9E−03; KCNH7, 1.1E+00, 2.6E−06; CHL1, 1.1E+00, 2.7E−09; |
| | CLMP, 1.1E+00, 5.8E−04; CHST9, 1.1E+00, 2.9E−02; LINC00458, 1.1E+00, 1.1E−02; SLC9A9, 1.1E+00, 3.2E−04; CAP2, 1.1E+00, 1.3E−03; |
| | LOC107986100, 1.2E+00, 3.2E−04; SACM1L, 1.2E+00, 3.3E−03; KIF5C, 1.2E+00, 1.8E−02; PREX1, 1.2E+00, 1.2E−04; NBEA, 1.2E+00, 3.5E−02; FMN2, |
| | 1.2E+00, 3.4E−04; COL13A1, 1.2E+00, 8.8E−04; EFNA5, 1.2E+00, 4.8E−02; NTN1, 1.2E+00, 1.3E−03; NSD2, 1.2E+00, 1.9E−02; BMPER, 1.2E+00, 5.0E−02; |
| | MDK, 1.2E+00, 3.5E−02; DOK6, 1.2E+00, 1.2E−03; PTPRM, 1.3E+00, 2.3E−02; COL2A1, 1.3E+00, 3.2E−06; FLRT2, 1.3E+00, 6.3E−03; HEG1, 1.3E+00, 2.7E−04; |
| | PKM, 1.3E+00, 3.6E−02; AUTS2, 1.3E+00, 1.5E−03; ST6GALNAC3, 1.3E+00, 2.9E−02; COL6A4P2, 1.3E+00, 6.1E−12; SULF1, 1.3E+00, 2.2E−06; ERICH1- |
| | AS1, 1.3E+00, 6.6E−05; LOC107986021, 1.3E+00, 1.2E−04; LRIG3, 1.3E+00, 3.4E−03; NCAM1, 1.3E+00, 1.1E−04; LOC105379219, 1.3E+00, 4.4E−03; |
| | LARGE, 1.3E+00, 1.2E−02; JAKMIP1, 1.3E+00, 3.0E−07; SAMD5, 1.3E+00, 8.7E−06; DGKI, 1.4E+00, 3.9E−06; GPC6, 1.4E+00, 2.6E−02; NKAIN3, 1.4E+00, |
| | 6.1E−04; COBLL1, 1.4E+00, 1.0E−04; PARD3B, 1.4E+00, 5.2E−03; TMTC1, 1.4E+00, 4.4E−03; THSD7A, 1.4E+00, 4.9E−04; HCN1, 1.4E+00, 6.8E−04; |
| | MAPK10, 1.4E+00, 6.0E−03; MEIS2, 1.4E+00, 9.8E−06; RBM20, 1.4E+00, 2.1E−07; SYNDIG1, 1.5E+00, 5.3E−04; DET1, 1.5E+00, 2.8E−09; NRG3, 1.5E+00, |
| | 7.6E−03; KCNJ3, 1.5E+00, 3.2E−06; SLIT2, 1.5E+00, 2.0E−02; LOC401478, 1.5E+00, 1.3E−14; RN7SK, 1.5E+00, 8.1E−03; LOC101928217, 1.5E+00, 3.8E−05; |
| | LDLRAD4, 1.5E+00, 1.8E−05; CNTN4, 1.5E+00, 1.4E−04; TMEM232, 1.5E+00, 1.5E−05; ITGB1, 1.5E+00, 4.2E−04; DNAJC24, 1.5E+00, 1.6E−06; TAFA2, |
| | 1.5E+00, 5.8E−08; PLSCR1, 1.5E+00, 2.3E−07; RASGRP1, 1.6E+00, 4.4E−10; GPC5, 1.6E+00, 7.8E−10; MCF2L2, 1.6E+00, 2.8E−05; ITPR1, 1.6E+00, |
| | 1.5E−08; CCSER1, 1.6E+00, 2.0E−06; ARHGAP40, 1.6E+00, 6.1E−18; LOC101927056, 1.6E+00, 1.9E−08; CACNA2D1, 1.6E+00, 8.0E−04; LRP1B, 1.6E+00, 4.6E−07; |
| | C1GALT1, 1.6E+00, 8.5E−05; DIAPH2, 1.6E+00, 1.9E−04; PDGFD, 1.7E+00, 2.6E−08; THSD7B, 1.7E+00, 5.1E−13; ADCY2, 1.7E+00, 8.5E−04; |
| | LINC01586, 1.7E+00, 1.8E−17; PTPRD, 1.7E+00, 1.0E−04; LDB2, 1.7E+00, 2.7E−04; EPB41L3, 1.8E+00, 2.0E−08; PLSCR2, 1.8E+00, 6.5E−18; NTN4, |
| | 1.8E+00, 1.6E−08; LOC105369715, 1.8E+00, 1.9E−18; LHX1, 1.8E+00, 1.8E−09; LOC107986324, 1.9E+00, 3.2E−11; ZNF521, 1.9E+00, 6.1E−06; NEO1, |
| | 1.9E+00, 6.9E−06; RNF219-AS1, 1.9E+00, 5.7E−11; TNIK, 1.9E+00, 4.6E−07; PALLD, 2.0E+00, 8.5E−07; HS3ST3A1, 2.0E+00, 3.3E−07; HTR1E, 2.0E+00, |
| | 4.7E−19; VWC2L, 2.0E+00, 2.2E−07; NCOA1, 2.0E+00, 9.0E−08; TENM4, 2.1E+00, 3.0E−06; FAT4, 2.1E+00, 3.5E−11; TMTC2, 2.1E+00, 8.8E−06; PRTG, |
| | 2.1E+00, 3.1E−06; ANK2, 2.2E+00, 2.8E−12; PCDH10, 2.2E+00, 1.6E−10; SLC8A1, 2.3E+00, 4.6E−18; LOC101927973, 2.3E+00, 8.8E−15; COL5A2, 2.3E+00, |
| | 1.5E−07; SLC5A4, 2.4E+00, 2.1E−15; P3H2, 2.4E+00, 8.8E−08; CNTNAP2, 2.4E+00, 1.3E−09; LOC100506990, 2.5E+00, 2.4E−11; CHST11, 2.6E+00, 3.6E−12; |
| | FBN2, 2.6E+00, 6.3E−09; CDH18, 2.7E+00, 7.2E−18; KCNQ5, 2.7E+00, 7.5E−17; DACH1, 2.8E+00, 2.3E−16; PCDH7, 2.8E+00, 3.6E−13; LOC107985819, |
| | 2.8E+00, 4.0E−27; WLS, 2.8E+00, 2.2E−16; PLCB1, 2.8E+00, 1.3E−12; LOC729732, 2.8E+00, 5.3E−13; CCND2, 2.9E+00, 1.0E−13; SPAG16, 3.0E+00, 6.5E−11; |
| | TRABD2B, 3.0E+00, 9.1E−17; CNTNAP5, 3.0E+00, 2.4E−22; RELN, 3.1E+00, 1.2E−33; LOC284825, 3.1E+00, 9.6E−20; PRKD1, 3.2E+00, 1.7E−17; SOX5, |
| | 3.2E+00, 5.1E−15; ERBB4, 3.2E+00, 3.1E−13; ALPK2, 3.3E+00, 1.3E−18; LOC102724210, 3.3E+00, 1.7E−14; SHISA6, 3.3E+00, 1.7E−17; SAMD3, 3.3E+00, |
| | 1.9E−21; PLSCR4, 3.3E+00, 2.5E−32; DYNC111, 3.7E+00, 9.4E−32; ADAMTS3, 3.7E+00, 2.6E−29; RHOBTB3, 3.8E+00, 3.2E−29; ESRRG, 3.9E+00, 6.0E−24; |
| | DCC, 4.0E+00, 1.1E−28; GRIK2, 4.3E+00, 6.8E−36; ZFPM2, 4.3E+00, 4.9E−39; EPHA3, 4.5E+00, 3.2E−45; LOC105370302, 5.2E+00, 3.5E−48; DSCAM, |
| | 5.3E+00, 7.6E−44; LOC102724419, 6.5E+00, 2.5E−48 |
| 11-1 | LOC105373347, 1.4E+00, 6.6E−03; LOC107986980, 1.6E+00, 1.9E−02; HSPA12A, 1.7E+00, 1.3E−02; LOC107986324, 1.7E+00, 4.7E−02; LOC105377861, |
| | 1.7E+00, 3.6E−02; HMX1, 1.7E+00, 6.6E−03; LOC284825, 1.8E+00, 2.4E−02; LOC102724542, 1.8E+00, 1.5E−03; FAM110B, 1.8E+00, 3.1E−02; CYP11A1, |
| | 1.8E+00, 3.1E−02; LOC105374029, 1.9E+00, 8.4E−03; LOC105374474, 1.9E+00, 4.5E−04; KCNJ3, 2.0E+00, 6.6E−03; MRC2, 2.1E+00, 1.4E−02; |
| | LINC00458, 2.1E+00, 4.8E−02; LOC107986602, 2.1E+00, 3.1E−02; LOC101929534, 2.2E+00, 2.9E−04; ST6GALNAC5, 2.2E+00, 2.7E−02; FYN, 2.2E+00, |
| | 3.5E−02; PGM5P2, 2.3E+00, 4.9E−03; TMEM232, 2.3E+00, 6.6E−03; LOC101927973, 2.4E+00, 1.4E−04; KIAA1109, 2.4E+00, 6.6E−03; USH2A, 2.5E+00, |
| | 1.2E−04; LOC105377860, 2.5E+00, 1.4E−02; CDH4, 2.6E+00, 4.2E−02; PLCL1, 2.7E+00, 6.6E−03; DTWD2, 2.7E+00, 4.6E−03; PGM5, 2.7E+00, 7.3E−04; |
| | ZC3H12B, 2.7E+00, 4.1E−02; LOC105374220, 2.8E+00, 6.2E−11; LDB2, 2.8E+00, 2.3E−02; LHFP, 2.8E+00, 2.3E−02; LOC105369436, 2.9E+00, 3.8E−05; |
| | AFF3, 3.1E+00, 1.7E−03; SERPINE2, 3.1E+00, 4.9E−04; LOC730100, 3.3E+00, 3.7E−06; ADCY2, 3.7E+00, 1.3E−04; SPATA16, 3.7E+00, 6.2E−11; SSBP2, |
| | 3.8E+00, 1.1E−05; IL1RAPL1, 3.9E+00, 1.1E−05; NLGN1, 4.2E+00, 4.2E−06; LOC105369512, 4.4E+00, 4.1E−07; LOC107986021, 6.1E+00, 8.8E−13 |
| 12-0 | ESRG, −1.4E+00, 2.1E−02; HS3ST4, −1.2E+00, 3.2E−02; GRID2, −1.0E+00, 1.6E−03; IFITM1, −8.8E−01, 3.8E−02; PTMA, −8.3E−01, 4.9E−02; TMPRSS11E, |
| | −2.5E−01, 4.2E−02; EOMES, −2.4E−01, 1.1E−02; CABP1, −1.9E−01, 5.4E−03; ABCD1, 2.4E−01, 4.3E−02; ITGA10, 3.8E−01, 2.5E−02; FOSL1, 3.9E−01, 1.4E−02; |
| | LOC100507002, 4.1E−01, 3.5E−02; LOC105374596, 4.3E−01, 2.8E−03; LOC105374459, 4.3E−01, 2.9E−03; ZNF503, 4.5E−01, 2.1E−02; RBM24, 4.8E−01, |
| | 4.1E−03; LINC01487, 4.8E−01, 1.7E−03; OLFML2A, 4.9E−01, 3.6E−02; ATP2B2, 4.9E−01, 3.9E−02; RFTN1, 5.5E−01, 3.2E−02; MID2, 6.0E−01, 3.1E−03; |
| | HS3ST1, 6.0E−01, 1.9E−02; PNP, 6.1E−01, 6.0E−03; ARHGAP40, 6.2E−01, 1.4E−02; VWCE, 6.4E−01, 5.9E−03; EMP3, 6.7E−01, 9.4E−03; FKBP14, 6.7E−01, |
| | 3.6E−02; MALAT1, 6.7E−01, 2.0E−02; RGS9, 6.9E−01, 2.3E−02; LOC100506718, 7.0E−01, 6.7E−03; IER3, 7.1E−01, 1.0E−02; PPP1R14C, 7.2E−01, 4.5E−04; |
| | NDFIP2, 7.3E−01, 2.5E−02; FOXA1, 7.3E−01, 7.0E−04; RASA3, 7.5E−01, 2.3E−02; LINC01320, 7.5E−01, 6.5E−04; LOC100996643, 7.6E−01, 1.4E−02; RUSC2, |
| | 7.7E−01, 9.5E−03; NIBAN2, 7.7E−01, 4.4E−02; IMPAD1, 7.8E−01, 2.0E−02; NPFFR2, 7.8E−01, 3.0E−03; PLXND1, 7.9E−01, 6.9E−03; DCTN4, 7.9E−01, 3.6E−02; |
| | DENND3, 7.9E−01, 2.0E−03; TBXT, 8.0E−01, 3.6E−02; ACAN, 8.1E−01, 1.2E−04; OGFRL1, 8.1E−01, 2.7E−02; SRGAP2, 8.2E−01, 2.7E−02; MBNL2, 8.3E−01, |
| | 5.0E−02; PRSS23, 8.3E−01, 1.9E−02; ADAMTS17, 8.7E−01, 4.1E−02; KCTD20, 8.7E−01, 4.9E−02; UBA3, 8.7E−01, 3.0E−02; RHOJ, 8.8E−01, 2.7E−05; |
| | LZTS1, 8.8E−01, 2.1E−02; SNAPC3, 8.8E−01, 4.2E−02; RNF144B, 8.9E−01, 2.8E−03; DCC, 9.0E−01, 3.7E−02; LRATD2, 9.0E−01, 1.2E−02; ADCY8, 9.1E−01, |
| | 3.0E−02; MCAM, 9.1E−01, 1.5E−03; ASXL1, 9.2E−01, 1.8E−02; GALNT11, 9.3E−01, 2.7E−02; EFEMP1, 9.3E−01, 9.4E−03; CDH10, 9.3E−01, 4.3E−02; |
| | FAM114A1, 9.3E−01, 1.3E−02; GNG12, 9.4E−01, 1.8E−02; NOD1, 9.4E−01, 1.6E−03; PMP22, 9.4E−01, 4.9E−02; PPP1R3C, 9.7E−01, 1.2E−03; RBM20, 9.9E−01, |
| | 2.7E−02; BAZ1A, 1.0E+00, 3.6E−02; TMC03, 1.0E+00, 9.1E−03; LOC105374693, 1.0E+00, 1.2E−02; SLC20A1, 1.0E+00, 5.0E−02; NEK6, 1.0E+00, 9.5E−03; |
| | CPQ, 1.0E+00, 6.1E−04; KDELR2, 1.0E+00, 4.6E−02; CDC27, 1.0E+00, 4.1E−02; RNF19A, 1.0E+00, 4.7E−03; DDR2, 1.1E+00, 2.3E−04; SERPINE1, |
| | 1.1E+00, 7.6E−05; ACTB, 1.1E+00, 1.4E−02; ENTPD4, 1.1E+00, 1.7E−02; LOC105373997, 1.1E+00, 1.3E−02; CEP112, 1.1E+00, 1.1E−02; KCTD16, |
| | 1.1E+00, 2.3E−03; THBS1, 1.1E+00, 2.1E−02; CDH13, 1.1E+00, 1.0E−02; NOX4, 1.1E+00, 2.2E−05; NFIA, 1.1E+00, 3.7E−03; FLNC, 1.1E+00, 3.7E−03; |
| | SMURF2, 1.1E+00, 9.6E−03; ATP6V1B2, 1.1E+00, 2.4E−03; PPA1, 1.1E+00, 1.5E−02; RFTN2, 1.1E+00, 1.1E−02; NRP2, 1.1E+00, 1.6E−02; PAPSS1, |
| | 1.1E+00, 2.8E−02; BIRC2, 1.1E+00, 1.1E−03; MSRB3, 1.1E+00, 1.3E−04; DLC1, 1.1E+00, 1.1E−03; ELK3, 1.1E+00, 5.3E−03; DUSP6, 1.1E+00, 4.4E−03; |
| | FRMD6, 1.2E+00, 1.6E−03; GLIS3, 1.2E+00, 7.9E−03; EPSTI1, 1.2E+00, 1.1E−04; DLG5, 1.2E+00, 2.6E−02; TMEM178A, 1.2E+00, 6.2E−05; IGFBP7, |
| | 1.2E+00, 1.6E−04; SESTD1, 1.2E+00, 1.3E−02; DENND5A, 1.2E+00, 8.0E−03; HOOK3, 1.2E+00, 2.6E−02; PPM1H, 1.2E+00, 3.5E−02; ADAMTS6, 1.2E+00, |
| | 3.6E−02; LINC00673, 1.2E+00, 3.4E−03; SSH2, 1.2E+00, 1.9E−02; RARS1, 1.2E+00, 3.4E−02; MIR99AHG, 1.2E+00, 7.9E−03; CAPZA2, 1.2E+00, 1.1E−02; |
| | TRIM44, 1.2E+00, 7.9E−03; LOC284825, 1.2E+00, 1.5E−02; ABCG2, 1.2E+00, 7.9E−03; CA3, 1.2E+00, 2.3E−03; SSH1, 1.2E+00, 9.5E−04; AKAP11, 1.2E+00, |
| | 1.2E−02; KLF7, 1.3E+00, 3.6E−03; PLOD2, 1.3E+00, 2.4E−03; COL8A1, 1.3E+00, 1.0E−03; CYP11A1, 1.3E+00, 2.3E−03; SERTAD2, 1.3E+00, 8.1E−05; |
| | EPHB1, 1.3E+00, 2.3E−03; PSME4, 1.3E+00, 2.3E−02; FAM135B, 1.3E+00, 1.2E−03; SDC2, 1.3E+00, 4.2E−02; EIF2S1, 1.3E+00, 1.3E−03; GAS6, 1.3E+00, |
| | 2.2E−04; FDPS, 1.3E+00, 1.2E−02; EFR3A, 1.3E+00, 1.4E−02; RBMS2, 1.3E+00, 2.8E−04; COPG2, 1.3E+00, 2.6E−02; RNF219-AS1, 1.3E+00, 4.5E−04; |
| | LRMDA, 1.3E+00, 1.1E−03; LOC101927973, 1.3E+00, 4.7E−04; PCNX4, 1.3E+00, 1.4E−02; SPATA16, 1.3E+00, 2.3E−02; CCSER2, 1.3E+00, 1.1E−02; SENP6, |
| | 1.3E+00, 3.4E−02; EGF, 1.3E+00, 8.8E−04; PPFIA1, 1.4E+00, 7.6E−03; SOX9, 1.4E+00, 3.2E−05; CUL1, 1.4E+00, 3.8E−03; MYL6, 1.4E+00, 4.2E−02; |
| | LOC105377860, 1.4E+00, 7.7E−03; TLN1, 1.4E+00, 2.5E−03; DSTN, 1.4E+00, 2.7E−02; FTO, 1.4E+00, 6.0E−03; COPB2, 1.4E+00, 4.5E−03; VCL, 1.4E+00, |
| | 1.8E−02; PLXNA2, 1.4E+00, 8.3E−05; DICER1, 1.4E+00, 5.7E−03; AMOTL1, 1.4E+00, 2.7E−03; NFE2L2, 1.4E+00, 1.6E−05; KRT8, 1.5E+00, 7.1E−03; CAPN2, |
| | 1.5E+00, 2.4E−04; BCAT1, 1.5E+00, 9.5E−03; CDH11, 1.5E+00, 3.3E−03; PPFIBP1, 1.5E+00, 1.4E−03; LOXL2, 1.5E+00, 1.4E−05; TTC6, 1.5E+00, 9.9E−06; |
| | SEPTIN2, 1.5E+00, 9.1E−03; WWP2, 1.5E+00, 9.5E−05; PARVA, 1.6E+00, 1.9E−05; CDK6, 1.6E+00, 3.4E−03; ACSL3, 1.6E+00, 4.1E−03; NLGN4X, 1.6E+00, |
| | 1.8E−02; LIMCH1, 1.6E+00, 2.5E−03; GPC6, 1.6E+00, 1.7E−02; DNAJC15, 1.6E+00, 2.8E−06; GLIPR1, 1.6E+00, 4.1E−07; SPTAN1, 1.6E+00, 3.0E−03; |
| | ACTN4, 1.6E+00, 4.5E−03; COL4A1, 1.6E+00, 1.2E−03; MAP4, 1.6E+00, 4.1E−03; TRIO, 1.6E+00, 8.0E−03; DTNA, 1.6E+00, 4.0E−03; LRRFIP1, 1.6E+00, |
| | 3.8E−03; ZNF385B, 1.6E+00, 4.8E−04; SHROOM3, 1.6E+00, 6.5E−04; LDHA, 1.6E+00, 1.6E−03; SOX5, 1.6E+00, 1.1E−02; CCDC85A, 1.6E+00, 9.2E−07; |
| | PEG10, 1.6E+00, 6.1E−03; AP2B1, 1.6E+00, 8.2E−04; MYL9, 1.7E+00, 1.1E−04; RHOBTB3, 1.7E+00, 1.2E−06; TMEM232, 1.7E+00, 2.4E−04; MALT1, |
| | 1.7E+00, 1.4E−04; ZNF385D, 1.7E+00, 7.5E−05; DPYSL2, 1.7E+00, 2.0E−03; LIMS1, 1.7E+00, 6.5E−04; BACH2, 1.7E+00, 1.3E−05; SEMA3C, 1.7E+00, 9.2E−05; |
| | SOX6, 1.7E+00, 2.0E−06; DST, 1.7E+00, 2.8E−04; SPATS2L, 1.7E+00, 1.5E−03; TENM2, 1.7E+00, 5.6E−04; ARID3B, 1.8E+00, 8.3E−05; LOC102724210, |
| | 1.8E+00, 2.3E−04; EPB41L2, 1.8E+00, 5.0E−04; CRIM1, 1.8E+00, 2.4E−04; ATRNL1, 1.8E+00, 2.7E−04; CCN2, 1.8E+00, 1.5E−04; FSTL5, 1.8E+00, 2.5E−07; |
| | TPM4, 1.8E+00, 6.9E−04; NES, 1.8E+00, 2.4E−04; LAMB1, 1.8E+00, 1.4E−04; PALLD, 1.8E+00, 3.0E−04; TGFBR3, 1.9E+00, 9.7E−06; SLC2A1, 1.9E+00, |
| | 5.3E−06; FSTL1, 1.9E+00, 2.6E−04; COLGALT2, 1.9E+00, 4.2E−07; LOC102724419, 1.9E+00, 7.0E−07; EXT1, 1.9E+00, 3.0E−03; ACTN1, 1.9E+00, 9.1E−05; |
| | NQ01, 1.9E+00, 1.1E−06; ADARB1, 1.9E+00, 4.2E−07; CAP2, 1.9E+00, 7.4E−06; TRAM2, 1.9E+00, 2.2E−08; ZSWIM6, 1.9E+00, 9.3E−05; RUNX2, 1.9E+00, |
| | 8.9E−09; RNF217, 1.9E+00, 2.7E−06; MIR4435-2HG, 2.0E+00, 8.1E−07; NEAT1, 2.0E+00, 6.8E−04; TNS3, 2.0E+00, 6.6E−05; KRT19, 2.0E+00, 2.7E−05; |
| | GNB4, 2.0E+00, 1.7E−05; LPP, 2.1E+00, 8.5E−06; APP, 2.1E+00, 2.9E−06; TNFRSF21, 2.1E+00, 4.7E−07; USH2A, 2.1E+00, 2.8E−08; CHRM2, 2.1E+00, 2.7E−11; |
| | WFDC3, 2.1E+00, 7.8E−09; ADAM19, 2.1E+00, 1.3E−07; LINC00458, 2.2E+00, 2.1E−04; GMPR, 2.2E+00, 5.0E−06; STXBP6, 2.2E+00, 4.7E−08; CAV1, |
| | 2.2E+00, 8.8E−11; CYR61, 2.2E+00, 7.8E−09; ST3GAL1, 2.2E+00, 2.0E−10; MAML3, 2.3E+00, 3.5E−05; CD109, 2.3E+00, 1.5E−09; MYO3A, 2.3E+00, 4.8E−08; |
| | ABLIM1, 2.3E+00, 1.9E−07; EDNRB, 2.3E+00, 2.1E−08; CALD1, 2.4E+00, 4.2E−08; AKT3, 2.4E+00, 6.7E−07; MYH9, 2.4E+00, 2.0E−07; SHH, 2.4E+00, |
| | 2.7E−11; COL5A2, 2.4E+00, 2.0E−06; NEK7, 2.4E+00, 5.1E−08; NET1, 2.4E+00, 1.6E−08; RBMS3, 2.5E+00, 7.1E−09; NEDD9, 2.5E+00, 2.9E−12; |
| | LOC107986021, 2.5E+00, 3.3E−07; ST6GALNAC5, 2.5E+00, 1.5E−06; ANXA2, 2.5E+00, 6.8E−08; TPM1, 2.5E+00, 6.1E−08; CNTNAP2, 2.5E+00, 1.6E−08; |
| | DDAH1, 2.5E+00, 1.5E−10; SAMD4A, 2.6E+00, 2.5E−07; ASAP2, 2.6E+00, 9.5E−11; MB21D2, 2.6E+00, 1.0E−08; DTWD2, 2.6E+00, 1.3E−10; KHDRBS3, |
| | 2.6E+00, 1.5E−09; ADARB2, 2.6E+00, 1.1E−08; TANC1, 2.7E+00, 1.5E−11; ANXA1, 2.7E+00, 7.2E−10; AHNAK, 2.7E+00, 4.3E−08; MAML2, 2.7E+00, |
| | 1.4E−07; SEPTIN11, 2.8E+00, 2.6E−09; MEST, 2.8E+00, 5.8E−09; AKAP12, 3.0E+00, 1.5E−11; TAGLN, 3.1E+00, 1.2E−10; PTPRD, 3.2E+00, 1.4E−11; FLRT2, |
| | 3.2E+00, 1.9E−11; VIM, 3.2E+00, 3.2E−12; ANKRD1, 3.3E+00, 1.2E−08; ALPK2, 3.3E+00, 9.1E−19; MYOF, 3.4E+00, 1.1E−14; ITGB8, 3.5E+00, 5.4E−16; |
| | CCDC141, 3.5E+00, 7.1E−12; TNC, 3.7E+00, 6.9E−15; TTN, 3.7E+00, 3.0E−12; TRPS1, 3.8E+00, 5.5E−17; SERPINE2, 4.2E+00, 3.3E−19; ALCAM, 4.4E+00, |
| | 1.1E−14; COL11A1, 4.5E+00, 8.4E−21; SORBS2, 4.7E+00, 1.0E−21; SPP1, 5.0E+00, 9.5E−20; SLIT2, 5.1E+00, 4.4E−23; COL2A1, 6.6E+00, 9.7E−41; FN1, |
| | 7.1E+00, 5.5E−39 |
| 12-1 | CCDC141, 3.9E+00, 4.3E−06; TTN, 3.9E+00, 1.5E−05; CDH13, 3.7E+00, 4.6E−05; ZNF385D, 3.2E+00, 3.1E−05; LOC102724419, 2.9E+00, 4.6E−05; |
| | SPATA16, 2.7E+00, 6.8E−04; ASAP2, 2.3E+00, 5.9E−03; HAPLN1, 2.2E+00, 1.1E−02; FAM19A1, 2.2E+00, 4.6E−03; CDH10, 1.9E+00, 6.2E−03; COLEC12, |
| | 1.6E+00, 4.6E−02; CCL26, 1.5E+00, 4.5E−02; CYP7B1, 1.3E+00, 1.1E−02; SLC2A13, −1.4E+00, 4.7E−02 |
| 13 | MDK, −1.5E+01, 9.2E−03; CALM2, −1.4E+01, 2.1E−02; H4C5, −1.4E+01, 4.9E−02; SOX2, −1.3E+01, 3.8E−02; RPL30, −1.3E+01, 4.4E−02; CCNB1, −1.3E+01, |
| | 2.6E−02; PTMA, −1.2E+01, 7.6E−04; HMGB3, −1.2E+01, 4.9E−02; HNRNPU, −1.2E+01, 4.4E−02; GAPDH, −1.2E+01, 7.4E−03; PABPC1, −1.2E+01, 4.5E−02; |
| | TBX15, −2.4E+00, 3.8E−02; GMPPA, −2.3E+00, 4.0E−02; DSCR8, 5.4E−01, 4.5E−02; HSPB2, 5.4E−01, 4.5E−02; KCNA5, 5.4E−01, 4.5E−02; LOC101928080, |
| | 5.4E−01, 4.5E−02; LOC101929278, 5.4E−01, 4.5E−02; LOC105373019, 5.4E−01, 4.5E−02; LOC105373408, 5.4E−01, 4.5E−02; LOC107985740, 5.4E−01, |
| | 4.5E−02; LOC107986157, 5.4E−01, 4.5E−02; LOC107986453, 5.4E−01, 4.5E−02; LOC107986826, 5.4E−01, 4.5E−02; NUTM2D, 5.4E−01, 4.5E−02; RAET1K, |
| | 5.4E−01, 4.5E−02; RGS1, 5.4E−01, 4.5E−02; WNT11, 5.4E−01, 4.5E−02; BPIFB1, 6.3E−01, 3.8E−02; CD302, 6.3E−01, 3.8E−02; CLCNKB, 6.3E−01, 3.8E−02; |
| | CYP24A1, 6.3E−01, 3.8E−02; EMX1, 6.3E−01, 3.8E−02; LINC00502, 6.3E−01, 3.8E−02; LINC01330, 6.3E−01, 3.8E−02; LOC101927557, 6.3E−01, 3.8E−02; |
| | LOC102724497, 6.3E−01, 3.8E−02; LOC102724584, 6.3E−01, 3.8E−02; LOC105371091, 6.3E−01, 3.8E−02; LOC105375183, 6.3E−01, 3.8E−02; |
| | LOC107984352, 6.3E−01, 3.8E−02; MIR7112, 6.3E−01, 3.8E−02; MS4A5, 6.3E−01, 3.8E−02; NOX1, 6.3E−01, 3.8E−02; LOC101929974, 6.3E−01, 4.0E−02; |
| | LOC105369455, 6.3E−01, 4.0E−02; LOC105370443, 6.3E−01, 4.0E−02; LOC105371335, 6.3E−01, 4.0E−02; LOC105374596, 6.3E−01, 4.0E−02; |
| | LOC105374774, 6.3E−01, 4.0E−02; LOC105377324, 6.3E−01, 4.0E−02; LOC105377401, 6.3E−01, 4.0E−02; LOC105378651, 6.3E−01, 4.0E−02; |
| | LOC107985564, 6.3E−01, 4.0E−02; LZTS1-AS1, 6.3E−01, 4.0E−02; PRR18, 6.3E−01, 4.0E−02; SLC6A1, 6.3E−01, 4.0E−02; SPATA22, 6.3E−01, 4.0E−02; |
| | ZCCHC12, 6.3E−01, 4.0E−02; LINC01201, 7.3E−01, 4.4E−02; LOC105377411, 7.3E−01, 4.4E−02; LOC107984205, 7.3E−01, 4.4E−02; LOC107986635, 7.3E−01, |
| | 4.4E−02; MIR3654, 7.3E−01, 4.4E−02; SLC14A1, 7.3E−01, 4.4E−02; BPIFA3, 8.6E−01, 1.7E−02; CPLX4, 8.6E−01, 1.7E−02; FLJ36777, 8.6E−01, 1.7E−02; |
| | IFIH1, 8.6E−01, 1.7E−02; LOC105372647, 8.6E−01, 1.7E−02; LOC105374793, 8.6E−01, 1.7E−02; LOC107986651, 8.6E−01, 1.7E−02; LINC01571, 9.2E−01, |
| | 3.8E−02; POSTN, 9.6E−01, 3.8E−02; LOC105377699, 1.0E+00, 3.8E−02; LOC101930114, 1.0E+00, 8.3E−03; NFAM1, 1.1E+00, 2.6E−02; LOC340184, |
| | 1.2E+00, 1.6E−04; LOC729739, 1.3E+00, 1.1E−04; LOC101928447, 1.3E+00, 5.4E−03; ZMYND10, 1.3E+00, 7.7E−04; GAS2L2, 1.3E+00, 2.2E−03; LRRC70, |
| | 1.3E+00, 2.2E−02; LOC100652768, 1.4E+00, 2.0E−03; LOC105373893, 1.5E+00, 3.8E−02; LOC105369383, 1.5E+00, 3.9E−02; AP4B1−AS1, 1.5E+00, 8.3E−03; |
| | CCNA1, 1.5E+00, 7.3E−04; CFAP73, 1.5E+00, 3.4E−02; LOC101927087, 1.6E+00, 2.6E−02; SNORD54, 1.6E+00, 4.2E−03; HEMK1, 1.6E+00, 8.7E−03; |
| | MRS2P2, 1.6E+00, 3.5E−08; SKOR2, 1.7E+00, 1.6E−04; LOC107986181, 1.7E+00, 1.2E−03; CCL26, 1.7E+00, 4.5E−02; LINC00566, 1.7E+00, 5.7E−11; |
| | LOC101929657, 1.7E+00, 5.7E−11; LOC105369543, 1.7E+00, 5.7E−11; LOC105378179, 1.7E+00, 5.7E−11; LOC105378459, 1.7E+00, 5.7E−11; |
| | LOC105378927, 1.7E+00, 5.7E−11; TCL6, 1.7E+00, 5.7E−11; LOC105371056, 1.7E+00, 1.7E−08; LOC105374220, 1.7E+00, 3.7E−07; LOC101928627, |
| | 1.8E+00, 3.2E−04; LOC105374492, 1.8E+00, 8.3E−03; LOC107986103, 1.8E+00, 4.5E−05; ISY1−RAB43, 1.8E+00, 1.5E−02; LOC105379098, 1.8E+00, |
| | 1.0E−02; LOC105375537, 1.8E+00, 1.9E−03; LOC105375951, 1.8E+00, 2.7E−02; LOC105377180, 1.8E+00, 4.0E−02; RIBC1, 1.8E+00, 1.2E−02; AGR3, |
| | 1.9E+00, 1.9E−02; C1orf127, 1.9E+00, 7.3E−10; LOC105377698, 1.9E+00, 6.6E−08; LOC107985404, 1.9E+00, 1.7E−08; LINC00488, 2.0E+00, 1.8E−06; |
| | TPTE2P2, 2.0E+00, 4.3E−04; LOC105379086, 2.0E+00, 1.2E−07; SLC45A1, 2.0E+00, 5.8E−04; ADAM21, 2.0E+00, 2.7E−03; LOC105370803, 2.1E+00, |
| | 2.3E−02; VAV1, 2.1E+00, 3.8E−06; BORCS8, 2.2E+00, 4.5E−02; PSKH2, 2.2E+00, 7.1E−07; LOC101927151, 2.3E+00, 3.9E−03; LOC105377697, 2.3E+00, |
| | 7.8E−04; BCO2, 2.3E+00, 1.9E−02; FLJ13224, 2.3E+00, 6.0E−03; AKAP14, 2.3E+00, 1.5E−03; LOC105370259, 2.3E+00, 2.1E−02; C11orf88, 2.4E+00, 3.0E−06; |
| | SYNPO, 2.4E+00, 3.8E−02; LOC102724744, 2.4E+00, 5.0E−03; TTLL10-AS1, 2.4E+00, 5.9E−03; LOC101929895, 2.5E+00, 7.1E−06; LOC101929043, |
| | 2.5E+00, 4.5E−05; LOC105374957, 2.6E+00, 1.6E−04; IL5RA, 2.7E+00, 8.9E−07; LACTB, 2.7E+00, 4.5E−02; LOC101929006, 2.7E+00, 5.6E−03; |
| | LOC107987061, 2.8E+00, 4.2E−04; ACOX2, 2.8E+00, 3.4E−03; ZNF792, 2.9E+00, 3.4E−02; CFAP206, 2.9E+00, 8.8E−03; NR4A2, 2.9E+00, 4.1E−07; NLRX1, |
| | 2.9E+00, 6.4E−03; LOC105377227, 2.9E+00, 5.3E−04; SPATA18, 3.0E+00, 4.0E−02; PNMA2, 3.1E+00, 4.6E−02; DLEC1, 3.2E+00, 3.4E−04; ZNF428, |
| | 3.2E+00, 4.5E−02; KCNE1, 3.2E+00, 4.7E−05; C2orf81, 3.2E+00, 4.0E−02; ENKUR, 3.2E+00, 7.4E−03; LOC107986295, 3.3E+00, 4.7E−03; CYB5RL, |
| | 3.3E+00, 4.0E−02; MYO7A, 3.5E+00, 4.1E−06; CFAP52, 3.6E+00, 1.1E−02; CLIC6, 3.6E+00, 9.8E−03; LOC107986309, 3.6E+00, 2.5E−06; LOC105369838, |
| | 3.6E+00, 5.2E−07; DAW1, 3.6E+00, 3.5E−05; ADRA1A, 3.6E+00, 8.7E−03; ARHGAP40, 3.7E+00, 2.0E−09; FER1L5, 3.7E+00, 1.9E−02; TTC23L, 3.8E+00, |
| | 3.8E−02; CFAP61, 3.8E+00, 4.5E−02; CSGALNACT1, 3.8E+00, 3.8E−02; CFAP126, 3.9E+00, 1.3E−02; WBP2NL, 3.9E+00, 3.0E−02; TBXT, 4.0E+00, 4.6E−09; |
| | SERPINI2, 4.2E+00, 4.0E−03; LOC105377975, 4.2E+00, 3.7E−05; ADPRS, 4.2E+00, 3.4E−04; TEKT1, 4.2E+00, 5.5E−07; EFHC2, 4.2E+00, 3.8E−02; SPRTN, |
| | 4.3E+00, 4.9E−02; ADGB, 4.3E+00, 4.5E−06; CFAP100, 4.4E+00, 4.6E−04; SYNM, 4.4E+00, 2.5E−03; DPY19L2P1, 4.4E+00, 2.0E−03; RGS22, 4.4E+00, |
| | 1.8E−06; FAHD2A, 4.5E+00, 2.9E−02; VWA5B1, 4.6E+00, 3.9E−05; YPEL4, 4.6E+00, 3.2E−02; DNAH12, 4.6E+00, 1.5E−04; RSPH1, 4.6E+00, 3.8E−05; |
| | LOC105375138, 4.6E+00, 5.0E−08; ABCG2, 4.8E+00, 7.5E−03; EFCAB1, 4.8E+00, 8.9E−07; NOL4, 4.8E+00, 4.8E−02; TMEM231, 4.9E+00, 1.1E−02; |
| | CFAP45, 4.9E+00, 2.8E−05; ADAM12, 4.9E+00, 4.0E−02; TNFRSF11B, 5.0E+00, 1.9E−03; ARNTL, 5.0E+00, 4.0E−02; TOM1L2, 5.1E+00, 1.9E−02; DNAI1, |
| | 5.2E+00, 2.2E−06; LINC00869, 5.3E+00, 6.0E−04; AGBL1, 5.3E+00, 3.4E−07; FRMPD2, 5.3E+00, 1.6E−05; WDR66, 5.4E+00, 2.6E−02; CD109, 5.4E+00, |
| | 3.6E−02; CASC17, 5.5E+00, 2.6E−02; LOC107983974, 5.5E+00, 4.1E−02; TTC12, 5.5E+00, 2.2E−02; AKNA, 5.6E+00, 8.8E−03; CCDC146, 5.8E+00, 4.3E−02; |
| | MYH14, 5.9E+00, 1.7E−02; FYB2, 6.0E+00, 3.8E−02; ARMC4, 6.1E+00, 9.3E−03; CYP11A1, 6.1E+00, 3.0E−13; TTC29, 6.2E+00, 3.3E−03; CCDC30, |
| | 6.2E+00, 4.5E−02; TPPP3, 6.2E+00, 1.8E−09; LINC00632, 6.4E+00, 4.8E−05; DNAH9, 6.5E+00, 5.6E−03; C4orf47, 6.5E+00, 6.2E−04; CEP126, 6.5E+00, |
| | 9.9E−03; FANK1, 6.6E+00, 3.1E−04; DTHD1, 6.6E+00, 1.7E−12; SCD5, 6.7E+00, 1.3E−02; SPAG6, 6.7E+00, 3.5E−05; LRRC6, 6.7E+00, 3.9E−03; SPEF2, |
| | 6.8E+00, 4.3E−07; WDR78, 6.8E+00, 4.5E−02; SPOCK1, 6.9E+00, 3.8E−02; NEK10, 7.0E+00, 5.8E−03; PDE11A, 7.2E+00, 4.1E−03; LMNTD1, 7.3E+00, 6.6E−17; |
| | WDR49, 7.3E+00, 3.8E−03; CLSTN2, 7.3E+00, 4.2E−03; ARMC2, 7.4E+00, 1.9E−02; MAATS1, 7.5E+00, 5.8E−03; NKD1, 7.6E+00, 3.8E−02; CFAP46, |
| | 7.6E+00, 6.6E−06; CDHR3, 7.6E+00, 8.5E−03; CFAP43, 7.8E+00, 7.8E−05; CCDC173, 8.0E+00, 3.4E−04; LRRC9, 8.1E+00, 8.9E−07; LRGUK, 8.3E+00, |
| | 1.2E−02; DTWD2, 8.4E+00, 4.3E−03; SPAG17, 8.4E+00, 3.8E−06; TCTEX1D1, 8.5E+00, 1.6E−12; CLMN, 8.5E+00, 6.2E−05; DCAF10, 8.5E+00, 2.3E−02; |
| | LOC101928114, 8.6E+00, 1.9E−03; EFHC1, 8.7E+00, 3.8E−02; NCALD, 8.7E+00, 2.9E−02; SATB1, 8.7E+00, 4.0E−02; FRY, 8.7E+00, 1.7E−02; MACC1, |
| | 8.8E+00, 1.3E−02; KIF16B, 8.8E+00, 4.9E−02; VWA3A, 8.9E+00, 4.2E−12; CFAP47, 9.0E+00, 1.2E−09; C6orf118, 9.0E+00, 5.8E−17; WWTR1, 9.1E+00, |
| | 4.0E−03; ADARB2, 9.2E+00, 1.5E−02; RFX2, 9.2E+00, 8.9E−07; SPATA13, 9.2E+00, 3.8E−02; MDGA2, 9.3E+00, 2.6E−02; LRRIQ1, 9.5E+00, 3.3E−03; |
| | SAMD3, 9.5E+00, 3.7E−07; NEK11, 9.8E+00, 5.2E−04; NPTN, 9.9E+00, 2.7E−02; DNAH6, 9.9E+00, 3.7E−06; CFAP299, 1.0E+01, 3.4E−05; PIBF1, 1.0E+01, |
| | 4.8E−02; BTBD11, 1.0E+01, 1.4E−02; ARMC3, 1.0E+01, 3.7E−07; MBNL1, 1.0E+01, 3.8E−02; ZEB2, 1.1E+01, 4.5E−02; ATXN1, 1.1E+01, 4.5E−02; SEC31A, |
| | 1.1E+01, 4.0E−02; PKD1L1, 1.1E+01, 1.7E−06; EPB41L5, 1.1E+01, 4.5E−02; ATXN7, 1.1E+01, 1.5E−03; SPATA17, 1.1E+01, 2.4E−07; TRERF1, 1.1E+01, |
| | 3.8E−02; TTC6, 1.1E+01, 3.0E−02; CCDC141, 1.1E+01, 3.5E−08; MICU2, 1.1E+01, 3.0E−03; CDH10, 1.1E+01, 5.4E−04; FAM13A, 1.1E+01, 4.0E−02; NKAIN2, |
| | 1.1E+01, 4.6E−04; LMX1A, 1.2E+01, 3.0E−02; MOK, 1.2E+01, 4.1E−07; TNIK, 1.2E+01, 2.6E−02; SETBP1, 1.2E+01, 4.5E−02; COG5, 1.2E+01, 2.6E−02; |
| | MECOM, 1.2E+01, 2.9E−02; GALNT7, 1.2E+01, 4.9E−02; TMEM232, 1.2E+01, 9.1E−05; NSMCE2, 1.2E+01, 3.5E−02; RANBP17, 1.2E+01, 4.5E−02; |
| | ADAMTS6, 1.2E+01, 5.5E−03; ASAP1, 1.2E+01, 4.5E−02; NEDD4L, 1.2E+01, 3.6E−02; PRICKLE1, 1.2E+01, 1.9E−02; CFAP44, 1.3E+01, 2.8E−07; AGBL4, |
| | 1.3E+01, 2.6E−05; AGPAT4, 1.3E+01, 5.7E−03; VTI1A, 1.3E+01, 3.2E−02; PTK2, 1.3E+01, 1.7E−02; PTPN14, 1.3E+01, 3.5E−02; SHANK2, 1.3E+01, 4.1E−02; |
| | C11orf49, 1.3E+01, 5.7E−03; TLN2, 1.3E+01, 1.1E−02; LRBA, 1.4E+01, 3.8E−02; SDK1, 1.4E+01, 2.3E−02; GSK3B, 1.4E+01, 1.1E−02; HYDIN, 1.4E+01, |
| | 7.9E−10; AUTS2, 1.4E+01, 9.2E−04; PTPN13, 1.4E+01, 3.6E−02; FHIT, 1.4E+01, 1.0E−02; AKAP13, 1.4E+01, 1.1E−02; STK33, 1.4E+01, 6.5E−03; PAN3, |
| | 1.4E+01, 7.8E−03; CMTM8, 1.4E+01, 2.7E−03; PCDH9, 1.5E+01, 1.8E−03; SLIT3, 1.5E+01, 1.3E−03; PTPRD, 1.5E+01, 1.2E−02; MAGI1, 1.5E+01, 1.9E−03; |
| | MEF2A, 1.5E+01, 1.3E−03; TTC28, 1.5E+01, 8.7E−03; ADGRL3, 1.5E+01, 1.1E−03; DNAH5, 1.5E+01, 2.2E−11; TTN, 1.5E+01, 2.3E−03; NEAT1, 1.6E+01, |
| | 2.8E−03; ITGB8, 1.6E+01, 8.7E−07; EGFEM1P, 1.6E+01, 5.0E−03; ZC3H12B, 1.6E+01, 6.2E−03; TRIO, 1.6E+01, 3.2E−03; FBN2, 1.6E+01, 5.1E−03; LSAMP, |
| | 1.6E+01, 7.7E−04; RFX3, 1.7E+01, 1.3E−03; BTBD9, 1.7E+01, 2.6E−05; FNDC3B, 1.7E+01, 1.5E−03; SPAG16, 1.7E+01, 2.2E−05; PACRG, 1.7E+01, 6.6E−17; |
| | DNAH7, 1.8E+01, 4.0E−12; CADM1, 1.9E+01, 3.7E−04; NRXN3, 1.9E+01, 1.4E−04; PPP3CA, 2.0E+01, 2.6E−05; PRICKLE2, 2.0E+01, 3.5E−05; CFAP54, |
| | 2.1E+01, 7.8E−19; SLIT2, 2.9E+01, 6.6E−08; MAPK10, 3.0E+01, 2.2E−11; PLCL1, 3.3E+01, 8.4E−10 |
| 14 | PTMA, −8.5E+00, 1.1E−28; PFN1, −8.0E+00, 9.2E−10; RPL8, −7.3E+00, 3.0E−08; RPL13A, −7.2E+00, 3.2E−13; RPL13, −7.1E+00, 3.0E−09; CALM1, −6.9E+00, |
| | 2.2E−07; FTH1, −6.9E+00, 1.1E−08; HSP90AB1, −6.8E+00, 4.5E−11; ACTG1, −6.7E+00, 5.8E−08; RPL6, −6.5E+00, 1.8E−07; RPL15, −6.3E+00, 2.8E−06; |
| | RPLP1, −6.2E+00, 5.2E−07; HSP90AA1, −6.2E+00, 8.5E−12; TMSB4X, −6.2E+00, 9.9E−06; NPM1, −6.1E+00, 4.8E−10; RPL10, −6.0E+00, 2.5E−05; HMGA1, |
| | −5.9E+00, 2.3E−05; RPS18, −5.9E+00, 3.9E−06; RPS6, −5.9E+00, 7.7E−08; RACK1, −5.8E+00, 1.7E−05; RPS23, −5.7E+00, 6.5E−05; ACTB, −5.6E+00, 1.6E−08; |
| | RPS12, −5.6E+00, 1.1E−05; EEF2, −5.5E+00, 6.0E−05; KRT18, −5.5E+00, 2.1E−05; GAPDH, −5.5E+00, 3.2E−06; SERBP1, −5.4E+00, 5.5E−05; TPT1, −5.4E+00, |
| | 9.6E−05; H2AZ1, −5.4E+00, 2.3E−04; RPS15, −5.4E+00, 3.4E−04; GJA1, −5.4E+00, 3.0E−04; YBX1, −5.4E+00, 3.5E−04; RPL14, −5.3E+00, 1.8E−04; TMSB10, |
| | −5.2E+00, 3.0E−04; EEF1A1, −5.2E+00, 9.1E−12; RPL23, −5.2E+00, 1.6E−04; VCAN, −5.2E+00, 1.1E−04; RPL26, −5.2E+00, 6.9E−04; RPL21, −5.2E+00, 3.5E−04; |
| | SSB, −5.2E+00, 4.0E−04; RPS24, −5.1E+00, 3.1E−04; IDH1, −5.1E+00, 6.9E−04; STMN1, −5.1E+00, 9.6E−04; ATP5F1B, −5.1E+00, 8.8E−04; PRDX1, |
| | −5.1E+00, 2.0E−03; RPL9, −5.1E+00, 8.8E−04; RPS14, −5.0E+00, 1.3E−04; RPS8, −5.0E+00, 1.5E−05; RPL12, −5.0E+00, 1.5E−03; NUCKS1, −4.9E+00, 3.1E−04; |
| | TUBB, −4.9E+00, 1.1E−03; SKIL, −4.9E+00, 1.3E−03; RPL19, −4.9E+00, 5.8E−04; RPS7, −4.9E+00, 1.7E−03; HSP90B1, −4.9E+00, 2.9E−04; NCL, −4.8E+00, |
| | 6.6E−06; RPLPO, −4.8E+00, 1.9E−03; RPL10A, −4.7E+00, 1.7E−03; EEF1B2, −4.7E+00, 1.6E−03; EIF4G2, −4.7E+00, 9.9E−04; SERPINB9, −4.7E+00, 2.5E−03; |
| | GSTP1, −4.6E+00, 4.3E−03; HNRNPA1, −4.6E+00, 1.3E−04; RPL4, −4.6E+00, 1.5E−04; CCT5, −4.6E+00, 2.7E−03; RAN, −4.6E+00, 4.3E−03; RPL3, −4.6E+00, |
| | 9.9E−04; RPL37, −4.6E+00, 2.6E−03; RPL5, −4.6E+00, 1.7E−03; RPL35A, −4.6E+00, 3.9E−03; TUBA1B, −4.6E+00, 2.3E−03; MYL6, −4.6E+00, 4.4E−03; BTF3, |
| | −4.5E+00, 2.1E−03; H3F3B, −4.5E+00, 4.1E−03; HSPA8, −4.5E+00, 2.4E−03; RPL18, −4.5E+00, 6.3E−03; RPL32, −4.5E+00, 6.2E−03; PODXL, −4.4E+00, 5.2E−03; |
| | CD24, −4.4E+00, 2.0E−03; SPP1, −4.4E+00, 9.8E−04; XRCC6, −4.4E+00, 6.4E−03; RPS3, −4.4E+00, 7.0E−03; L1TD1, −4.4E+00, 6.0E−05; RPL7A, −4.4E+00, |
| | 9.4E−03; ILF3, −4.4E+00, 8.4E−03; RPLP2, −4.3E+00, 7.2E−03; RPS16, −4.3E+00, 9.3E−03; NACA, −4.3E+00, 8.5E−03; RPS5, −4.3E+00, 9.5E−03; DNMT3B, |
| | −4.3E+00, 2.6E−04; KRT8, −4.3E+00, 3.7E−03; PMAIP1, −4.3E+00, 4.1E−04; SUPT16H, −4.3E+00, 1.0E−02; SERPINH1, −4.3E+00, 1.9E−03; SET, −4.3E+00, |
| | 1.0E−03; SUMO2, −4.3E+00, 4.7E−03; EID1, −4.3E+00, 1.3E−03; UBA52, −4.3E+00, 7.2E−03; CYP51A1, −4.3E+00, 7.5E−03; UGP2, −4.2E+00, 1.2E−03; HSPA5, |
| | −4.2E+00, 3.3E−02; PSMA7, −4.2E+00, 5.9E−03; PPIA, −4.2E+00, 1.6E−02; RPL34, −4.2E+00, 1.3E−02; HNRNPA2B1, −4.2E+00, 6.4E−05; RPL35, −4.1E+00, |
| | 2.1E−02; ALDOA, −4.1E+00, 4.2E−03; ZFP42, −4.1E+00, 1.6E−02; CFL1, −4.1E+00, 9.4E−03; TPM3, −4.1E+00, 1.7E−02; PARP1, −4.1E+00, 3.6E−02; TDGF1, |
| | −4.1E+00, 1.6E−02; YWHAB, −4.1E+00, 1.0E−02; NASP, −4.0E+00, 1.0E−02; RPS15A, −4.0E+00, 2.0E−02; HSPD1, −4.0E+00, 7.9E−03; PLS3, −4.0E+00, 2.3E−02; |
| | LOC105377901, −4.0E+00, 6.9E−03; ATP5F1A, −4.0E+00, 2.2E−02; TALDO1, −4.0E+00, 3.4E−04; RPS28, −3.9E+00, 2.0E−02; FLNA, −3.9E+00, 2.4E−02; |
| | LIN28A, −3.9E+00, 9.3E−04; DPYSL3, −3.9E+00, 3.0E−02; FTL, −3.9E+00, 3.1E−02; RPS21, −3.9E+00, 1.7E−02; RPL18A, −3.8E+00, 3.4E−02; RPL24, |
| | −3.8E+00, 4.1E−02; PEBP1, −3.8E+00, 1.3E−02; SRP14, −3.8E+00, 1.6E−02; PKM, −3.8E+00, 4.1E−02; DPPA4, −3.8E+00, 3.6E−02; DHCR24, −3.7E+00, 4.8E−02; |
| | RPS27A, −3.7E+00, 4.3E−02; TPI1, −3.7E+00, 4.0E−02; GARS1, −3.7E+00, 3.2E−02; UBE2I, −3.7E+00, 7.0E−03; MARCKSL1, −3.7E+00, 4.8E−03; TMED2, |
| | −3.7E+00, 7.2E−03; SLC25A5, −3.7E+00, 3.6E−03; ACVR2B, −3.6E+00, 3.3E−02; CNN3, −3.6E+00, 2.9E−02; SSRP1, −3.6E+00, 1.5E−02; PDLIM1, −3.6E+00, |
| | 2.7E−03; GL01, −3.5E+00, 3.6E−02; PSMA4, −3.5E+00, 3.2E−02; PABPC1, −3.5E+00, 5.9E−03; YWHAZ, −3.5E+00, 5.0E−02; RPS26, −3.5E+00, 4.3E−02; |
| | SF3A3, −3.4E+00, 1.9E−02; TPM2, −3.4E+00, 4.6E−03; IDI1, −3.3E+00, 4.7E−02; KRT19, −3.3E+00, 4.3E−03; C14orf166, −3.3E+00, 4.9E−02; FSCN1, |
| | −3.2E+00, 3.0E−02; IFITM1, −3.2E+00, 3.3E−02; PRDX3, −3.2E+00, 2.6E−02; BAG6, −3.1E+00, 8.5E−04; SCG3, −3.1E+00, 2.5E−03; H2BC9, −3.0E+00, 3.6E−02; |
| | TAF7, −3.0E+00, 5.0E−02; RDH11, −2.9E+00, 2.4E−02; LSM4, −2.9E+00, 2.4E−02; COX3, −2.8E+00, 1.2E−04; LIN7C, −2.8E+00, 3.2E−02; HS6ST3, −2.8E+00, |
| | 2.0E−02; RPL41, −2.8E+00, 4.3E−02; EPPK1, −2.7E+00, 1.7E−02; TUBB3, −2.6E+00, 3.3E−02; PTK7, −2.6E+00, 4.6E−02; GAL, −2.6E+00, 2.1E−03; PES1, |
| | −2.3E+00, 5.0E−03; MRPL44, −2.2E+00, 2.4E−02; DIPK2A, −2.1E+00, 2.4E−02; COX1, −2.0E+00, 4.0E−03; OLFML3, −1.9E+00, 3.7E−02; NANOG, −1.9E+00, |
| | 2.5E−02; ND4, −1.5E+00, 3.3E−02; FKRP, −1.4E+00, 1.6E−02; LOC107986048, 3.6E−01, 3.6E−02; LOC101928126, 4.0E−01, 4.8E−02; LOC105372112, 4.8E−01, |
| | 4.3E−02; LOC107984625, 5.0E−01, 4.5E−02; SNORD45A, 5.1E−01, 2.6E−02; IL17B, 5.9E−01, 2.6E−02; LOC107986088, 6.2E−01, 4.6E−03; NCR3LG1, |
| | 6.4E−01, 3.6E−02; LOC105378646, 6.4E−01, 3.7E−02; ALDH5A1, 7.2E−01, 3.7E−02; ADCY8, 7.8E−01, 3.8E−02; PPP1R16A, 9.9E−01, 3.7E−03; CASP10, |
| | 1.1E+00, 3.8E−02; KCNMB2-AS1, 1.1E+00, 4.3E−02; LOC101927770, 1.2E+00, 1.2E−02; CHRM2, 1.2E+00, 2.0E−02; SOAT2, 1.2E+00, 1.6E−02; |
| | LOC105373835, 1.2E+00, 3.7E−02; CCDC60, 1.2E+00, 2.9E−03; TLR8-AS1, 1.2E+00, 3.1E−02; CSF3R, 1.3E+00, 1.3E−02; KHDC1L, 1.4E+00, 2.4E−02; |
| | LOC105370826, 1.4E+00, 2.7E−03; LOC105373187, 1.4E+00, 4.8E−02; CCDC190, 1.4E+00, 1.9E−02; C9orf41-AS1, 1.5E+00, 1.9E−02; LOC344887, |
| | 1.5E+00, 1.0E−03; LOC105372915, 1.6E+00, 1.4E−02; LOC105378005, 1.6E+00, 4.5E−02; LOC102724168, 1.6E+00, 3.5E−03; LOC105376923, 1.7E+00, |
| | 2.7E−03; PLCG2, 1.7E+00, 1.4E−02; PRLR, 1.8E+00, 1.3E−02; LINC00383, 1.8E+00, 1.0E−03; CNNM4, 1.9E+00, 7.2E−03; LOC105378516, 1.9E+00, 3.6E−03; |
| | LOC105371143, 1.9E+00, 4.8E−02; GATA3, 1.9E+00, 1.3E−02; ST8SIA2, 1.9E+00, 4.6E−02; MFAP3L, 1.9E+00, 4.6E−02; LOC105376584, 2.0E+00, |
| | 1.3E−02; TMC7, 2.0E+00, 2.7E−02; PRSS23, 2.1E+00, 2.8E−02; LOC105371070, 2.1E+00, 3.1E−03; RNF138P1, 2.1E+00, 4.1E−02; HAVCR1, 2.1E+00, |
| | 1.3E−04; LOC107986062, 2.2E+00, 1.9E−03; LOC107987296, 2.2E+00, 1.2E−02; RRAGB, 2.2E+00, 1.6E−02; SLC25A43, 2.2E+00, 4.4E−02; LOC101928911, |
| | 2.2E+00, 4.5E−05; CTSL, 2.2E+00, 3.3E−02; GPC5, 2.2E+00, 4.8E−02; PPFIBP2, 2.2E+00, 4.6E−03; LOC107986706, 2.3E+00, 1.2E−03; LOC107987043, |
| | 2.3E+00, 1.7E−02; MRPS30-DT, 2.4E+00, 1.4E−03; FAM193B, 2.4E+00, 5.0E−02; LOC101927056, 2.4E+00, 1.9E−02; FOXK1, 2.5E+00, 3.4E−02; |
| | LOC105369427, 2.5E+00, 2.1E−05; DLGAP3, 2.5E+00, 2.1E−02; CA10, 2.5E+00, 5.2E−03; LOC105372950, 2.5E+00, 4.6E−04; NUDT4, 2.5E+00, 4.3E−02; |
| | TMEM168, 2.6E+00, 2.8E−03; GDPD1, 2.6E+00, 2.1E−02; CLEC2L, 2.6E+00, 4.0E−04; TNRC18, 2.6E+00, 2.2E−02; LOC105378657, 2.7E+00, 6.9E−03; |
| | CD48, 2.7E+00, 3.6E−03; RASGRF2, 2.7E+00, 4.0E−02; LOC107987100, 2.8E+00, 1.3E−02; TEC, 2.8E+00, 1.9E−02; TPTE2P1, 2.8E+00, 4.5E−03; LRP4, |
| | 2.8E+00, 1.7E−02; SLC35F2, 2.8E+00, 1.5E−02; UMAD1, 2.8E+00, 3.1E−02; LOC107986724, 2.8E+00, 8.1E−03; WDR11-AS1, 2.8E+00, 2.3E−04; SLC01C1, |
| | 2.8E+00, 5.0E−02; ANXA3, 2.8E+00, 1.3E−02; CPNE8, 2.9E+00, 1.2E−02; MINDY2, 2.9E+00, 4.3E−02; MIR4435-2HG, 3.0E+00, 2.1E−03; CDK14, 3.0E+00, |
| | 2.5E−02; C2CD2, 3.0E+00, 2.3E−03; DIP2A, 3.0E+00, 3.1E−02; TMEM62, 3.0E+00, 1.2E−04; KCNK1, 3.1E+00, 4.1E−03; TXK, 3.1E+00, 1.1E−05; CASP8, |
| | 3.1E+00, 4.0E−04; ZFHX3, 3.1E+00, 1.2E−02; CDH8, 3.1E+00, 2.5E−02; SLC49A4, 3.1E+00, 1.1E−03; TVP23C-CDRT4, 3.1E+00, 8.5E−03; ERV3−1, 3.1E+00, |
| | 3.4E−04; GS1-124K5.11, 3.1E+00, 1.4E−02; FEZ2, 3.1E+00, 1.6E−02; ATP6V1H, 3.1E+00, 1.2E−02; ERBB4, 3.1E+00, 2.1E−02; PPP1R12B, 3.2E+00, 3.2E−02; |
| | LINC00871, 3.2E+00, 6.0E−05; STXBP5, 3.2E+00, 2.4E−02; SLC39A11, 3.2E+00, 3.2E−02; ASXL3, 3.2E+00, 1.2E−04; ST3GAL1, 3.2E+00, 1.6E−03; |
| | ZNF516, 3.3E+00, 2.7E−03; LOC105370504, 3.3E+00, 7.6E−03; FA2H, 3.3E+00, 1.8E−03; DLG5, 3.3E+00, 4.5E−02; SENP5, 3.3E+00, 2.7E−02; SEMA6A, |
| | 3.4E+00, 4.0E−02; CLEC16A, 3.4E+00, 5.2E−03; LOC107984449, 3.4E+00, 3.0E−08; CNOT2, 3.4E+00, 4.6E−02; PDXDC2P, 3.4E+00, 2.5E−03; TMEM161B, |
| | 3.4E+00, 4.8E−03; BMP6, 3.4E+00, 2.2E−06; JMY, 3.5E+00, 3.4E−02; LOC101928283, 3.5E+00, 1.2E−03; KHDC1, 3.5E+00, 7.3E−03; DERA, 3.5E+00, 6.8E−03; |
| | SENP7, 3.5E+00, 2.8E−04; SNAPC3, 3.5E+00, 5.6E−03; TAF1, 3.5E+00, 9.7E−03; LPIN1, 3.5E+00, 7.2E−03; TCF12, 3.6E+00, 2.9E−02; TET3, 3.6E+00, |
| | 2.4E−02; ZSWIM6, 3.6E+00, 4.0E−02; GAREM1, 3.6E+00, 9.7E−04; PPP2R5C, 3.6E+00, 8.6E−03; TYW1, 3.6E+00, 6.6E−03; GPATCH2, 3.6E+00, 2.4E−02; |
| | MTHFD1L, 3.6E+00, 3.9E−02; RALGAPA1, 3.6E+00, 1.2E−02; REV3L, 3.6E+00, 2.2E−02; LOC107985037, 3.7E+00, 1.9E−02; DLEU1, 3.7E+00, 7.3E−03; |
| | CASK, 3.7E+00, 4.9E−02; ANAPC10, 3.7E+00, 1.8E−03; ERCC8, 3.7E+00, 3.7E−03; C1GALT1, 3.7E+00, 2.6E−02; MAP4K3, 3.7E+00, 2.8E−02; ATXN7, |
| | 3.7E+00, 2.2E−03; KIAA0232, 3.7E+00, 1.9E−02; TDRD3, 3.7E+00, 5.2E−03; RBM33, 3.7E+00, 7.2E−03; SNX24, 3.7E+00, 4.0E−03; PLSCR4, 3.7E+00, |
| | 1.6E−04; NPSR1-AS1, 3.8E+00, 3.5E−02; VAV2, 3.8E+00, 4.5E−02; PRIM2, 3.8E+00, 3.6E−02; TNKS, 3.8E+00, 2.8E−02; LARP1B, 3.8E+00, 2.5E−02; AGAP1, |
| | 3.8E+00, 4.6E−02; DUSP16, 3.8E+00, 2.7E−02; RAF1, 3.8E+00, 9.1E−03; AHNAK, 3.9E+00, 4.1E−02; KIAA1671, 3.9E+00, 1.4E−02; PCNX2, 3.9E+00, 3.6E−02; |
| | PAN3, 3.9E+00, 4.1E−02; ATP8B1, 3.9E+00, 6.8E−05; ZNF138, 3.9E+00, 1.1E−02; TRAPPC9, 3.9E+00, 3.8E−02; FTX, 3.9E+00, 6.6E−03; PSPC1, |
| | 3.9E+00, 3.8E−02; SGCD, 4.0E+00, 2.4E−02; BICD1, 4.0E+00, 3.1E−04; ZFAND3, 4.0E+00, 4.0E−02; CRACD, 4.0E+00, 3.5E−03; ATP2B1, 4.0E+00, 9.8E−03; |
| | SCFD2, 4.0E+00, 3.7E−03; SLC12A3, 4.0E+00, 1.4E−08; FRAS1, 4.0E+00, 6.3E−03; POLA1, 4.0E+00, 2.9E−02; PHKB, 4.0E+00, 1.1E−02; UBE2E1, 4.0E+00, |
| | 1.9E−02; GRB10, 4.0E+00, 7.5E−03; OPHN1, 4.0E+00, 1.5E−03; WDFY3, 4.1E+00, 1.4E−02; CTNNA3, 4.1E+00, 1.7E−02; LRRC8D, 4.1E+00, 1.6E−02; |
| | PPARGC1B, 4.1E+00, 4.0E−03; ERBIN, 4.1E+00, 1.7E−02; FARP1, 4.1E+00, 2.7E−02; FAM160A1, 4.1E+00, 2.2E−02; KLHL18, 4.1E+00, 1.0E−03; SLC25A16, |
| | 4.1E+00, 2.4E−03; RREB1, 4.1E+00, 1.2E−03; MAN1A2, 4.1E+00, 2.9E−03; UTY, 4.2E+00, 1.4E−02; DANT2, 4.2E+00, 1.5E−02; N4BP1, 4.2E+00, 1.1E−03; |
| | ITPR2, 4.2E+00, 1.4E−02; LINC01057, 4.2E+00, 1.3E−03; SLC4A7, 4.2E+00, 4.9E−03; KCNK2, 4.2E+00, 6.5E−05; FBXL20, 4.3E+00, 1.9E−03; ROBO1, |
| | 4.3E+00, 2.1E−02; EIF4G3, 4.3E+00, 5.8E−03; FER, 4.3E+00, 8.1E−03; MED13L, 4.3E+00, 7.9E−03; ASAP1, 4.3E+00, 1.3E−02; ASH1L, 4.3E+00, 1.1E−02; |
| | NCOA3, 4.3E+00, 1.3E−03; PATJ, 4.4E+00, 5.8E−03; HSD17B12, 4.4E+00, 1.3E−02; DNAJB4, 4.4E+00, 3.7E−03; DEPTOR, 4.4E+00, 7.1E−04; ZDHHC17, |
| | 4.4E+00, 1.4E−03; CRPPA, 4.4E+00, 2.9E−06; MALAT1, 4.4E+00, 3.2E−13; TNRC6C, 4.4E+00, 4.0E−03; VWA8, 4.4E+00, 3.3E−03; TSC22D1, 4.4E+00, 7.2E−03; |
| | FMN1, 4.5E+00, 2.0E−07; ST3GAL6, 4.5E+00, 7.1E−04; COP1, 4.5E+00, 4.3E−03; WDR11, 4.5E+00, 1.3E−03; DDHD1, 4.5E+00, 3.4E−04; NHS, 4.5E+00, |
| | 1.1E−02; PYGB, 4.5E+00, 5.3E−04; MYO9A, 4.5E+00, 4.1E−03; SPRED2, 4.5E+00, 2.6E−04; LOC101927768, 4.6E+00, 4.1E−05; MOB3B, 4.6E+00, 6.5E−05; |
| | TMTC1, 4.6E+00, 4.9E−03; NOVA1-AS1, 4.6E+00, 2.2E−07; IL12A-AS1, 4.6E+00, 9.2E−07; SCAPER, 4.6E+00, 2.8E−03; SPIDR, 4.7E+00, 4.1E−03; MEI4, |
| | 4.7E+00, 2.3E−04; FLVCR2, 4.7E+00, 2.1E−07; TBC1D22A, 4.7E+00, 2.0E−03; BARD1, 4.7E+00, 2.3E−03; RIN2, 4.7E+00, 7.2E−06; LOC105375815, |
| | 4.7E+00, 4.9E−06; SULF1, 4.8E+00, 7.2E−03; LRBA, 4.8E+00, 4.5E−04; DIAPH3, 4.8E+00, 4.3E−03; NTRK3, 4.8E+00, 1.6E−06; SDHAP3, 4.8E+00, 6.9E−04; |
| | RNF115, 4.8E+00, 1.3E−04; ZFYVE9, 4.8E+00, 7.1E−04; RBMS1, 4.8E+00, 2.5E−03; KDM4C, 4.8E+00, 3.0E−03; UBAC2, 5.0E+00, 2.5E−03; RCBTB1, |
| | 5.0E+00, 3.1E−06; CHCHD3, 5.0E+00, 1.7E−03; SHB, 5.0E+00, 2.3E−05; MAP4, 5.1E+00, 5.4E−04; LOC107986215, 5.1E+00, 1.7E−06; BTRC, 5.1E+00, |
| | 1.7E−04; GPD2, 5.2E+00, 2.3E−04; GAS7, 5.3E+00, 4.4E−07; CNTN6, 5.3E+00, 3.7E−09; FGF13, 5.3E+00, 6.3E−03; SCN2A, 5.3E+00, 2.1E−12; CDC42BPA, |
| | 5.4E+00, 3.3E−04; LOC728755, 5.5E+00, 1.0E−03; LOC101927967, 5.5E+00, 3.1E−07; MAN1C1, 5.5E+00, 5.7E−07; ARFGEF1, 5.6E+00, 4.6E−05; LSAMP, |
| | 5.6E+00, 2.9E−04; TENM4, 5.6E+00, 1.8E−04; RNGTT, 5.6E+00, 2.2E−04; GPHN, 5.6E+00, 2.1E−04; PDZD2, 5.7E+00, 4.5E−05; CHD2, 5.7E+00, 8.5E−05; |
| | ME1, 5.7E+00, 7.7E−08; KIAA1217, 5.8E+00, 2.6E−04; LOC105373153, 5.9E+00, 4.6E−07; PCAT14, 6.0E+00, 2.4E−04; SHROOM3, 6.2E+00, 5.1E−05; |
| | LOC105375199, 6.3E+00, 2.2E−14; VPS13B, 6.3E+00, 3.2E−06; UBR1, 6.4E+00, 6.2E−07; GRIK3, 6.4E+00, 2.8E−06; PITPNC1, 6.4E+00, 1.3E−05; |
| | LOC339862, 6.5E+00, 1.1E−05; CACNA1C, 6.8E+00, 1.7E−09; PCMTD1, 6.9E+00, 1.9E−07; ELM01, 7.0E+00, 3.6E−07; MAST2, 7.0E+00, 5.8E−08; KMT2C, |
| | 7.2E+00, 2.1E−07; ATP9B, 7.2E+00, 3.1E−08; ARL15, 7.2E+00, 5.1E−07; AIRE, 7.2E+00, 2.3E−16; ADAMTSL1, 7.6E+00, 1.6E−12; AGL, 7.7E+00, 1.7E−07; |
| | YPEL2, 7.7E+00, 5.8E−09; LOC105374013, 7.8E+00, 1.3E−09; NEAT1, 8.0E+00, 1.6E−06; RIMKLB, 8.2E+00, 4.0E−09; RPTOR, 8.4E+00, 8.5E−12; |
| | LINC01250, 8.6E+00, 8.1E−12; SCN3A, 8.6E+00, 1.6E−23; TULP4, 8.7E+00, 2.7E−11; DNAJC15, 8.7E+00, 4.4E−11; RBFOX1, 9.3E+00, 5.2E−13; ST6GAL1, |
| | 9.5E+00, 1.1E−19; ATG10, 1.0E+01, 6.6E−13; LOC105375334, 1.0E+01, 8.9E−14; PARK2, 1.1E+01, 1.6E−11; CHODL, 1.1E+01, 7.3E−20; FAF1, 1.1E+01, |
| | 9.4E−17; ANKDD1B, 1.2E+01, 3.0E−25; CACNA2D3, 1.2E+01, 2.0E−21; LOC105376755, 1.5E+01, 6.1E−23 |
| 15 | H2AC11, −1.6E+01, 3.7E−04; H2AC14, −1.2E+01, 2.2E−02; H3C11, −1.0E+01, 1.7E−02; FRMPD1, 3.4E+00, 1.9E−02; VASH1, 4.5E+00, 4.9E−02; SHC3, |
| | 6.5E+00, 3.9E−02; EGFLAM, 6.7E+00, 7.5E−04; LHX8, 7.0E+00, 5.5E−03; GRIK3, 7.8E+00, 1.3E−02; ZFHX4, 8.6E+00, 3.8E−02; LOC105374322, 8.9E+00, |
| | 1.5E−02; NTNG1, 8.9E+00, 1.3E−02; PLCL1, 9.0E+00, 5.5E−03; ZBTB20, 9.6E+00, 2.4E−02; LOC105377703, 9.8E+00, 3.9E−04; DGKB, 9.9E+00, 4.2E−02; |
| | PCDH15, 1.0E+01, 2.4E−03; PITX2, 1.1E+01, 4.0E−03; ANTXR2, 1.1E+01, 6.1E−03; CNTN6, 1.1E+01, 4.0E−04; TNFRSF19, 1.1E+01, 5.3E−05; NCOA1, |
| | 1.1E+01, 3.8E−02; CNTN4, 1.2E+01, 4.0E−02; PTK2, 1.2E+01, 3.8E−02; SOX5, 1.2E+01, 4.4E−02; CDH2, 1.2E+01, 4.6E−02; MARCHF1 , 1.2E+01, 2.5E−03; |
| | MAP2, 1.2E+01, 2.6E−02; PPP2R2B, 1.3E+01, 1.8E−02; NRCAM, 1.3E+01, 6.1E−03; TLE4, 1.3E+01, 1.1E−02; CELF2, 1.3E+01, 6.2E−03; FBN2, 1.3E+01, |
| | 7.5E−03; NRG1, 1.4E+01, 1.3E−02; LTBP1, 1.4E+01, 9.2E−03; SEMA3A, 1.4E+01, 2.7E−03; PKNOX2, 1.4E+01, 2.1E−04; SEMA3D, 1.4E+01, 2.7E−05; |
| | HDAC9, 1.5E+01, 4.5E−04; PCDH7, 1.5E+01, 1.1E−03; CADPS, 1.5E+01, 6.6E−04; GLCCI1, 1.5E+01, 4.5E−05; DOK6, 1.5E+01, 8.8E−07; CHN2, 1.6E+01, |
| | 4.5E−05; CDK14, 1.6E+01, 2.1E−04; GPC6, 1.6E+01, 2.1E−04; ATP2B1, 1.7E+01, 4.5E−05; DACH1, 1.8E+01, 1.1E−04; NOVA1-AS1, 2.1E+01, 7.8E−09; |
| | SEMA6D, 2.2E+01, 1.6E−07 |
| 16 | ADAMTS18, −7.4E+00, 3.9E−02; ERBB4, 6.5E+01, 2.0E−03; LOC102724340, 4.4E+01, 3.5E−02; LOC107984125, 4.7E+01, 1.2E−02 |
| 17 | B9D1, −1.3E+00, 4.6E−02; ADO, −1.1E+00, 4.0E−02; BOLA3, −1.1E+00, 4.0E−02; FAM219A, −1.1E+00, 4.0E−02; GTF2A2, −1.1E+00, 4.0E−02; IFITM3, |
| | −1.1E+00, 4.0E−02; IKZF2, −1.1E+00, 4.0E−02; ITM2A, −1.1E+00, 4.0E−02; MGAT1, −1.1E+00, 4.0E−02; PFKL, −1.1E+00, 4.0E−02; PLPP5, −1.1E+00, 4.0E−02; |
| | PLPP6, −1.1E+00, 4.0E−02; PYCR2, −1.1E+00, 4.0E−02; RAB11FIP1, −1.1E+00, 4.0E−02; RBM23, −1.1E+00, 4.0E−02; ZNF605, −1.1E+00, 4.0E−02; NCKAP5, |
| | 5.2E+00, 3.4E−02 |

### Table 19A-19D.—Predicted TF Combinations for Reference Cell Types.

TABLE 19A
Hierarchical clustering of TF ORFs for TF Atlas
differentiated cells into 365 clusters.

| TF ORF | Cluster |
|---|---|
| TFORF0483-ZNF223 | 1 |
| TFORF1479-TP63 | 1 |
| TFORF2682-ZMYND11 | 1 |
| TFORF2467-IRF5 | 2 |
| TFORF2706-TFCP2L1 | 2 |
| TFORF0524-PAX4 | 3 |
| TFORF0974-GFI1B | 3 |
| TFORF1923-ZBTB20 | 3 |
| TFORF2132-LCOR | 3 |
| TFORF3344-ZNF280A | 3 |
| TFORF0501-EGR4 | 4 |
| TFORF0606-PUF60 | 4 |
| TFORF1157-DMBX1 | 4 |
| TFORF1412-ZNF562 | 4 |
| TFORF1592-ZNF771 | 4 |
| TFORF0292-MEF2B | 5 |
| TFORF0519-PAX5 | 5 |
| TFORF0738-ZNF155 | 5 |
| TFORF0853-ZIC5 | 5 |
| TFORF1030-RARG | 5 |
| TFORF1165-PRKCD | 5 |
| TFORF1273-DPF2 | 5 |
| TFORF1370-ZNF141 | 5 |
| TFORF2107-ZBTB37 | 5 |
| TFORF2328-CIZ1 | 5 |
| TFORF2333-ZNF491 | 5 |
| TFORF2411-KLF3 | 5 |
| TFORF2855-MAPK8IP1 | 5 |
| TFORF3109-ELF5 | 5 |
| TFORF3137-HEY1 | 5 |
| TFORF0054-ZNF679 | 6 |
| TFORF0843-ZSCAN10 | 6 |
| TFORF0849-ZIC4 | 6 |
| TFORF1362-SP100 | 6 |
| TFORF1535-ZBTB44 | 6 |
| TFORF0514-PAX5 | 7 |
| TFORF0515-PAX5 | 7 |
| TFORF0517-PAX5 | 7 |
| TFORF0518-PAX5 | 7 |
| TFORF0537-PAX2 | 7 |
| TFORF0538-PAX2 | 7 |
| TFORF0742-ZNF485 | 7 |
| TFORF1277-ZNF587 | 7 |
| TFORF1302-ZMIZ2 | 7 |
| TFORF1921-ZBTB22 | 7 |
| TFORF2225-ZNF343 | 7 |
| TFORF2501-PML | 7 |
| TFORF3201-ZNF829 | 7 |
| TFORF3418-NFE2L2 | 7 |
| TFORF3504-ZNF543 | 7 |
| TFORF0478-ZNF222 | 8 |
| TFORF0552-ZNF611 | 8 |
| TFORF1981-TBX4 | 8 |
| TFORF2882-XBP1 | 8 |
| TFORF0336-ZNF91 | 9 |
| TFORF0698-BATF2 | 9 |
| TFORF0837-ZSCAN18 | 9 |
| TFORF0901-ZNF382 | 9 |
| TFORF1325-KLF16 | 9 |
| TFORF1421-ZNF211 | 9 |
| TFORF2188-ZNF410 | 9 |
| TFORF2214-CREB3L4 | 9 |
| TFORF2584-MIXL1 | 9 |
| TFORF2942-ESRRG | 9 |
| TFORF0165-SIX5 | 10 |
| TFORF0397-ZNF2 | 10 |
| TFORF0507-CDK2 | 10 |
| TFORF1554-SP110 | 10 |
| TFORF2181-ZNF417 | 10 |
| TFORF3324-XRCC6 | 10 |
| TFORF3441-MNAT1 | 10 |
| TFORF0464-TRIM22 | 11 |
| TFORF0523-PAX5 | 11 |
| TFORF0610-RBPJ | 11 |
| TFORF1806-TBX15 | 11 |
| TFORF1849-ETS1 | 11 |
| TFORF1930-XRCC6 | 11 |
| TFORF2124-ZNF747 | 11 |
| TFORF2372-ZNF468 | 11 |
| TFORF2513-PDCD2 | 11 |
| TFORF2621-ZXDA | 11 |
| TFORF2970-RORC | 11 |
| TFORF3464-KLF7 | 11 |
| TFORF3500-BATF3 | 11 |
| TFORF0588-FOXO3 | 12 |
| TFORF1341-POU5F1 | 12 |
| TFORF1493-FOSL1 | 12 |
| TFORF1680-GTF2IRD2B | 12 |
| TFORF1936-MEIS2 | 12 |
| TFORF2340-MITF | 12 |
| TFORF0324-LCORL | 13 |
| TFORF1081-NOBOX | 13 |
| TFORF3012-HSF2 | 13 |
| TFORF3222-FOXS1 | 13 |
| TFORF3385-ZIC3 | 13 |
| TFORF0398-ZNF2 | 14 |
| TFORF1000-ZNF302 | 14 |
| TFORF1051-HKR1 | 14 |
| TFORF1987-ZNF534 | 14 |
| TFORF0632-VPS72 | 15 |
| TFORF0835-HSFY1 | 15 |
| TFORF3292-MXD3 | 15 |
| TFORF0046-MAX | 16 |
| TFORF1256-TP53 | 16 |
| TFORF1299-MAEL | 16 |
| TFORF2098-ZKSCAN1 | 16 |
| TFORF2482-MXD3 | 16 |
| TFORF3403-ZNF488 | 16 |
| TFORF1880-CREBZF | 17 |
| TFORF2731-ZNF669 | 17 |
| TFORF3483-PBX4 | 17 |
| TFORF0630-NR112 | 18 |
| TFORF2717-TFCP2 | 18 |
| TFORF3429-ZNF302 | 18 |
| TFORF3440-ING1 | 18 |
| TFORF0154-THAP7 | 19 |
| TFORF0547-PAX9 | 19 |
| TFORF0851-ZIC4 | 19 |
| TFORF2422-RBPJL | 19 |
| TFORF3187-RAD21 | 19 |
| TFORF0127-SP8 | 20 |
| TFORF0156-EWSR1 | 20 |
| TFORF1224-AKNA | 20 |
| TFORF2065-NKX2-5 | 20 |
| TFORF2611-ZNF277 | 20 |
| TFORF2629-INSM2 | 20 |
| TFORF2665-ZBED2 | 20 |
| TFORF2990-NFE2L1 | 20 |
| TFORF1573-ZNF684 | 21 |
| TFORF2201-POU4F2 | 21 |
| TFORF2756-BARHL2 | 21 |
| TFORF0204-ELK4 | 22 |
| TFORF0414-CTCFL | 22 |
| TFORF1677-RUNX1T1 | 22 |
| TFORF2966-NROB1 | 22 |
| TFORF0493-ZSCAN2 | 23 |
| TFORF1489-NR6A1 | 23 |
| TFORF2937-FOS | 23 |
| TFORF0532-PAX1 | 24 |
| TFORF0981-KLF6 | 24 |
| TFORF1967-PPARD | 24 |
| TFORF2879-ELF2 | 24 |
| TFORF0126-CXXC1 | 25 |
| TFORF1105-GTF2IRD2 | 25 |
| TFORF1621-ZNF512 | 25 |
| TFORF1741-ZNF768 | 25 |
| TFORF2439-YEATS4 | 25 |
| TFORF3347-PITX1 | 25 |
| TFORF0543-ZFAT | 26 |
| TFORF1541-ZBTB49 | 26 |
| TFORF0678-PRDM14 | 27 |
| TFORF1289-GMEB2 | 27 |
| TFORF1727-ZNF692 | 27 |
| TFORF1335-POU3F2 | 28 |
| TFORF2821-IKZF5 | 28 |
| TFORF3395-TBX22 | 28 |
| TFORF3545-PIAS1 | 28 |
| TFORF1941-MIER1 | 29 |
| TFORF3002-NFYC | 29 |
| TFORF3170-CNOT3 | 29 |
| TFORF1019-SCRT1 | 30 |
| TFORF2334-CTNNB1 | 30 |
| TFORF2360-ZNF641 | 30 |
| TFORF2816-FOSB | 30 |
| TFORF1416-ZNF215 | 31 |
| TFORF2292-HES7 | 31 |
| TFORF2574-HSF2 | 31 |
| TFORF2743-T | 31 |
| TFORF1133-CARF | 32 |
| TFORF1339-POU3F4 | 32 |
| TFORF2315-RXRB | 32 |
| TFORF2830-IKZF3 | 32 |
| TFORF3405-KCNIP4 | 32 |
| TFORF1025-FOXI2 | 33 |
| TFORF2365-ZNF398 | 33 |
| TFORF3160-SNAI3 | 33 |
| TFORF0276-TCF3 | 34 |
| TFORF0780-GTF2H1 | 34 |
| TFORF1480-TP63 | 34 |
| TFORF2508-PML | 34 |
| TFORF1560-IL18 | 35 |
| TFORF3406-ELOF1 | 35 |
| TFORF3414-NEUROG1 | 35 |
| TFORF0652-NR113 | 36 |
| TFORF1080-NOBOX | 36 |
| TFORF1536-ZBTB44 | 36 |
| TFORF1584-ZNF775 | 36 |
| TFORF0599-ZNF891 | 37 |
| TFORF0923-NR2F2 | 37 |
| TFORF2698-ACTL6A | 37 |
| TFORF3470-ZNF726 | 37 |
| TFORF2108-L3MBTL4 | 38 |
| TFORF2955-HMG20B | 38 |
| TFORF1278-ZNF587 | 39 |
| TFORF1876-CCNT1 | 39 |
| TFORF2019-MYBL2 | 39 |
| TFORF2634-TFDP2 | 39 |
| TFORF2826-IKZF1 | 40 |
| TFORF3421-YBX2 | 40 |
| TFORF0257-TCF4 | 41 |
| TFORF2809-ETV7 | 41 |
| TFORF0021-IRX1 | 42 |
| TFORF1742-ZNF765 | 42 |
| TFORF2523-NRF1 | 42 |
| TFORF2710-DMRTA1 | 42 |
| TFORF0838-ZSCAN18 | 43 |
| TFORF1824-ZNF138 | 43 |
| TFORF2406-NFE2L1 | 43 |
| TFORF3169-GTF2I | 43 |
| TFORF1488-NR6A1 | 44 |
| TFORF2919-NFIB | 44 |
| TFORF2980-FOXP3 | 44 |
| TFORF2999-CDK2 | 44 |
| TFORF3495-CLOCK | 44 |
| TFORF1161-NFKBIL1 | 45 |
| TFORF3510-TCF25 | 45 |
| TFORF0989-KLF9 | 46 |
| TFORF1385-TMF1 | 46 |
| TFORF2613-ZNF276 | 46 |
| TFORF2993-SKP2 | 46 |
| TFORF0898-ING1 | 47 |
| TFORF2507-PML | 47 |
| TFORF3298-EZH2 | 47 |
| TFORF1563-ZNF682 | 48 |
| TFORF1809-TBX19 | 48 |
| TFORF1978-TBX1 | 48 |
| TFORF0188-DMRTC2 | 49 |
| TFORF1329-TFAP2A | 49 |
| TFORF3015-PPARA | 49 |
| TFORF0236-MYCN | 50 |
| TFORF0673-ZNF827 | 50 |
| TFORF0739-ZNF155 | 50 |
| TFORF2949-GCM2 | 50 |
| TFORF0145-PHOX2B | 51 |
| TFORF0530-PAX6 | 51 |
| TFORF1027-RARA | 51 |
| TFORF2827-IKZF1 | 51 |
| TFORF1626-ZNF514 | 52 |
| TFORF3059-FOSL1 | 52 |
| TFORF3060-BACH1 | 52 |
| TFORF3318-TFCP2 | 52 |
| TFORF0957-ZNF497 | 53 |
| TFORF2060-NKX2-1 | 53 |
| TFORF2343-MITF | 53 |
| TFORF3189-ZNF558 | 53 |
| TFORF0484-ZFP92 | 54 |
| TFORF1314-AEBP2 | 54 |
| TFORF1765-ZNF23 | 54 |
| TFORF1945-MIER1 | 54 |
| TFORF2854-FEV | 54 |
| TFORF3004-PCGF2 | 54 |
| TFORF2052-BCL6 | 55 |
| TFORF2383-MBD1 | 55 |
| TFORF2986-MECP2 | 55 |
| TFORF3030-ZNF415 | 55 |
| TFORF0584-SRF | 56 |
| TFORF1853-ZBTB1 | 56 |
| TFORF3064-TERF1 | 56 |
| TFORF0201-RFX3 | 57 |
| TFORF0277-TCF3 | 57 |
| TFORF0629-NR112 | 57 |
| TFORF0913-ZNF835 | 57 |
| TFORF2033-OSR1 | 57 |
| TFORF2577-HSF4 | 57 |
| TFORF2628-NONO | 57 |
| TFORF0052-MAZ | 58 |
| TFORF1702-E2F4 | 58 |
| TFORF2643-PAX3 | 58 |
| TFORF2685-ZMYND11 | 58 |
| TFORF3232-JUNB | 58 |
| TFORF0268-TCF4 | 59 |
| TFORF0688-PRDM10 | 59 |
| TFORF0929-ATOH8 | 59 |
| TFORF1075-NFATC4 | 59 |
| TFORF1251-ZNF133 | 59 |
| TFORF1267-ZNF135 | 59 |
| TFORF1336-POU3F1 | 59 |
| TFORF1570-ZNF680 | 59 |
| TFORF2053-BCL6 | 59 |
| TFORF3013-MEF2A | 59 |
| TFORF3092-NPAS1 | 59 |
| TFORF1946-MIER1 | 60 |
| TFORF2264-ZNF286A | 60 |
| TFORF3036-ATF4 | 60 |
| TFORF0400-ZNF2 | 61 |
| TFORF1240-LBX2 | 61 |
| TFORF2368-MBD4 | 61 |
| TFORF0103-LEUTX | 62 |
| TFORF1774-ZNF500 | 62 |
| TFORF2221-YAP1 | 62 |
| TFORF2690-TEAD2 | 62 |
| TFORF0899-ING1 | 63 |
| TFORF2502-PML | 63 |
| TFORF2578-MEIS3 | 63 |
| TFORF0520-PAX5 | 64 |
| TFORF0535-ZNF584 | 64 |
| TFORF1658-LEF1 | 64 |
| TFORF2462-IRF7 | 64 |
| TFORF3234-VSX1 | 64 |
| TFORF1465-VAV1 | 65 |
| TFORF1856-NR4A2 | 65 |
| TFORF2822-IKZF4 | 65 |
| TFORF2911-NFIC | 65 |
| TFORF0151-THAP5 | 66 |
| TFORF1032-RARG | 66 |
| TFORF1698-E2F6 | 66 |
| TFORF2391-ZNF461 | 66 |
| TFORF2736-PLK4 | 66 |
| TFORF3102-ZNF689 | 66 |
| TFORF3338-HDAC1 | 66 |
| TFORF0075-KCNIP4 | 67 |
| TFORF0115-SMAD3 | 67 |
| TFORF0903-SPDEF | 67 |
| TFORF1360-SP100 | 67 |
| TFORF2189-ZNF410 | 67 |
| TFORF2227-ZNF343 | 67 |
| TFORF2481-MXD4 | 67 |
| TFORF3407-ZNF397 | 67 |
| TFORF0509-TSHZ2 | 68 |
| TFORF0966-ZNF493 | 68 |
| TFORF1380-ZNF787 | 68 |
| TFORF2160-TXK | 68 |
| TFORF2692-TEAD1 | 68 |
| TFORF3086-STAT1 | 68 |
| TFORF3285-FEZF1 | 68 |
| TFORF3439-FOXI1 | 68 |
| TFORF1018-ZNF548 | 69 |
| TFORF1074-NFATC4 | 69 |
| TFORF1373-ZNF143 | 69 |
| TFORF2494-ZBTB18 | 69 |
| TFORF2711-ZNF710 | 69 |
| TFORF3218-FOXN3 | 69 |
| TFORF3262-CEBPE | 69 |
| TFORF0014-ZNF707 | 70 |
| TFORF1989-ZNF530 | 70 |
| TFORF3468-PKNOX1 | 70 |
| TFORF0993-KLF8 | 71 |
| TFORF1275-TPRX1 | 71 |
| TFORF1422-ZNF211 | 71 |
| TFORF1518-FOXD4L5 | 71 |
| TFORF2573-HSF2 | 71 |
| TFORF0343-ETF1 | 72 |
| TFORF0644-NR113 | 72 |
| TFORF0645-NR113 | 72 |
| TFORF0697-BATF2 | 72 |
| TFORF1037-WT1 | 72 |
| TFORF2236-GATA4 | 72 |
| TFORF3392-CNBP | 72 |
| TFORF3498-APEX1 | 72 |
| TFORF0020-IRX6 | 73 |
| TFORF2267-ARNT2 | 73 |
| TFORF2759-L3MBTL1 | 73 |
| TFORF2867-TADA3 | 73 |
| TFORF2906-DACH2 | 73 |
| TFORF3057-YAF2 | 73 |
| TFORF0810-SOHLH1 | 74 |
| TFORF1663-ARID5A | 74 |
| TFORF3024-HEY2 | 74 |
| TFORF1908-TCF7L2 | 75 |
| TFORF2369-MBD4 | 75 |
| TFORF2620-CRX | 75 |
| TFORF2697-ZFP42 | 75 |
| TFORF1285-ZNF257 | 76 |
| TFORF3158-SMARCB1 | 76 |
| TFORF3284-PBX3 | 76 |
| TFORF0170-ZNF587B | 77 |
| TFORF3114-BHLHA15 | 77 |
| TFORF1110-ISX | 78 |
| TFORF2395-ZNF396 | 78 |
| TFORF1112-RCOR3 | 79 |
| TFORF1771-TBP | 79 |
| TFORF0051-MAZ | 80 |
| TFORF0887-ZNF384 | 80 |
| TFORF1172-ZNF157 | 80 |
| TFORF1304-ZMIZ2 | 80 |
| TFORF2836-IKZF3 | 80 |
| TFORF3355-FOXN2 | 80 |
| TFORF0059-CTBP1 | 81 |
| TFORF1568-ZNF683 | 81 |
| TFORF0167-SIX1 | 82 |
| TFORF1503-GABPB1 | 82 |
| TFORF1684-HNF1B | 83 |
| TFORF2110-NR4A1 | 83 |
| TFORF0116-FOXM1 | 84 |
| TFORF0583-ZNF324 | 84 |
| TFORF1688-HNF1A | 84 |
| TFORF1689-HNF1A | 84 |
| TFORF1865-POU2F2 | 84 |
| TFORF0299-CREM | 85 |
| TFORF0638-HOXC6 | 85 |
| TFORF0839-HSFY2 | 85 |
| TFORF2455-IRF3 | 85 |
| TFORF0086-LIN28B | 86 |
| TFORF1772-TBP | 86 |
| TFORF3226-FGF3 | 86 |
| TFORF0587-NMI | 87 |
| TFORF0651-NR113 | 87 |
| TFORF1096-EN2 | 87 |
| TFORF1519-FOXD4L6 | 87 |
| TFORF1557-YAF2 | 88 |
| TFORF1717-LDB1 | 88 |
| TFORF2231-EHF | 88 |
| TFORF3279-LMO1 | 88 |
| TFORF0462-CREB5 | 89 |
| TFORF0746-PIAS3 | 89 |
| TFORF1450-DLX6 | 89 |
| TFORF1660-LEF1 | 89 |
| TFORF2273-PRDM6 | 89 |
| TFORF2397-ZNF397 | 89 |
| TFORF3001-DR1 | 89 |
| TFORF0597-SMARCB1 | 90 |
| TFORF1125-ENO1 | 90 |
| TFORF0235-MYCN | 91 |
| TFORF1713-LDB2 | 91 |
| TFORF3514-PURB | 91 |
| TFORF0628-NR112 | 92 |
| TFORF1042-TSC22D1 | 92 |
| TFORF1169-EBF1 | 92 |
| TFORF3180-RARG | 92 |
| TFORF3247-LEF1 | 92 |
| TFORF0495-EGR2 | 93 |
| TFORF0927-DDB2 | 93 |
| TFORF2492-ZBTB17 | 93 |
| TFORF0832-GTF2F1 | 94 |
| TFORF0880-HOXB3 | 94 |
| TFORF1935-MEIS2 | 94 |
| TFORF2477-OXSR1 | 94 |
| TFORF0527-PAX7 | 95 |
| TFORF1823-ZNF138 | 95 |
| TFORF2050-ATF6B | 95 |
| TFORF2683-ZMYND11 | 95 |
| TFORF0176-RELA | 96 |
| TFORF0469-KAT7 | 96 |
| TFORF0714-ZNF620 | 96 |
| TFORF1087-TULP3 | 96 |
| TFORF1196-ZNF577 | 96 |
| TFORF1324-KLF17 | 96 |
| TFORF1381-ZNF789 | 96 |
| TFORF1818-UHRF1 | 96 |
| TFORF1842-YWHAZ | 96 |
| TFORF1961-CUX1 | 96 |
| TFORF2261-DMAP1 | 96 |
| TFORF2378-MBD1 | 96 |
| TFORF2463-IRF7 | 96 |
| TFORF2614-ZNF275 | 96 |
| TFORF2681-ZMYND11 | 96 |
| TFORF2971-NR1H4 | 96 |
| TFORF3264-ARNTL2 | 96 |
| TFORF0061-CTBP2 | 97 |
| TFORF0097-PSMD14 | 97 |
| TFORF0286-MEF2C | 97 |
| TFORF0422-PBX2 | 97 |
| TFORF2129-ZNF749 | 97 |
| TFORF2243-LITAF | 97 |
| TFORF2588-CERS5 | 97 |
| TFORF2767-ZKSCAN7 | 97 |
| TFORF3537-TSC22D4 | 97 |
| TFORF2210-CREB3L3 | 98 |
| TFORF2570-TGIF1 | 98 |
| TFORF3042-TAF9 | 98 |
| TFORF0777-SHOX | 99 |
| TFORF2054-BCL3 | 99 |
| TFORF3118-ZNF581 | 99 |
| TFORF0411-CTCFL | 100 |
| TFORF1410-RNF2 | 100 |
| TFORF1862-OTP | 100 |
| TFORF2020-MYBL2 | 100 |
| TFORF2872-HMX3 | 100 |
| TFORF0129-SP9 | 101 |
| TFORF0689-HNF4G | 101 |
| TFORF0690-HNF4G | 101 |
| TFORF0691-HNF4A | 101 |
| TFORF0692-HNF4A | 101 |
| TFORF0693-HNF4A | 101 |
| TFORF0694-HNF4A | 101 |
| TFORF0695-HNF4A | 101 |
| TFORF1115-RCOR2 | 101 |
| TFORF1976-TBX1 | 101 |
| TFORF2562-ZNF655 | 101 |
| TFORF2696-ELF5 | 101 |
| TFORF2954-HNF4G | 101 |
| TFORF2957-HNF4A | 101 |
| TFORF3005-SMAD4 | 101 |
| TFORF3542-ZNF720 | 101 |
| TFORF1744-ZNF764 | 102 |
| TFORF1918-RUNX3 | 102 |
| TFORF2563-ZNF655 | 102 |
| TFORF0083-KCNIP2 | 103 |
| TFORF0311-CREM | 103 |
| TFORF1084-SPZ1 | 103 |
| TFORF1653-SPI1 | 103 |
| TFORF2113-SIRT6 | 103 |
| TFORF3502-VENTX | 103 |
| TFORF0143-FXN | 104 |
| TFORF0665-SCX | 104 |
| TFORF1016-ZNF549 | 104 |
| TFORF1498-RBL1 | 104 |
| TFORF1632-ZNF227 | 104 |
| TFORF1703-E2F3 | 104 |
| TFORF3271-EBF3 | 104 |
| TFORF3391-CNBP | 104 |
| TFORF0217-FOXP1 | 105 |
| TFORF0222-FOXP4 | 105 |
| TFORF0655-NR113 | 105 |
| TFORF1920-RUNX1 | 105 |
| TFORF2330-CIZ1 | 105 |
| TFORF2389-ZNF391 | 105 |
| TFORF2505-PML | 105 |
| TFORF1837-EZH2 | 106 |
| TFORF1968-YY1 | 106 |
| TFORF2112-SIRT6 | 106 |
| TFORF2565-ZNF655 | 106 |
| TFORF0709-ZNF629 | 107 |
| TFORF1681-SIM2 | 107 |
| TFORF1773-ZNF501 | 107 |
| TFORF1883-SOX30 | 107 |
| TFORF3034-OTX1 | 107 |
| TFORF1242-LBX1 | 108 |
| TFORF2592-ZNF354B | 108 |
| TFORF3186-GTF2H3 | 108 |
| TFORF0711-ZNF625 | 109 |
| TFORF1049-HKR1 | 109 |
| TFORF1282-SALL4 | 109 |
| TFORF1447-NR5A2 | 109 |
| TFORF1448-NR5A2 | 109 |
| TFORF2641-PAX3 | 109 |
| TFORF2922-NFIA | 109 |
| TFORF3040-ZIM3 | 109 |
| TFORF3131-NR5A2 | 109 |
| TFORF3363-NR5A1 | 109 |
| TFORF0787-REPIN1 | 110 |
| TFORF0958-ZNF496 | 110 |
| TFORF1056-NFATC1 | 110 |
| TFORF1791-FOXE3 | 110 |
| TFORF3164-RUVBL1 | 110 |
| TFORF3211-TADA2B | 110 |
| TFORF3436-TOX4 | 110 |
| TFORF0255-TCF4 | 111 |
| TFORF1706-E2F1 | 111 |
| TFORF2312-ETV3 | 111 |
| TFORF3196-ZIC1 | 111 |
| TFORF0888-ZNF384 | 112 |
| TFORF1185-MAP3K7 | 112 |
| TFORF2424-RBPJL | 112 |
| TFORF0184-SHOX2 | 113 |
| TFORF0548-PAX8 | 113 |
| TFORF2504-PML | 113 |
| TFORF0948-EMX2 | 114 |
| TFORF3457-IRF9 | 114 |
| TFORF3534-BORCS8-MEF2B | 114 |
| TFORF0491-ZSCAN1 | 115 |
| TFORF1014-ZNF540 | 115 |
| TFORF2366-MBD4 | 115 |
| TFORF0316-MEF2D | 116 |
| TFORF1303-ZMIZ2 | 116 |
| TFORF2198-MLXIPL | 116 |
| TFORF2799-TAF6 | 116 |
| TFORF3031-STRAP | 116 |
| TFORF3336-ZBTB37 | 116 |
| TFORF2190-ZNF410 | 117 |
| TFORF2896-MTA2 | 117 |
| TFORF2908-NFIC | 117 |
| TFORF3246-HOXC9 | 117 |
| TFORF0044-ZNF672 | 118 |
| TFORF0423-PBX3 | 118 |
| TFORF2622-CRTC1 | 118 |
| TFORF3356-NRF1 | 118 |
| TFORF0265-TCF4 | 119 |
| TFORF0334-ZNF331 | 119 |
| TFORF1257-TP53 | 119 |
| TFORF1817-UHRF1 | 119 |
| TFORF2351-ZNF17 | 119 |
| TFORF2650-ZNF586 | 119 |
| TFORF2724-ZNF74 | 119 |
| TFORF3352-HESX1 | 119 |
| TFORF0001-HIF3A | 120 |
| TFORF0841-ZSCAN10 | 120 |
| TFORF1057-NFATC1 | 120 |
| TFORF1101-GTF2IRD1 | 120 |
| TFORF1122-HNRNPAB | 120 |
| TFORF1898-PATZ1 | 120 |
| TFORF1904-TCF7L2 | 120 |
| TFORF2143-ZNF525 | 120 |
| TFORF2230-EHF | 120 |
| TFORF2335-CTNNB1 | 120 |
| TFORF2558-TLX1 | 120 |
| TFORF2568-TGIF1 | 120 |
| TFORF2930-NFIX | 120 |
| TFORF2984-MAP3K7 | 120 |
| TFORF3084-ZFP36L1 | 120 |
| TFORF3455-ZNF513 | 120 |
| TFORF2233-SMARCD1 | 121 |
| TFORF2524-ERCC8 | 121 |
| TFORF0982-KLF6 | 122 |
| TFORF1721-DMRT2 | 122 |
| TFORF2408-FOXF1 | 122 |
| TFORF3428-TRIM27 | 122 |
| TFORF0213-FOXP1 | 123 |
| TFORF0844-ZSCAN12 | 123 |
| TFORF1088-TULP3 | 123 |
| TFORF0420-SKIL | 124 |
| TFORF1627-FOXJ3 | 124 |
| TFORF2997-GATA2 | 124 |
| TFORF1097-HSFX1 | 125 |
| TFORF1344-FEZF2 | 125 |
| TFORF1526-MXI1 | 125 |
| TFORF1715-LDB2 | 125 |
| TFORF2195-MLXIPL | 125 |
| TFORF3134-TFE3 | 125 |
| TFORF3172-STAT6 | 125 |
| TFORF3174-ARID5A | 125 |
| TFORF1386-ZNF362 | 126 |
| TFORF1781-ZNF506 | 126 |
| TFORF2232-EHF | 126 |
| TFORF2991-ID2 | 126 |
| TFORF2843-RHOXF2B | 127 |
| TFORF2881-XBP1 | 127 |
| TFORF2916-NFIB | 127 |
| TFORF3144-MIER2 | 127 |
| TFORF3311-CREB3 | 127 |
| TFORF3314-SMAD9 | 127 |
| TFORF0897-ING1 | 128 |
| TFORF1010-ZNF547 | 128 |
| TFORF1217-PRRX1 | 128 |
| TFORF1260-TP53 | 128 |
| TFORF2317-ETV4 | 128 |
| TFORF0605-PUF60 | 129 |
| TFORF1977-TBX1 | 129 |
| TFORF2005-ZNF664 | 129 |
| TFORF3032-SIRT6 | 129 |
| TFORF1511-STAT5A | 130 |
| TFORF1561-ZNF688 | 130 |
| TFORF3528-NME2 | 130 |
| TFORF0306-CREM | 131 |
| TFORF0394-ZNF7 | 131 |
| TFORF0874-HOXB9 | 131 |
| TFORF1044-TSC22D3 | 131 |
| TFORF1955-ESR2 | 131 |
| TFORF2162-GRHL1 | 131 |
| TFORF2404-NFE2L1 | 131 |
| TFORF2423-RBPJL | 131 |
| TFORF3308-GTF2A1L | 131 |
| TFORF3364-ZNF232 | 131 |
| TFORF3416-ZNF410 | 131 |
| TFORF0533-PAX1 | 132 |
| TFORF0666-TGFB111 | 132 |
| TFORF1366-ISL2 | 132 |
| TFORF2252-ZNF630 | 132 |
| TFORF2631-INSM1 | 132 |
| TFORF2689-TEAD2 | 132 |
| TFORF3306-THAP1 | 132 |
| TFORF3384-HOXC10 | 132 |
| TFORF3433-DEK | 132 |
| TFORF3506-LCOR | 132 |
| TFORF1291-SP140L | 133 |
| TFORF2829-IKZF3 | 133 |
| TFORF1039-TSC22D1 | 134 |
| TFORF1387-ZNF367 | 134 |
| TFORF0362-TCEB2 | 135 |
| TFORF2131-ZGLP1 | 135 |
| TFORF2354-ZNF12 | 135 |
| TFORF2444-SMARCE1 | 135 |
| TFORF3016-MLX | 135 |
| TFORF3466-SIM2 | 135 |
| TFORF3489-IKZF1 | 135 |
| TFORF0516-PAX5 | 136 |
| TFORF2319-TAF1B | 136 |
| TFORF2654-ARNTL2 | 136 |
| TFORF0426-PBX3 | 137 |
| TFORF1126-THAP3 | 137 |
| TFORF1221-HELT | 137 |
| TFORF2152-BCL11A | 137 |
| TFORF2569-TGIF1 | 137 |
| TFORF1649-REL | 138 |
| TFORF2350-ZNF16 | 138 |
| TFORF2576-HSF4 | 138 |
| TFORF2800-TAF5 | 138 |
| TFORF3141-ALX3 | 138 |
| TFORF3147-ZBTB43 | 138 |
| TFORF1884-ZIC2 | 139 |
| TFORF3266-ZNF213 | 139 |
| TFORF3482-SOX2 | 139 |
| TFORF1099-UBP1 | 140 |
| TFORF3494-OSR2 | 140 |
| TFORF0826-LHX9 | 141 |
| TFORF1516-ZNF737 | 141 |
| TFORF1664-ARID5A | 141 |
| TFORF1878-CCNT2 | 141 |
| TFORF2035-OSR2 | 141 |
| TFORF3259-MEF2D | 141 |
| TFORF0279-ZNF776 | 142 |
| TFORF0985-KLF4 | 142 |
| TFORF1246-ZNF133 | 142 |
| TFORF1298-ZFP64 | 142 |
| TFORF1357-ILF3 | 142 |
| TFORF1725-ZNF691 | 142 |
| TFORF3154-ZFP2 | 142 |
| TFORF3411-CRTC2 | 142 |
| TFORF0589-FOXO1 | 143 |
| TFORF0868-NR1H3 | 143 |
| TFORF1123-HNRNPAB | 143 |
| TFORF1860-NR4A3 | 143 |
| TFORF1960-CUX1 | 143 |
| TFORF2186-ZNF414 | 143 |
| TFORF2466-IRF5 | 143 |
| TFORF2635-TFDP2 | 143 |
| TFORF2798-TAF6 | 143 |
| TFORF2915-NFIB | 143 |
| TFORF2933-HOXD3 | 143 |
| TFORF3230-FOXJ1 | 143 |
| TFORF3386-IRF4 | 143 |
| TFORF0192-RFX4 | 144 |
| TFORF0325-LCORL | 144 |
| TFORF1609-ZZZ3 | 144 |
| TFORF1962-CUX1 | 144 |
| TFORF3138-PPARG | 144 |
| TFORF3345-LMO3 | 144 |
| TFORF3480-ZNF785 | 144 |
| TFORF0611-RBPJ | 145 |
| TFORF0618-ZSCAN26 | 145 |
| TFORF2204-MYNN | 145 |
| TFORF2239-GATA5 | 145 |
| TFORF2808-ETV7 | 145 |
| TFORF0240-MYCL | 146 |
| TFORF0505-CDK2 | 146 |
| TFORF0766-ZNF552 | 146 |
| TFORF1215-NME2 | 146 |
| TFORF1836-EZH2 | 146 |
| TFORF2142-ZNF525 | 146 |
| TFORF2664-ZBED1 | 146 |
| TFORF3021-DLX4 | 146 |
| TFORF3332-PUF60 | 146 |
| TFORF3540-TAL2 | 146 |
| TFORF0082-KCNIP2 | 147 |
| TFORF0085-KCNIP2 | 147 |
| TFORF0267-TCF4 | 147 |
| TFORF0546-ZFAT | 147 |
| TFORF0840-HSFY2 | 147 |
| TFORF1382-ZNF789 | 147 |
| TFORF1850-YWHAE | 147 |
| TFORF2414-ZNF268 | 147 |
| TFORF2585-CERS6 | 147 |
| TFORF2716-SLC2A4RG | 147 |
| TFORF1295-ZFP64 | 148 |
| TFORF1881-SOX30 | 148 |
| TFORF0453-THRA | 149 |
| TFORF0857-VSX1 | 149 |
| TFORF2281-MYBBP1A | 149 |
| TFORF2567-ZNF654 | 149 |
| TFORF2656-STAT3 | 149 |
| TFORF3053-ZBTB44 | 149 |
| TFORF0488-ZFP90 | 150 |
| TFORF0755-ZNF319 | 150 |
| TFORF1045-TSC22D2 | 150 |
| TFORF1238-HOMEZ | 150 |
| TFORF1458-TFEB | 150 |
| TFORF1761-ZNF24 | 150 |
| TFORF2077-MYB | 150 |
| TFORF2270-PSAP | 150 |
| TFORF0003-HIF3A | 151 |
| TFORF0502-NFE4 | 151 |
| TFORF2357-ZNF649 | 151 |
| TFORF2817-FOXD4L3 | 151 |
| TFORF0153-THAP6 | 152 |
| TFORF0475-SP140 | 152 |
| TFORF1163-NFKBIL1 | 152 |
| TFORF1657-SPIB | 152 |
| TFORF1743-ZNF764 | 152 |
| TFORF3121-ZNF341 | 152 |
| TFORF3299-MEIS2 | 152 |
| TFORF3330-TBX20 | 152 |
| TFORF2229-ZNF730 | 153 |
| TFORF2361-ZNF641 | 153 |
| TFORF0468-KAT7 | 154 |
| TFORF0633-VPS72 | 154 |
| TFORF0650-NR113 | 154 |
| TFORF0799-ATF3 | 154 |
| TFORF1782-ZNF239 | 154 |
| TFORF1910-TCF7L2 | 154 |
| TFORF2015-HMGXB4 | 154 |
| TFORF2046-ARID3B | 154 |
| TFORF3354-MXD1 | 154 |
| TFORF0037-SP5 | 155 |
| TFORF0987-KLF2 | 155 |
| TFORF1432-NR3C1 | 155 |
| TFORF1453-DLX2 | 155 |
| TFORF2006-CAPN15 | 155 |
| TFORF2589-ZNF354A | 155 |
| TFORF2719-ZNF79 | 155 |
| TFORF2868-TADA3 | 155 |
| TFORF3125-ZNF300 | 155 |
| TFORF0609-MAFF | 156 |
| TFORF2950-MAFB | 156 |
| TFORF3198-OVOL2 | 156 |
| TFORF3543-CSDC2 | 156 |
| TFORF0358-ZNF33A | 157 |
| TFORF0983-KLF5 | 157 |
| TFORF0984-KLF5 | 157 |
| TFORF0988-KLF1 | 157 |
| TFORF1371-ZNF140 | 157 |
| TFORF2660-STAT1 | 157 |
| TFORF2871-HMX1 | 157 |
| TFORF3130-IRF8 | 157 |
| TFORF3412-EGR1 | 157 |
| TFORF3444-KCNIP2 | 157 |
| TFORF3463-ETV7 | 157 |
| TFORF0455-TAF4B | 158 |
| TFORF0511-TSHZ1 | 158 |
| TFORF1893-AHRR | 158 |
| TFORF0208-FOXP2 | 159 |
| TFORF0209-FOXP2 | 159 |
| TFORF0210-FOXP2 | 159 |
| TFORF0215-FOXP1 | 159 |
| TFORF0216-FOXP1 | 159 |
| TFORF0220-FOXP4 | 159 |
| TFORF0221-FOXP4 | 159 |
| TFORF1365-ISL1 | 159 |
| TFORF3181-PATZ1 | 159 |
| TFORF0214-FOXP1 | 160 |
| TFORF0549-PAX8 | 160 |
| TFORF0744-PIAS2 | 160 |
| TFORF0997-ZNF302 | 160 |
| TFORF1093-ZBTB8B | 160 |
| TFORF1413-ZNF561 | 160 |
| TFORF2057-ARGFX | 160 |
| TFORF2308-ETV1 | 160 |
| TFORF2309-ETV1 | 160 |
| TFORF2310-ETV1 | 160 |
| TFORF0624-NKRF | 161 |
| TFORF1780-ZNF506 | 161 |
| TFORF2401-NFE2L3 | 161 |
| TFORF3334-SP100 | 161 |
| TFORF1631-ZNF226 | 162 |
| TFORF1924-ZBTB21 | 162 |
| TFORF2469-IRF8 | 162 |
| TFORF2514-PDCD2 | 162 |
| TFORF2649-ZNF586 | 162 |
| TFORF2752-ZNF444 | 162 |
| TFORF3145-ZNF660 | 162 |
| TFORF3419-ZNF562 | 162 |
| TFORF2172-ZNF419 | 163 |
| TFORF2495-ZBTB18 | 163 |
| TFORF2572-ZNF652 | 163 |
| TFORF2804-ETV2 | 163 |
| TFORF2837-IKZF3 | 163 |
| TFORF2994-SKP2 | 163 |
| TFORF3203-ZNF526 | 163 |
| TFORF1804-ZNF347 | 164 |
| TFORF1808-TBX18 | 164 |
| TFORF2503-PML | 164 |
| TFORF2636-TFDP2 | 164 |
| TFORF2677-GABPA | 164 |
| TFORF2703-ESRRA | 164 |
| TFORF2943-ESRRG | 164 |
| TFORF3515-HDGF | 164 |
| TFORF0150-THAP5 | 165 |
| TFORF0263-TCF4 | 165 |
| TFORF0312-CREM | 165 |
| TFORF0724-NFKB2 | 165 |
| TFORF0959-ERF | 165 |
| TFORF1678-RUNX1T1 | 165 |
| TFORF2910-NFIC | 165 |
| TFORF2920-NFIB | 165 |
| TFORF2923-NFIA | 165 |
| TFORF1549-TAZ | 166 |
| TFORF2030-TGIF2LX | 166 |
| TFORF2130-PFDN5 | 166 |
| TFORF2170-BHLHE22 | 166 |
| TFORF2194-TFAM | 166 |
| TFORF2277-PRDM2 | 166 |
| TFORF2413-ZNF268 | 166 |
| TFORF2939-HOXA6 | 166 |
| TFORF0078-KCNIP4 | 167 |
| TFORF0271-TCF7 | 167 |
| TFORF0802-ATF2 | 167 |
| TFORF0811-CDCA7L | 167 |
| TFORF0858-VSX1 | 167 |
| TFORF1347-RPA3 | 167 |
| TFORF1434-NFKBID | 167 |
| TFORF1507-HEY1 | 167 |
| TFORF2120-HOPX | 167 |
| TFORF2156-RHOXF2 | 167 |
| TFORF3216-ATF2 | 167 |
| TFORF3422-HES6 | 167 |
| TFORF3459-HMGB2 | 167 |
| TFORF0080-KCNIP3 | 168 |
| TFORF0379-SMARCA2 | 168 |
| TFORF0636-HOXC5 | 168 |
| TFORF0931-MECP2 | 168 |
| TFORF1843-ALX1 | 168 |
| TFORF2096-ZKSCAN1 | 168 |
| TFORF0107-TRERF1 | 169 |
| TFORF0315-CREM | 169 |
| TFORF0622-ZSCAN23 | 169 |
| TFORF0631-TERF1 | 169 |
| TFORF1107-ZNF37A | 169 |
| TFORF1472-TOX2 | 169 |
| TFORF1520-NR2E1 | 169 |
| TFORF1832-MTERF1 | 169 |
| TFORF1965-PPARD | 169 |
| TFORF2021-NPAS4 | 169 |
| TFORF2049-PURA | 169 |
| TFORF2191-RAX2 | 169 |
| TFORF2208-CREB3L2 | 169 |
| TFORF2557-ZNF69 | 169 |
| TFORF2903-DACH1 | 169 |
| TFORF3006-ZBTB12 | 169 |
| TFORF3049-CDK1 | 169 |
| TFORF3238-GTF2A1 | 169 |
| TFORF3244-ZNF483 | 169 |
| TFORF0300-CREM | 170 |
| TFORF0305-CREM | 170 |
| TFORF1430-NFKBIB | 170 |
| TFORF1820-ZNF138 | 170 |
| TFORF2023-NPAS3 | 170 |
| TFORF2314-RXRB | 170 |
| TFORF2359-ZNF644 | 170 |
| TFORF2384-MBD3 | 170 |
| TFORF2687-ZMYND11 | 170 |
| TFORF2704-ESRRA | 170 |
| TFORF2860-ID1 | 170 |
| TFORF3035-NFKBIB | 170 |
| TFORF3051-CDK1 | 170 |
| TFORF3316-MED21 | 170 |
| TFORF3373-ZNF101 | 170 |
| TFORF3396-TARBP2 | 170 |
| TFORF3410-ZKSCAN4 | 170 |
| TFORF0018-IRX4 | 171 |
| TFORF0099-HLF | 171 |
| TFORF0111-SMAD7 | 171 |
| TFORF0148-THAP4 | 171 |
| TFORF0211-FOXP3 | 171 |
| TFORF0280-IGFBP1 | 171 |
| TFORF0307-CREM | 171 |
| TFORF0310-CREM | 171 |
| TFORF0314-CREM | 171 |
| TFORF0653-NR113 | 171 |
| TFORF1052-HKR1 | 171 |
| TFORF1144-HOXA7 | 171 |
| TFORF1200-SETDB1 | 171 |
| TFORF1214-FOXH1 | 171 |
| TFORF1445-GTF2H3 | 171 |
| TFORF1822-ZNF138 | 171 |
| TFORF1847-ETS1 | 171 |
| TFORF1861-DRGX | 171 |
| TFORF1900-PATZ1 | 171 |
| TFORF2305-ETV1 | 171 |
| TFORF2321-TAF1A | 171 |
| TFORF2464-IRF6 | 171 |
| TFORF2555-SUZ12 | 171 |
| TFORF2670-NEUROD2 | 171 |
| TFORF2672-CHURC1 | 171 |
| TFORF2673-CHURC1 | 171 |
| TFORF2694-ELF5 | 171 |
| TFORF2695-ELF5 | 171 |
| TFORF2701-ESRRG | 171 |
| TFORF2802-ETV2 | 171 |
| TFORF2844-HNRNPK | 171 |
| TFORF3258-TAF12 | 171 |
| TFORF0178-HDGF | 172 |
| TFORF0205-DBP | 172 |
| TFORF0225-ZNF593 | 172 |
| TFORF0351-FOXL2 | 172 |
| TFORF0615-ZSCAN26 | 172 |
| TFORF0792-TARBP2 | 172 |
| TFORF0876-GLMP | 172 |
| TFORF1383-ZNF788 | 172 |
| TFORF2450-MLLT10 | 172 |
| TFORF2646-PAX3 | 172 |
| TFORF2663-STOX1 | 172 |
| TFORF3447-MYCBP | 172 |
| TFORF3460-PSMB1 | 172 |
| TFORF3513-GLMP | 172 |
| TFORF0539-ZNF589 | 173 |
| TFORF0717-TEF | 173 |
| TFORF0733-PROX2 | 173 |
| TFORF0875-GLMP | 173 |
| TFORF0932-ZNF80 | 173 |
| TFORF1222-ZNF483 | 173 |
| TFORF1259-TP53 | 173 |
| TFORF1671-TP73 | 173 |
| TFORF1902-TCF7L2 | 173 |
| TFORF2853-HMGA2 | 173 |
| TFORF0592-FOXO4 | 174 |
| TFORF0960-ERG | 174 |
| TFORF1091-ZBTB8A | 174 |
| TFORF1851-ZBTB3 | 174 |
| TFORF1882-SOX30 | 174 |
| TFORF2337-ZNF18 | 174 |
| TFORF3257-ZNF800 | 174 |
| TFORF0189-RFX8 | 175 |
| TFORF0203-ELK1 | 175 |
| TFORF2674-CHURC1 | 175 |
| TFORF3490-TCF23 | 175 |
| TFORF1029-RARB | 176 |
| TFORF1933-MEIS2 | 176 |
| TFORF1194-ZNF575 | 177 |
| TFORF1449-DLX4 | 177 |
| TFORF2580-MEIS3 | 177 |
| TFORF0439-ZSCAN30 | 178 |
| TFORF0541-GCFC2 | 178 |
| TFORF0834-HSFY1 | 178 |
| TFORF0870-NR1H3 | 178 |
| TFORF1258-TP53 | 178 |
| TFORF2286-HES4 | 178 |
| TFORF0506-CDK2 | 179 |
| TFORF1957-ESR2 | 179 |
| TFORF1966-PPARD | 179 |
| TFORF2177-ZNF419 | 179 |
| TFORF0047-MAX | 180 |
| TFORF0207-FOXP2 | 180 |
| TFORF1149-HOXA1 | 180 |
| TFORF1226-DUX4 | 180 |
| TFORF2552-BID | 180 |
| TFORF0100-NOV | 181 |
| TFORF0146-THAP1 | 181 |
| TFORF0494-ZSCAN2 | 181 |
| TFORF0642-NR113 | 181 |
| TFORF0944-LMO3 | 181 |
| TFORF1028-RARA | 181 |
| TFORF1963-CUX1 | 181 |
| TFORF2485-MXD1 | 181 |
| TFORF0364-TCEB1 | 182 |
| TFORF0522-PAX5 | 182 |
| TFORF0830-SLC45A2 | 182 |
| TFORF1170-MLX | 182 |
| TFORF2141-ZNF525 | 182 |
| TFORF2291-HES6 | 182 |
| TFORF2662-STOX1 | 182 |
| TFORF0297-CREM | 183 |
| TFORF0604-PUF60 | 183 |
| TFORF1544-ZNF160 | 183 |
| TFORF1630-ZNF226 | 183 |
| TFORF1668-TP73 | 183 |
| TFORF1756-ZNF189 | 183 |
| TFORF2171-BHLHE23 | 183 |
| TFORF2216-NOTO | 183 |
| TFORF2792-ZNF282 | 183 |
| TFORF3063-FOXP1 | 183 |
| TFORF0177-HDGF | 184 |
| TFORF0451-THRA | 184 |
| TFORF0890-ING4 | 184 |
| TFORF1548-TAZ | 184 |
| TFORF1996-ZNF248 | 184 |
| TFORF0133-ZNF780A | 185 |
| TFORF0855-VSX1 | 185 |
| TFORF0936-SS18 | 185 |
| TFORF1218-PRRX1 | 185 |
| TFORF1262-TP53 | 185 |
| TFORF1527-MXI1 | 185 |
| TFORF1709-ZFP41 | 185 |
| TFORF2296-TAF11 | 185 |
| TFORF3389-ZNF580 | 185 |
| TFORF0867-NR1H2 | 186 |
| TFORF0889-ZNF384 | 186 |
| TFORF1327-KLF14 | 186 |
| TFORF1452-DLX1 | 186 |
| TFORF1762-ZNF24 | 186 |
| TFORF3239-HOXB5 | 186 |
| TFORF0060-CTBP2 | 187 |
| TFORF0528-PAX6 | 187 |
| TFORF0829-SLC45A2 | 187 |
| TFORF1320-KLF11 | 187 |
| TFORF1591-CTCF | 187 |
| TFORF1600-ZNF195 | 187 |
| TFORF2176-ZNF419 | 187 |
| TFORF1035-WT1 | 188 |
| TFORF1929-XRCC4 | 188 |
| TFORF2935-MAFK | 188 |
| TFORF3050-CDK1 | 188 |
| TFORF3228-MAX | 188 |
| TFORF0034-SP2 | 189 |
| TFORF2483-CBX2 | 189 |
| TFORF2835-IKZF3 | 189 |
| TFORF0424-PBX3 | 190 |
| TFORF2297-TAF10 | 190 |
| TFORF3148-NFE2 | 190 |
| TFORF3383-NFKBID | 190 |
| TFORF0144-PHOX2A | 191 |
| TFORF0194-RFX6 | 191 |
| TFORF0723-NFKB1 | 192 |
| TFORF0747-PIAS1 | 192 |
| TFORF1254-TP53 | 192 |
| TFORF1456-TFEC | 192 |
| TFORF1673-TP73 | 192 |
| TFORF1733-ZNF169 | 192 |
| TFORF1795-CNBP | 192 |
| TFORF2000-MYEF2 | 192 |
| TFORF2972-NR1H4 | 192 |
| TFORF3191-ZNF436 | 192 |
| TFORF0319-MSLN | 193 |
| TFORF0873-HOXB8 | 193 |
| TFORF0906-DNAJC2 | 193 |
| TFORF0954-CDIP1 | 193 |
| TFORF1274-PKNOX1 | 193 |
| TFORF1476-VAX1 | 193 |
| TFORF1558-YAF2 | 193 |
| TFORF1841-HBP1 | 193 |
| TFORF2018-PITX3 | 193 |
| TFORF2642-PAX3 | 193 |
| TFORF2894-MTA1 | 193 |
| TFORF3105-CCNH | 193 |
| TFORF3107-RARA | 193 |
| TFORF3128-IRF5 | 193 |
| TFORF3370-MYBL1 | 193 |
| TFORF3375-TGIF2 | 193 |
| TFORF3461-ETV1 | 193 |
| TFORF3529-VDR | 193 |
| TFORF3544-NR2E1 | 193 |
| TFORF0454-TAF4B | 194 |
| TFORF0607-CREBL2 | 194 |
| TFORF0740-JDP2 | 194 |
| TFORF0964-ERG | 194 |
| TFORF1118-SKP2 | 194 |
| TFORF1431-ZNF219 | 194 |
| TFORF1734-RUVBL1 | 194 |
| TFORF2192-RFXANK | 194 |
| TFORF2813-FOXD4L1 | 194 |
| TFORF2987-RORA | 194 |
| TFORF3176-ZNF544 | 194 |
| TFORF3339-HDAC3 | 194 |
| TFORF3348-PITX2 | 194 |
| TFORF3368-FOXR1 | 194 |
| TFORF3445-PTTG1 | 194 |
| TFORF3522-POU6F1 | 194 |
| TFORF0383-SMARCA2 | 195 |
| TFORF0817-LHX3 | 195 |
| TFORF1024-FOXI3 | 195 |
| TFORF1050-HKR1 | 195 |
| TFORF1655-SPIB | 195 |
| TFORF2007-PREB | 195 |
| TFORF2016-PITX2 | 195 |
| TFORF2082-IGHMBP2 | 195 |
| TFORF2118-TBPL1 | 195 |
| TFORF2217-YAP1 | 195 |
| TFORF2470-PDX1 | 195 |
| TFORF3261-OVOL1 | 195 |
| TFORF0344-ETF1 | 196 |
| TFORF0371-NFYC | 196 |
| TFORF0643-NR113 | 196 |
| TFORF0871-NR1H3 | 196 |
| TFORF1043-TSC22D3 | 196 |
| TFORF1712-DPRX | 196 |
| TFORF1747-ZNF761 | 196 |
| TFORF1979-TBX6 | 196 |
| TFORF1985-ZNF534 | 196 |
| TFORF2212-CREB3L3 | 196 |
| TFORF2393-ZNF394 | 196 |
| TFORF2564-ZNF655 | 196 |
| TFORF3076-GTF2A2 | 196 |
| TFORF0159-EWSR1 | 197 |
| TFORF1389-PMS1 | 197 |
| TFORF1700-E2F5 | 197 |
| TFORF2045-ARID3B | 197 |
| TFORF2593-BHLHE40 | 197 |
| TFORF2637-TFDP2 | 197 |
| TFORF2807-ETV7 | 197 |
| TFORF0229-ZNF595 | 198 |
| TFORF0827-LHX9 | 198 |
| TFORF1666-TP73 | 198 |
| TFORF1701-E2F5 | 198 |
| TFORF1875-CCNT1 | 198 |
| TFORF2024-NPAS3 | 198 |
| TFORF2206-POU2F3 | 198 |
| TFORF2257-ARNTL | 198 |
| TFORF2417-ZNF268 | 198 |
| TFORF3243-ZNF267 | 198 |
| TFORF0510-TSHZ3 | 199 |
| TFORF0731-PROX1 | 199 |
| TFORF0737-ZNF480 | 199 |
| TFORF1925-ZBTB21 | 199 |
| TFORF2506-PML | 199 |
| TFORF2889-BRPF1 | 199 |
| TFORF0141-POU5F1B | 200 |
| TFORF0356-ZNF33A | 200 |
| TFORF2547-CEBPD | 200 |
| TFORF2688-TEAD3 | 200 |
| TFORF0162-PES1 | 201 |
| TFORF0366-NFYC | 201 |
| TFORF0435-ZSCAN32 | 201 |
| TFORF0463-HOXD1 | 201 |
| TFORF0586-SRY | 201 |
| TFORF1401-ZNF567 | 201 |
| TFORF1628-FOXJ3 | 201 |
| TFORF1998-ZNF248 | 201 |
| TFORF2147-ZNF528 | 201 |
| TFORF2434-ZNF280D | 201 |
| TFORF2918-NFIB | 201 |
| TFORF3215-ZNF248 | 201 |
| TFORF3387-ZNF586 | 201 |
| TFORF0293-MEF2A | 202 |
| TFORF0699-BATF2 | 202 |
| TFORF0710-ZNF624 | 202 |
| TFORF1794-CNBP | 202 |
| TFORF2948-HOXB6 | 202 |
| TFORF2968-NR0B1 | 202 |
| TFORF2995-SKP2 | 202 |
| TFORF3485-ATF2 | 202 |
| TFORF0933-ZNF85 | 203 |
| TFORF2304-CIITA | 203 |
| TFORF2362-ZNF641 | 203 |
| TFORF2849-HMGA2 | 203 |
| TFORF3240-POU2AF1 | 203 |
| TFORF3319-ZSCAN5A | 203 |
| TFORF0239-MYCL | 204 |
| TFORF0372-NFYB | 204 |
| TFORF0877-GLMP | 204 |
| TFORF1026-RARA | 204 |
| TFORF2248-TCF12 | 204 |
| TFORF2313-ETV3 | 204 |
| TFORF2969-PAX8 | 204 |
| TFORF3532-LIN28B | 204 |
| TFORF0529-PAX6 | 205 |
| TFORF1195-ZNF576 | 205 |
| TFORF2017-PITX2 | 205 |
| TFORF3014-CEBPG | 205 |
| TFORF0071-CSDE1 | 206 |
| TFORF0363-TCEB2 | 206 |
| TFORF0402-ZNF3 | 206 |
| TFORF0425-PBX3 | 206 |
| TFORF1792-CNBP | 206 |
| TFORF2100-SOHLH2 | 206 |
| TFORF2454-IRF3 | 206 |
| TFORF2550-BID | 206 |
| TFORF0234-MNX1 | 207 |
| TFORF0798-ATF3 | 207 |
| TFORF1611-GSX2 | 207 |
| TFORF1683-TWIST1 | 207 |
| TFORF1728-ZNF695 | 207 |
| TFORF2183-ZNF415 | 207 |
| TFORF2579-MEIS3 | 207 |
| TFORF2814-FOSB | 207 |
| TFORF0284-MEF2C | 208 |
| TFORF0298-CREM | 208 |
| TFORF0417-SULT2A1 | 208 |
| TFORF0848-YBX3 | 208 |
| TFORF1364-ELOF1 | 208 |
| TFORF1446-GTF2H3 | 208 |
| TFORF1840-GTF2A1 | 208 |
| TFORF2211-CREB3L3 | 208 |
| TFORF2419-ZNF268 | 208 |
| TFORF2597-RORA | 208 |
| TFORF3328-ZSCAN16 | 208 |
| TFORF0978-KLF7 | 209 |
| TFORF1574-ZNF174 | 209 |
| TFORF1691-PGR | 209 |
| TFORF2525-ERCC2 | 209 |
| TFORF3173-STAT6 | 209 |
| TFORF0079-KCNIP3 | 210 |
| TFORF0087-LIN28A | 210 |
| TFORF0261-TCF4 | 210 |
| TFORF0272-TCF7 | 210 |
| TFORF0373-NFYA | 210 |
| TFORF0669-ZNF821 | 210 |
| TFORF0872-HOXB8 | 210 |
| TFORF1145-CDK1 | 210 |
| TFORF1486-NANOG | 210 |
| TFORF1589-ZNF773 | 210 |
| TFORF1767-ZNF22 | 210 |
| TFORF2223-YAP1 | 210 |
| TFORF2285-HES3 | 210 |
| TFORF2448-GBX2 | 210 |
| TFORF2632-TFDP3 | 210 |
| TFORF2825-IKZF1 | 210 |
| TFORF3150-ZNF254 | 210 |
| TFORF3245-MAFG | 210 |
| TFORF1177-ZNF793 | 211 |
| TFORF2812-ETV7 | 211 |
| TFORF3089-ZSCAN9 | 211 |
| TFORF3278-MEOX1 | 211 |
| TFORF0128-SP8 | 212 |
| TFORF0365-TCEB1 | 212 |
| TFORF1022-SCRT2 | 212 |
| TFORF2215-CREB3L4 | 212 |
| TFORF0081-KCNIP2 | 213 |
| TFORF0238-MYCL | 213 |
| TFORF0503-RNF138 | 213 |
| TFORF0600-MZF1 | 213 |
| TFORF0741-JDP2 | 213 |
| TFORF1040-TSC22D1 | 213 |
| TFORF2114-SIRT6 | 213 |
| TFORF2144-ZNF525 | 213 |
| TFORF2294-TAF13 | 213 |
| TFORF2418-ZNF268 | 213 |
| TFORF2516-PDCD2 | 213 |
| TFORF2561-ZNF655 | 213 |
| TFORF3535-MLLT10 | 213 |
| TFORF0048-MAX | 214 |
| TFORF0076-KCNIP4 | 214 |
| TFORF0131-HMGB4 | 214 |
| TFORF0244-SUB1 | 214 |
| TFORF0252-CAMTA1 | 214 |
| TFORF0304-CREM | 214 |
| TFORF0374-NFYA | 214 |
| TFORF0399-ZNF2 | 214 |
| TFORF0647-NR113 | 214 |
| TFORF0771-MSX2 | 214 |
| TFORF0801-ATF3 | 214 |
| TFORF0942-LMO1 | 214 |
| TFORF0992-KLF8 | 214 |
| TFORF1219-PRRX2 | 214 |
| TFORF1494-FOSL1 | 214 |
| TFORF1556-YAF2 | 214 |
| TFORF2121-HOPX | 214 |
| TFORF2250-TCF19 | 214 |
| TFORF2253-HMGN3 | 214 |
| TFORF2586-CERS4 | 214 |
| TFORF2857-ID4 | 214 |
| TFORF3000-E2F6 | 214 |
| TFORF3142-CDX4 | 214 |
| TFORF3207-HMGN2 | 214 |
| TFORF3274-HMGA1 | 214 |
| TFORF3294-ZNF784 | 214 |
| TFORF3530-SSRP1 | 214 |
| TFORF0084-KCNIP2 | 215 |
| TFORF0183-SHOX2 | 215 |
| TFORF0349-ZNF48 | 215 |
| TFORF0938-SS18 | 215 |
| TFORF1255-TP53 | 215 |
| TFORF1590-ZNF773 | 215 |
| TFORF1643-ZNF426 | 215 |
| TFORF1846-ETS1 | 215 |
| TFORF1915-RUNX2 | 215 |
| TFORF2254-HMGN3 | 215 |
| TFORF2288-HES4 | 215 |
| TFORF2974-NR1H2 | 215 |
| TFORF0291-MEF2C | 216 |
| TFORF0332-ZNF333 | 216 |
| TFORF0718-TEF | 216 |
| TFORF0949-EMX1 | 216 |
| TFORF1407-ZNF559 | 216 |
| TFORF1454-TFEC | 216 |
| TFORF1551-TAZ | 216 |
| TFORF1997-ZNF248 | 216 |
| TFORF2246-TCF12 | 216 |
| TFORF3321-PA2G4 | 216 |
| TFORF0428-PBX1 | 217 |
| TFORF0648-NR113 | 217 |
| TFORF0756-JUND | 217 |
| TFORF0800-ATF3 | 217 |
| TFORF0883-HOXB7 | 217 |
| TFORF2480-MXD4 | 217 |
| TFORF0359-TUB | 218 |
| TFORF2947-HOXC8 | 218 |
| TFORF0057-MAF | 219 |
| TFORF0696-GTF3A | 219 |
| TFORF2757-BARHL1 | 219 |
| TFORF3337-HDAC1 | 219 |
| TFORF0781-ZNF93 | 220 |
| TFORF1562-ZNF688 | 220 |
| TFORF1934-MEIS2 | 220 |
| TFORF2446-ZIK1 | 220 |
| TFORF0152-THAP6 | 221 |
| TFORF0436-ZSCAN31 | 221 |
| TFORF0270-TCF7 | 222 |
| TFORF0894-ING4 | 222 |
| TFORF1485-NANOG | 222 |
| TFORF2474-ONECUT3 | 222 |
| TFORF3146-HSF1 | 222 |
| TFORF1393-PMS1 | 223 |
| TFORF3193-DND1 | 223 |
| TFORF3349-ERCC8 | 223 |
| TFORF0367-NFYC | 224 |
| TFORF2111-NR4A1 | 224 |
| TFORF2349-HOXD8 | 224 |
| TFORF0206-ETV3L | 225 |
| TFORF0525-PAX4 | 225 |
| TFORF1425-ZNF211 | 225 |
| TFORF2599-RORA | 225 |
| TFORF2834-IKZF3 | 225 |
| TFORF0017-IRX5 | 226 |
| TFORF0109-SMAD6 | 226 |
| TFORF0570-ZNF502 | 226 |
| TFORF0879-HOXB3 | 226 |
| TFORF1160-EOMES | 226 |
| TFORF3136-HEY1 | 226 |
| TFORF2205-POU2F3 | 227 |
| TFORF2905-DACH2 | 227 |
| TFORF2988-OTX2 | 227 |
| TFORF0513-PAX5 | 228 |
| TFORF0734-ZNF488 | 228 |
| TFORF1984-ZNF534 | 228 |
| TFORF3078-XRCC4 | 228 |
| TFORF3511-SOX14 | 228 |
| TFORF0119-ELMSAN1 | 229 |
| TFORF2339-ZNF19 | 229 |
| TFORF3010-NR113 | 229 |
| TFORF3371-MYBL1 | 229 |
| TFORF0124-OLIG1 | 230 |
| TFORF0437-ZSCAN31 | 230 |
| TFORF0893-ING4 | 230 |
| TFORF1076-NFATC4 | 230 |
| TFORF1311-RBMS1 | 230 |
| TFORF2875-ELF3 | 230 |
| TFORF3167-ZNF512B | 230 |
| TFORF0976-GFI1B | 231 |
| TFORF1879-CREBZF | 231 |
| TFORF1053-HKR1 | 232 |
| TFORF1266-ZNF135 | 232 |
| TFORF1294-ZFP64 | 232 |
| TFORF0023-IRX2 | 233 |
| TFORF0053-MAZ | 233 |
| TFORF0408-CTCFL | 233 |
| TFORF0472-ZNF221 | 233 |
| TFORF3280-DDB2 | 233 |
| TFORF0058-MAF | 234 |
| TFORF0878-HOXB2 | 234 |
| TFORF2166-GRHL3 | 234 |
| TFORF2975-NAT10 | 234 |
| TFORF3025-MYF6 | 234 |
| TFORF3108-ASCL2 | 234 |
| TFORF3129-SMAD7 | 234 |
| TFORF3362-MYOG | 234 |
| TFORF3541-THAP6 | 234 |
| TFORF1343-FEZF1 | 235 |
| TFORF3220-ZNF449 | 235 |
| TFORF3509-GATAD2B | 235 |
| TFORF0536-PAX2 | 236 |
| TFORF1034-WT1 | 236 |
| TFORF2167-GRHL3 | 236 |
| TFORF2306-ETV1 | 236 |
| TFORF2347-HOXD8 | 236 |
| TFORF2702-ESRRG | 236 |
| TFORF3272-PRDM4 | 236 |
| TFORF0862-NR1H4 | 237 |
| TFORF0941-LMO1 | 237 |
| TFORF0955-CDIP1 | 237 |
| TFORF1140-HMBOX1 | 237 |
| TFORF1146-HOXA4 | 237 |
| TFORF2726-ZFP1 | 237 |
| TFORF2806-ETV7 | 237 |
| TFORF2862-SREBF1 | 237 |
| TFORF3518-NHLH2 | 237 |
| TFORF0401-ZNF2 | 238 |
| TFORF0406-CTCFL | 238 |
| TFORF0534-ZNF584 | 238 |
| TFORF0797-ATF1 | 238 |
| TFORF1919-RUNX1 | 238 |
| TFORF2164-GRHL2 | 238 |
| TFORF0295-MEF2A | 239 |
| TFORF0445-ZNF805 | 239 |
| TFORF0789-DBX2 | 239 |
| TFORF0991-KLF8 | 239 |
| TFORF1152-MYOCD | 239 |
| TFORF1179-ZNF799 | 239 |
| TFORF1348-RPA2 | 239 |
| TFORF1854-ZBTB5 | 239 |
| TFORF1943-MIER1 | 239 |
| TFORF1954-ESR2 | 239 |
| TFORF1983-TBX5 | 239 |
| TFORF2848-TCF21 | 239 |
| TFORF3300-MEIS2 | 239 |
| TFORF3313-ZBTB25 | 239 |
| TFORF3361-MSC | 239 |
| TFORF0258-TCF4 | 240 |
| TFORF2213-CREB3L1 | 240 |
| TFORF2748-NKX6-3 | 240 |
| TFORF3443-SP4 | 240 |
| TFORF1078-NFATC4 | 241 |
| TFORF2275-SLC22A1 | 241 |
| TFORF2533-SOX1 | 241 |
| TFORF2934-TFEB | 241 |
| TFORF3178-TFDP2 | 241 |
| TFORF3388-YEATS4 | 241 |
| TFORF0038-SP7 | 242 |
| TFORF0249-CAMTA2 | 242 |
| TFORF0256-TCF4 | 242 |
| TFORF0342-ETF1 | 242 |
| TFORF0496-EGR2 | 242 |
| TFORF0526-PAX7 | 242 |
| TFORF0972-ZNF124 | 242 |
| TFORF1466-HOXD12 | 242 |
| TFORF1871-POU2F1 | 242 |
| TFORF2146-ZNF529 | 242 |
| TFORF2691-TEAD2 | 242 |
| TFORF3346-NHP2 | 242 |
| TFORF3376-TOX | 242 |
| TFORF3382-ZNF140 | 242 |
| TFORF3431-NR3C2 | 242 |
| TFORF0452-THRA | 243 |
| TFORF1581-ATMIN | 243 |
| TFORF2105-ZBTB34 | 243 |
| TFORF2153-BCL11A | 243 |
| TFORF2184-ZNF415 | 243 |
| TFORF3360-HOXB13 | 243 |
| TFORF0022-IRX3 | 244 |
| TFORF0110-SMAD7 | 244 |
| TFORF0121-BARX2 | 244 |
| TFORF0149-THAP4 | 244 |
| TFORF0617-ZSCAN26 | 244 |
| TFORF0921-BSX | 244 |
| TFORF1342-POU5F2 | 244 |
| TFORF1542-ZNF286B | 244 |
| TFORF1552-SP110 | 244 |
| TFORF1625-ZNF517 | 244 |
| TFORF1819-ZNF138 | 244 |
| TFORF2173-ZNF419 | 244 |
| TFORF2556-ADNP2 | 244 |
| TFORF2645-PAX3 | 244 |
| TFORF3041-SOX15 | 244 |
| TFORF3132-ESR2 | 244 |
| TFORF3237-SOX10 | 244 |
| TFORF3484-ZNF398 | 244 |
| TFORF0937-SS18 | 245 |
| TFORF1586-ZNF772 | 245 |
| TFORF1801-TBX10 | 245 |
| TFORF2925-ZFP57 | 245 |
| TFORF0360-TUB | 246 |
| TFORF0728-MLXIP | 246 |
| TFORF1670-TP73 | 246 |
| TFORF2465-IRF6 | 246 |
| TFORF2647-PAX3 | 246 |
| TFORF3027-SP6 | 246 |
| TFORF0288-MEF2C | 247 |
| TFORF0775-ZNF92 | 247 |
| TFORF0814-LHX1 | 247 |
| TFORF0815-LHX2 | 247 |
| TFORF0816-LHX3 | 247 |
| TFORF0818-LHX3 | 247 |
| TFORF0819-LHX5 | 247 |
| TFORF1459-LMX1A | 247 |
| TFORF1460-LMX1B | 247 |
| TFORF1461-LMX1B | 247 |
| TFORF1462-LMX1B | 247 |
| TFORF1471-TOX2 | 247 |
| TFORF1897-NR2C1 | 247 |
| TFORF2367-MBD4 | 247 |
| TFORF2386-MBD2 | 247 |
| TFORF3179-LHX9 | 247 |
| TFORF3212-ZKSCAN1 | 247 |
| TFORF0820-LHX6 | 248 |
| TFORF0821-LHX6 | 248 |
| TFORF0822-LHX6 | 248 |
| TFORF0824-LHX8 | 248 |
| TFORF0825-LHX8 | 248 |
| TFORF1825-ARNT | 248 |
| TFORF2625-CRTC3 | 248 |
| TFORF2873-ELF1 | 248 |
| TFORF0296-MEF2A | 249 |
| TFORF2058-NKX2-2 | 249 |
| TFORF3233-JUNB | 249 |
| TFORF0674-ZNF829 | 250 |
| TFORF2381-MBD1 | 250 |
| TFORF2530-SOX8 | 250 |
| TFORF2671-NEUROD4 | 250 |
| TFORF1517-FOXD4L4 | 251 |
| TFORF2375-MBD1 | 251 |
| TFORF2945-NEUROD1 | 251 |
| TFORF1012-ZNF546 | 252 |
| TFORF1641-PSIP1 | 252 |
| TFORF3260-ZNF524 | 252 |
| TFORF0010-ZNF879 | 253 |
| TFORF0391-FERD3L | 253 |
| TFORF0639-HOXC6 | 253 |
| TFORF1223-ZNF483 | 253 |
| TFORF2322-ZNF736 | 253 |
| TFORF2355-PROP1 | 253 |
| TFORF3079-ZNF846 | 253 |
| TFORF0577-GTF2A1L | 254 |
| TFORF0616-ZSCAN26 | 254 |
| TFORF1150-CDK7 | 254 |
| TFORF1502-GABPB1 | 254 |
| TFORF2684-ZMYND11 | 254 |
| TFORF2989-SLC45A2 | 254 |
| TFORF0164-SIX4 | 255 |
| TFORF0686-PRDM10 | 255 |
| TFORF1659-LEF1 | 255 |
| TFORF1799-USF2 | 255 |
| TFORF2376-MBD1 | 255 |
| TFORF2499-ASCL5 | 255 |
| TFORF3106-CCNH | 255 |
| TFORF0172-ONECUT2 | 256 |
| TFORF0745-PIAS2 | 256 |
| TFORF1334-POU3F3 | 256 |
| TFORF3100-ZNF212 | 256 |
| TFORF0895-ING4 | 257 |
| TFORF1483-TP63 | 257 |
| TFORF1147-HOXA3 | 258 |
| TFORF1638-BNIP3 | 258 |
| TFORF2332-ZNF492 | 258 |
| TFORF2884-FIGLA | 258 |
| TFORF2276-SLC22A1 | 259 |
| TFORF3083-FOSL2 | 259 |
| TFORF3548-THAP10 | 259 |
| TFORF0564-ZNF619 | 260 |
| TFORF1216-NHLH1 | 260 |
| TFORF1748-ZNF763 | 260 |
| TFORF1870-POU2F1 | 260 |
| TFORF1994-ZHX1 | 260 |
| TFORF2093-ZFP14 | 260 |
| TFORF2479-MESP2 | 260 |
| TFORF0035-SP3 | 261 |
| TFORF0338-MECOM | 261 |
| TFORF1058-NFATC1 | 261 |
| TFORF1124-E2F7 | 261 |
| TFORF2764-ZKSCAN5 | 261 |
| TFORF3401-GTF2B | 261 |
| TFORF0881-HOXB3 | 262 |
| TFORF3402-HSFY2 | 262 |
| TFORF0130-HMGB3 | 263 |
| TFORF1695-ZNF114 | 263 |
| TFORF2659-STAT2 | 263 |
| TFORF3022-RXRG | 263 |
| TFORF3073-LMO2 | 263 |
| TFORF0770-MSX2 | 264 |
| TFORF1167-EBF3 | 264 |
| TFORF1168-EBF2 | 264 |
| TFORF2224-YAP1 | 264 |
| TFORF3058-EBF1 | 264 |
| TFORF0104-SMAD9 | 265 |
| TFORF3195-ONECUT1 | 265 |
| TFORF0521-PAX5 | 266 |
| TFORF3074-LMO2 | 266 |
| TFORF0576-HOXA10 | 267 |
| TFORF1166-EBF4 | 267 |
| TFORF1522-NR2E3 | 267 |
| TFORF3475-IL18 | 267 |
| TFORF0088-ZNF408 | 268 |
| TFORF0123-OLIG2 | 268 |
| TFORF1433-NR3C1 | 268 |
| TFORF2938-SOX5 | 268 |
| TFORF0869-NR1H3 | 269 |
| TFORF0891-ING4 | 269 |
| TFORF1956-ESR2 | 269 |
| TFORF1718-LDB1 | 270 |
| TFORF2583-MIXL1 | 270 |
| TFORF3546-TSC22D3 | 270 |
| TFORF2218-YAP1 | 271 |
| TFORF2795-ZNF283 | 271 |
| TFORF2839-IKZF3 | 271 |
| TFORF3127-NFIL3 | 271 |
| TFORF0979-KLF7 | 272 |
| TFORF1328-TFAP2A | 272 |
| TFORF1331-TFAP2B | 272 |
| TFORF1332-TFAP2E | 272 |
| TFORF1635-HOXC11 | 272 |
| TFORF1644-ZNF425 | 272 |
| TFORF1939-MEIS1 | 272 |
| TFORF2064-NKX2-5 | 272 |
| TFORF2193-TFAM | 272 |
| TFORF2932-TFAP2A | 272 |
| TFORF0716-ZNF621 | 273 |
| TFORF2161-GRHL1 | 273 |
| TFORF2165-GRHL3 | 273 |
| TFORF2168-GRHL3 | 273 |
| TFORF2266-ANHX | 273 |
| TFORF2700-ESRRG | 273 |
| TFORF2755-ZNF440 | 273 |
| TFORF0106-TRERF1 | 274 |
| TFORF0544-ZFAT | 274 |
| TFORF0725-NFKB2 | 274 |
| TFORF1971-YY2 | 274 |
| TFORF3477-POU5F1 | 274 |
| TFORF0008-ZNF709 | 275 |
| TFORF0009-ZNF708 | 275 |
| TFORF0030-ZNF43 | 275 |
| TFORF0259-TCF4 | 275 |
| TFORF1301-HMG20A | 275 |
| TFORF1424-ZNF211 | 275 |
| TFORF1490-NR6A1 | 275 |
| TFORF1499-RBL1 | 275 |
| TFORF1500-RBL2 | 275 |
| TFORF1521-NR2E3 | 275 |
| TFORF1580-ZNF778 | 275 |
| TFORF1622-ZNF513 | 275 |
| TFORF1789-ZNF232 | 275 |
| TFORF2055-CDX1 | 275 |
| TFORF2127-ZNF746 | 275 |
| TFORF2738-PLK4 | 275 |
| TFORF2811-ETV7 | 275 |
| TFORF2823-IKZF1 | 275 |
| TFORF2838-IKZF3 | 275 |
| TFORF2895-MTA1 | 275 |
| TFORF2907-DACH2 | 275 |
| TFORF2963-NR2C2 | 275 |
| TFORF3008-CDX2 | 275 |
| TFORF3291-CDK9 | 275 |
| TFORF3320-HDX | 275 |
| TFORF3400-GMEB1 | 275 |
| TFORF3462-BRPF1 | 275 |
| TFORF0247-CAMTA2 | 276 |
| TFORF0440-ZFY | 276 |
| TFORF0456-HOXD9 | 276 |
| TFORF1060-NFATC1 | 276 |
| TFORF3427-NFIB | 276 |
| TFORF0465-NKX1-1 | 277 |
| TFORF1604-HINFP | 277 |
| TFORF1785-ZNF235 | 277 |
| TFORF3093-ZNF574 | 277 |
| TFORF3290-CTCF | 277 |
| TFORF3547-CBFB | 277 |
| TFORF0924-NR2F2 | 278 |
| TFORF1426-FOXK2 | 278 |
| TFORF1468-HOXD11 | 278 |
| TFORF1475-LIN54 | 278 |
| TFORF1505-ZNF696 | 278 |
| TFORF2200-POU4F1 | 278 |
| TFORF2274-SLC22A1 | 278 |
| TFORF3056-THRB | 278 |
| TFORF3493-ZNF791 | 278 |
| TFORF0405-CTCFL | 279 |
| TFORF1758-ZNF189 | 279 |
| TFORF1864-POU2F2 | 279 |
| TFORF1916-RUNX2 | 279 |
| TFORF2149-ZNF250 | 279 |
| TFORF2541-SOX5 | 279 |
| TFORF3210-VSX2 | 279 |
| TFORF3236-E2F8 | 279 |
| TFORF0318-ZNF117 | 280 |
| TFORF2282-MYBBP1A | 280 |
| TFORF2708-ARX | 280 |
| TFORF2774-KDM5C | 280 |
| TFORF3166-ZNF512B | 280 |
| TFORF3256-ZNF189 | 280 |
| TFORF3340-HDAC3 | 280 |
| TFORF0002-HIF3A | 281 |
| TFORF0190-RFX4 | 281 |
| TFORF0497-EGR3 | 281 |
| TFORF0684-PRDM13 | 281 |
| TFORF0866-GTF2I | 281 |
| TFORF0896-ZNF383 | 281 |
| TFORF1006-ZNF564 | 281 |
| TFORF1062-NFATC1 | 281 |
| TFORF1572-ZNF687 | 281 |
| TFORF1737-ZBTB7B | 281 |
| TFORF1768-ZNF28 | 281 |
| TFORF2026-NPAS3 | 281 |
| TFORF2117-TBPL2 | 281 |
| TFORF2364-CREB1 | 281 |
| TFORF2471-HDAC5 | 281 |
| TFORF3219-ZNF677 | 281 |
| TFORF0317-MEF2D | 282 |
| TFORF0498-EGR3 | 282 |
| TFORF1023-FOXI1 | 282 |
| TFORF1399-ZNF568 | 282 |
| TFORF1636-HOXC13 | 282 |
| TFORF1848-ETS1 | 282 |
| TFORF2043-ARID3A | 282 |
| TFORF2526-ERCC2 | 282 |
| TFORF2540-SOX5 | 282 |
| TFORF2581-MEIS3 | 282 |
| TFORF2653-ARNTL2 | 282 |
| TFORF2750-NKX6-1 | 282 |
| TFORF2965-NR2C2 | 282 |
| TFORF3046-ZNF418 | 282 |
| TFORF3112-RFXANK | 282 |
| TFORF3171-PSMB4 | 282 |
| TFORF3177-NR1D2 | 282 |
| TFORF3194-TLX3 | 282 |
| TFORF3200-RUNX3 | 282 |
| TFORF3255-ZNF175 | 282 |
| TFORF3404-ZNF511 | 282 |
| TFORF0193-RFX5 | 283 |
| TFORF1524-NFRKB | 283 |
| TFORF1704-E2F3 | 283 |
| TFORF2071-MYB | 283 |
| TFORF2074-MYB | 283 |
| TFORF1686-HNF1B | 284 |
| TFORF2456-IRF3 | 284 |
| TFORF0355-ZNF33A | 285 |
| TFORF0575-HOXA11 | 285 |
| TFORF2491-ZBTB17 | 285 |
| TFORF2902-DACH1 | 285 |
| TFORF2996-TGIF1 | 285 |
| TFORF3467-SUPT4H1 | 285 |
| TFORF3533-CDIP1 | 285 |
| TFORF0108-TRERF1 | 286 |
| TFORF1036-WT1 | 286 |
| TFORF2151-FOXG1 | 286 |
| TFORF2490-ZBTB17 | 286 |
| TFORF2666-ZBED3 | 286 |
| TFORF0900-ZNF382 | 287 |
| TFORF0973-ZNF124 | 287 |
| TFORF1513-NKX3-1 | 287 |
| TFORF2607-DMTF1 | 287 |
| TFORF2729-ZNF668 | 287 |
| TFORF0458-TRIM24 | 288 |
| TFORF1265-ZNF135 | 288 |
| TFORF1538-ZBTB46 | 288 |
| TFORF2553-AR | 288 |
| TFORF3538-HOXD10 | 288 |
| TFORF0431-AIRE | 289 |
| TFORF0561-ZNF616 | 289 |
| TFORF0922-NR2F1 | 289 |
| TFORF1319-KLF13 | 289 |
| TFORF1337-ZBTB7A | 289 |
| TFORF1964-CUX1 | 289 |
| TFORF2289-HES5 | 289 |
| TFORF2380-MBD1 | 289 |
| TFORF0842-ZSCAN10 | 290 |
| TFORF2527-ERCC3 | 290 |
| TFORF0598-SMARCB1 | 291 |
| TFORF0885-PPARG | 291 |
| TFORF1174-NRL | 291 |
| TFORF1868-MMP3 | 291 |
| TFORF2097-ZKSCAN1 | 291 |
| TFORF3491-NR113 | 291 |
| TFORF0039-SP7 | 292 |
| TFORF0459-CREB5 | 292 |
| TFORF1394-ZNF569 | 292 |
| TFORF1942-MIER1 | 292 |
| TFORF2056-NKX2-8 | 292 |
| TFORF3054-SALL4 | 292 |
| TFORF3317-ZNF75A | 292 |
| TFORF0024-FOXQ1 | 293 |
| TFORF0136-ZNF780B | 293 |
| TFORF0173-RELB | 293 |
| TFORF0232-ZNF599 | 293 |
| TFORF0489-ZFP91 | 293 |
| TFORF0568-ZNF618 | 293 |
| TFORF0590-FOXO6 | 293 |
| TFORF1189-ZNF571 | 293 |
| TFORF1338-ZBTB7C | 293 |
| TFORF1420-ZNF211 | 293 |
| TFORF2103-ZBTB32 | 293 |
| TFORF2549-SKI | 293 |
| TFORF0166-SIX6 | 294 |
| TFORF0649-NR113 | 294 |
| TFORF1435-NFKBIE | 294 |
| TFORF2457-IRF3 | 294 |
| TFORF3398-HLF | 294 |
| TFORF0251-VEZF1 | 295 |
| TFORF0320-MSLN | 295 |
| TFORF1261-TP53 | 295 |
| TFORF1492-FOSL1 | 295 |
| TFORF1615-GSX1 | 295 |
| TFORF2062-NKX2-6 | 295 |
| TFORF2068-FLII | 295 |
| TFORF2104-ZBTB34 | 295 |
| TFORF2169-BLZF1 | 295 |
| TFORF2728-ZFP1 | 295 |
| TFORF3104-NKX2-5 | 295 |
| TFORF3242-ZNF136 | 295 |
| TFORF3497-ZNF280C | 295 |
| TFORF0186-DMRTC1 | 296 |
| TFORF1199-ZNF579 | 296 |
| TFORF1637-HOXC12 | 296 |
| TFORF2154-BCL11A | 296 |
| TFORF2290-HES6 | 296 |
| TFORF2780-ZNF30 | 296 |
| TFORF2982-ZNF420 | 296 |
| TFORF3011-ZNF10 | 296 |
| TFORF3539-ZNF747 | 296 |
| TFORF0864-GTF2I | 297 |
| TFORF0956-MYF5 | 297 |
| TFORF1114-RCOR3 | 297 |
| TFORF1234-AFF2 | 297 |
| TFORF3323-ZNF626 | 297 |
| TFORF0421-SKIL | 298 |
| TFORF0637-HOXC4 | 298 |
| TFORF1508-MTF1 | 298 |
| TFORF1708-PPP1R13L | 298 |
| TFORF1803-USF1 | 298 |
| TFORF2159-BCL11B | 298 |
| TFORF2222-YAP1 | 298 |
| TFORF2396-ZNF396 | 298 |
| TFORF2559-TLX1 | 298 |
| TFORF3116-HEYL | 298 |
| TFORF0790-DBX1 | 299 |
| TFORF1464-VAV1 | 299 |
| TFORF2066-FLII | 299 |
| TFORF2245-TCF12 | 299 |
| TFORF2762-ZKSCAN3 | 299 |
| TFORF2883-BHLHA9 | 299 |
| TFORF3018-NEUROG3 | 299 |
| TFORF3456-ZNF426 | 299 |
| TFORF0112-SMAD2 | 300 |
| TFORF0943-LMO2 | 300 |
| TFORF1180-ZNF799 | 300 |
| TFORF1300-MAEL | 300 |
| TFORF1602-ZNF256 | 300 |
| TFORF1903-TCF7L2 | 300 |
| TFORF2472-HDAC5 | 300 |
| TFORF2914-NFIB | 300 |
| TFORF3397-ZIK1 | 300 |
| TFORF3501-CERS6 | 300 |
| TFORF0174-RELA | 301 |
| TFORF0409-CTCFL | 301 |
| TFORF0813-CDCA7L | 301 |
| TFORF1139-LRRFIP1 | 301 |
| TFORF1239-ZNF431 | 301 |
| TFORF1310-TTF1 | 301 |
| TFORF1624-ZNF516 | 301 |
| TFORF1894-AHRR | 301 |
| TFORF1896-NR2C1 | 301 |
| TFORF1932-JUN | 301 |
| TFORF2022-NPAS4 | 301 |
| TFORF2754-ZNF446 | 301 |
| TFORF3249-ZNF181 | 301 |
| TFORF0098-MSGN1 | 302 |
| TFORF0163-PES1 | 302 |
| TFORF0794-ATF7 | 302 |
| TFORF0970-ZNF124 | 302 |
| TFORF1245-PKNOX2 | 302 |
| TFORF2089-ZNF442 | 302 |
| TFORF2092-ZBTB2 | 302 |
| TFORF2284-HES2 | 302 |
| TFORF2318-ZNF732 | 302 |
| TFORF2412-ZNF705D | 302 |
| TFORF2478-MESP1 | 302 |
| TFORF2531-SOX9 | 302 |
| TFORF3119-DDIT3 | 302 |
| TFORF3224-HMGB1 | 302 |
| TFORF3252-ZNF77 | 302 |
| TFORF3399-POU2F2 | 302 |
| TFORF0998-ZNF302 | 303 |
| TFORF1191-ZNF573 | 303 |
| TFORF1724-ZNF691 | 303 |
| TFORF1917-RUNX2 | 303 |
| TFORF1973-TBX3 | 303 |
| TFORF2078-FLI1 | 303 |
| TFORF2766-ZKSCAN7 | 303 |
| TFORF0269-TCF4 | 304 |
| TFORF0768-ZNF551 | 304 |
| TFORF1612-TADA2A | 304 |
| TFORF1757-ZNF189 | 304 |
| TFORF2913-NFIB | 304 |
| TFORF0005-HIF3A | 305 |
| TFORF0646-NR113 | 305 |
| TFORF0961-ERG | 305 |
| TFORF1760-ZNF25 | 305 |
| TFORF2730-ZNF668 | 305 |
| TFORF3113-RFXANK | 305 |
| TFORF3231-ZNF423 | 305 |
| TFORF3503-CDK7 | 305 |
| TFORF0601-ZNF726 | 306 |
| TFORF2235-ZNF880 | 306 |
| TFORF3302-SPIC | 306 |
| TFORF0045-ZNF671 | 307 |
| TFORF1869-POU2F1 | 307 |
| TFORF2788-OTX2 | 307 |
| TFORF2801-ETV2 | 307 |
| TFORF3110-TGIF2LY | 307 |
| TFORF1158-EOMES | 308 |
| TFORF1714-LDB2 | 308 |
| TFORF3033-NFKBIA | 308 |
| TFORF3476-SNAI1 | 308 |
| TFORF0486-ZFP90 | 309 |
| TFORF0640-NHP2 | 309 |
| TFORF0892-ING4 | 309 |
| TFORF1009-ZNF544 | 309 |
| TFORF1128-THAP3 | 309 |
| TFORF1363-ELOF1 | 309 |
| TFORF1409-ZNF559 | 309 |
| TFORF1515-NANOGNB | 309 |
| TFORF1947-MIER1 | 309 |
| TFORF2725-ZNF74 | 309 |
| TFORF2803-ETV2 | 309 |
| TFORF3512-SOX14 | 309 |
| TFORF0015-DRAP1 | 310 |
| TFORF2311-RXRG | 310 |
| TFORF2633-TFDP2 | 310 |
| TFORF2705-ESRRB | 310 |
| TFORF0007-TULP4 | 311 |
| TFORF1181-TBX21 | 311 |
| TFORF1372-ZNF143 | 311 |
| TFORF1603-HINFP | 311 |
| TFORF1940-JUP | 311 |
| TFORF3425-ZNF559 | 311 |
| TFORF0135-ZNF780A | 312 |
| TFORF0812-CDCA7L | 312 |
| TFORF0860-NR1H4 | 312 |
| TFORF1159-EOMES | 312 |
| TFORF1376-ZNF146 | 312 |
| TFORF1473-LIN54 | 312 |
| TFORF2099-SOHLH2 | 312 |
| TFORF2370-MBD4 | 312 |
| TFORF2405-NFE2L1 | 312 |
| TFORF2515-PDCD2 | 312 |
| TFORF2741-ZNF484 | 312 |
| TFORF2885-GLI2 | 312 |
| TFORF3007-SMAD1 | 312 |
| TFORF3379-ACTL6A | 312 |
| TFORF0591-FOXO4 | 313 |
| TFORF0999-ZNF302 | 313 |
| TFORF1054-PLAGL1 | 313 |
| TFORF1613-TADA2A | 313 |
| TFORF1759-ALYREF | 313 |
| TFORF1816-SATB1 | 313 |
| TFORF2303-CIITA | 313 |
| TFORF2784-GLIS3 | 313 |
| TFORF3029-ATOH1 | 313 |
| TFORF3087-MAFF | 313 |
| TFORF3267-SNAPC2 | 313 |
| TFORF3283-HOXA5 | 313 |
| TFORF3374-VAX2 | 313 |
| TFORF3521-THAP8 | 313 |
| TFORF0182-SHOX2 | 314 |
| TFORF1141-HMBOX1 | 314 |
| TFORF1322-KLF10 | 314 |
| TFORF2069-MYC | 314 |
| TFORF2150-ZNF250 | 314 |
| TFORF0032-GSC2 | 315 |
| TFORF1182-TBX20 | 315 |
| TFORF2287-HES4 | 315 |
| TFORF3251-PFDN5 | 315 |
| TFORF0230-ZNF595 | 316 |
| TFORF0654-NR113 | 316 |
| TFORF0854-VSX1 | 316 |
| TFORF1481-TP63 | 316 |
| TFORF2382-MBD1 | 316 |
| TFORF2590-CERS3 | 316 |
| TFORF2859-ID1 | 316 |
| TFORF2870-HMX1 | 316 |
| TFORF1086-GTF2E1 | 317 |
| TFORF1330-TFAP2C | 317 |
| TFORF1699-E2F5 | 317 |
| TFORF2180-ZNF417 | 317 |
| TFORF2715-ZNF713 | 317 |
| TFORF2783-GLIS3 | 317 |
| TFORF2785-GLIS1 | 317 |
| TFORF2786-GLIS1 | 317 |
| TFORF2941-DLX5 | 317 |
| TFORF3275-HMGA1 | 317 |
| TFORF3417-TCF7L2 | 317 |
| TFORF0467-CARHSP1 | 318 |
| TFORF1094-HSFX2 | 318 |
| TFORF1487-NR6A1 | 318 |
| TFORF1640-PSIP1 | 318 |
| TFORF1863-POU2F2 | 318 |
| TFORF2605-MYRF | 318 |
| TFORF3043-ZNF75D | 318 |
| TFORF3152-ZFP3 | 318 |
| TFORF3253-RBPJ | 318 |
| TFORF3333-PUF60 | 318 |
| TFORF0581-ZNF101 | 319 |
| TFORF0671-ZNF821 | 319 |
| TFORF0701-PAXBP1 | 319 |
| TFORF1142-HMBOX1 | 319 |
| TFORF1309-TTF1 | 319 |
| TFORF1676-RUNX1T1 | 319 |
| TFORF1775-ZNF500 | 319 |
| TFORF1829-DMRTA2 | 319 |
| TFORF1937-MEIS2 | 319 |
| TFORF2174-ZNF419 | 319 |
| TFORF2241-GATA3 | 319 |
| TFORF2371-ZNF468 | 319 |
| TFORF3133-TCF7 | 319 |
| TFORF0852-ZIC4 | 320 |
| TFORF1171-MLX | 320 |
| TFORF1697-E2F6 | 320 |
| TFORF2810-ETV7 | 320 |
| TFORF2852-HMGA2 | 320 |
| TFORF3531-HMGN3 | 320 |
| TFORF0308-CREM | 321 |
| TFORF0380-SMARCA2 | 321 |
| TFORF0925-NR2F2 | 321 |
| TFORF1252-TP53 | 321 |
| TFORF1506-HEY2 | 321 |
| TFORF1588-ZNF773 | 321 |
| TFORF2511-PDCD2 | 321 |
| TFORF2655-STAT6 | 321 |
| TFORF1143-HMBOX1 | 322 |
| TFORF1312-AEBP2 | 322 |
| TFORF1716-LDB2 | 322 |
| TFORF3159-SMAD2 | 322 |
| TFORF3312-ELK4 | 322 |
| TFORF1063-NFATC1 | 323 |
| TFORF2079-FLI1 | 323 |
| TFORF2582-NR1D1 | 323 |
| TFORF2828-IKZF3 | 323 |
| TFORF0289-MEF2C | 324 |
| TFORF0438-ZSCAN30 | 324 |
| TFORF0571-MEOX1 | 324 |
| TFORF0750-ZNF131 | 324 |
| TFORF0809-SOHLH1 | 324 |
| TFORF2125-ZNF747 | 324 |
| TFORF2356-ZNF648 | 324 |
| TFORF2387-MBD2 | 324 |
| TFORF2686-ZMYND11 | 324 |
| TFORF3351-ARNTL | 324 |
| TFORF0275-TCF3 | 325 |
| TFORF0795-ATF7 | 325 |
| TFORF1845-ALX4 | 325 |
| TFORF2779-BATF | 325 |
| TFORF3305-ESR1 | 325 |
| TFORF0580-ZNF107 | 326 |
| TFORF1038-WT1 | 326 |
| TFORF1652-SPI1 | 326 |
| TFORF1675-RUNX1T1 | 326 |
| TFORF3101-PES1 | 326 |
| TFORF0608-MAFA | 327 |
| TFORF0721-ZNF727 | 327 |
| TFORF1155-RERE | 327 |
| TFORF2901-DACH1 | 327 |
| TFORF3157-SMARCD1 | 327 |
| TFORF3517-SOX12 | 327 |
| TFORF0457-TRIM24 | 328 |
| TFORF0806-SMARCC2 | 328 |
| TFORF1064-NFATC1 | 328 |
| TFORF1374-ZNF143 | 328 |
| TFORF1812-ZNF438 | 328 |
| TFORF1873-BBX | 328 |
| TFORF2003-FOXD3 | 328 |
| TFORF2139-ZNF527 | 328 |
| TFORF2598-RORA | 328 |
| TFORF2959-KAT2A | 328 |
| TFORF0224-ZNF592 | 329 |
| TFORF0443-ZFX | 329 |
| TFORF0803-ATF2 | 329 |
| TFORF0861-NR1H4 | 329 |
| TFORF0986-GZF1 | 329 |
| TFORF1095-EN1 | 329 |
| TFORF1148-HOXA2 | 329 |
| TFORF1321-KLF11 | 329 |
| TFORF1585-ZNF772 | 329 |
| TFORF1661-ARID5B | 329 |
| TFORF1906-TCF7L2 | 329 |
| TFORF1999-TAL1 | 329 |
| TFORF2031-PRDM1 | 329 |
| TFORF2272-PRDM5 | 329 |
| TFORF2316-ETV4 | 329 |
| TFORF2420-ZNF705B | 329 |
| TFORF2445-ZIK1 | 329 |
| TFORF2536-SOX6 | 329 |
| TFORF2542-SOX5 | 329 |
| TFORF2609-FOXA2 | 329 |
| TFORF2744-T | 329 |
| TFORF3037-IRF2 | 329 |
| TFORF0370-NFYC | 330 |
| TFORF0595-PLAG1 | 330 |
| TFORF0968-HAND1 | 330 |
| TFORF1067-NFATC2 | 330 |
| TFORF1250-ZNF133 | 330 |
| TFORF1484-TP63 | 330 |
| TFORF1907-TCF7L2 | 330 |
| TFORF2449-GBX1 | 330 |
| TFORF2487-ZBTB10 | 330 |
| TFORF2944-SATB2 | 330 |
| TFORF3090-ZNF260 | 330 |
| TFORF3115-GSC | 330 |
| TFORF3122-SATB1 | 330 |
| TFORF3140-ZNF718 | 330 |
| TFORF3188-ZNF394 | 330 |
| TFORF3202-ZNF816 | 330 |
| TFORF3223-ZMIZ2 | 330 |
| TFORF3263-ZNF26 | 330 |
| TFORF3269-EZH1 | 330 |
| TFORF3276-ZBTB14 | 330 |
| TFORF3342-TP53BP2 | 330 |
| TFORF3372-DAXX | 330 |
| TFORF3446-ZNF786 | 330 |
| TFORF0077-KCNIP4 | 331 |
| TFORF0233-MNX1 | 331 |
| TFORF0990-KLF8 | 331 |
| TFORF1403-ZNF566 | 331 |
| TFORF1740-ZNF768 | 331 |
| TFORF2612-ZNF276 | 331 |
| TFORF2797-TAF7 | 331 |
| TFORF3430-FXN | 331 |
| TFORF3469-ZNF438 | 331 |
| TFORF0357-ZNF33A | 332 |
| TFORF0500-PPARGC1A | 332 |
| TFORF0940-ZNF639 | 332 |
| TFORF1469-TOX3 | 332 |
| TFORF1685-HNF1B | 332 |
| TFORF1720-DMRT2 | 332 |
| TFORF1833-MTERF1 | 332 |
| TFORF1972-TBX2 | 332 |
| TFORF2259-SOX13 | 332 |
| TFORF3217-ZNF227 | 332 |
| TFORF3268-ZNF34 | 332 |
| TFORF0185-SHOX2 | 333 |
| TFORF0212-FOXP3 | 333 |
| TFORF0368-NFYC | 333 |
| TFORF1230-AFF3 | 333 |
| TFORF1390-PMS1 | 333 |
| TFORF1859-NR4A3 | 333 |
| TFORF2638-TFDP1 | 333 |
| TFORF3209-ZBTB9 | 333 |
| TFORF3453-PREB | 333 |
| TFORF3524-MAEL | 333 |
| TFORF0767-ZNF550 | 334 |
| TFORF1400-ZNF567 | 334 |
| TFORF1687-HNF1B | 334 |
| TFORF2858-ID3 | 334 |
| TFORF2926-BCL6B | 334 |
| TFORF2962-NR2C2 | 334 |
| TFORF3088-E4F1 | 334 |
| TFORF0197-RFX1 | 335 |
| TFORF0846-YBX1 | 335 |
| TFORF1116-RCOR1 | 335 |
| TFORF1694-E4F1 | 335 |
| TFORF1732-HDX | 335 |
| TFORF1796-WDHD1 | 335 |
| TFORF2163-GRHL2 | 335 |
| TFORF2979-NROB2 | 335 |
| TFORF3097-ZNF76 | 335 |
| TFORF3124-SMAD3 | 335 |
| TFORF3204-LITAF | 335 |
| TFORF3227-RPA2 | 335 |
| TFORF3286-NR2F6 | 335 |
| TFORF3516-RNF138 | 335 |
| TFORF0369-NFYC | 336 |
| TFORF0554-ZNF610 | 336 |
| TFORF0786-FOXN1 | 336 |
| TFORF0884-HOXB4 | 336 |
| TFORF0946-LMO3 | 336 |
| TFORF1340-POU5F1 | 336 |
| TFORF1405-ZNF566 | 336 |
| TFORF1569-ZNF680 | 336 |
| TFORF1579-ZNF778 | 336 |
| TFORF1617-NF1 | 336 |
| TFORF1647-ZNF358 | 336 |
| TFORF1766-ZNF23 | 336 |
| TFORF1793-CNBP | 336 |
| TFORF2302-CIITA | 336 |
| TFORF2441-FUS | 336 |
| TFORF2488-ZBTB10 | 336 |
| TFORF2538-SOX4 | 336 |
| TFORF2833-IKZF3 | 336 |
| TFORF2845-TCF24 | 336 |
| TFORF3098-ZNF467 | 336 |
| TFORF3197-STAT5A | 336 |
| TFORF0157-EWSR1 | 337 |
| TFORF0245-CAMTA2 | 337 |
| TFORF0412-CTCFL | 337 |
| TFORF0585-ZNF329 | 337 |
| TFORF0749-ZNF131 | 337 |
| TFORF0902-PTF1A | 337 |
| TFORF1007-ZNF544 | 337 |
| TFORF1011-ZNF546 | 337 |
| TFORF1132-BNC1 | 337 |
| TFORF1361-SP100 | 337 |
| TFORF1523-NFRKB | 337 |
| TFORF1601-ZNF195 | 337 |
| TFORF1648-ZNF429 | 337 |
| TFORF1674-RUNX1T1 | 337 |
| TFORF1755-ZNF182 | 337 |
| TFORF1949-MIER2 | 337 |
| TFORF1970-ZNF233 | 337 |
| TFORF2070-MYB | 337 |
| TFORF2209-CREB3L3 | 337 |
| TFORF2519-ZFP37 | 337 |
| TFORF2627-NONO | 337 |
| TFORF2644-PAX3 | 337 |
| TFORF2768-KDM5D | 337 |
| TFORF2880-ELF2 | 337 |
| TFORF2888-BRPF1 | 337 |
| TFORF3061-SNAPC3 | 337 |
| TFORF3081-ELK3 | 337 |
| TFORF3190-ZNF554 | 337 |
| TFORF3295-SPDEF | 337 |
| TFORF3369-BLZF1 | 337 |
| TFORF3478-FOXD4 | 337 |
| TFORF3507-NOCT | 337 |
| TFORF0175-RELA | 338 |
| TFORF1315-ZNF813 | 338 |
| TFORF2040-TP53BP2 | 338 |
| TFORF2175-ZNF419 | 338 |
| TFORF2936-FOS | 338 |
| TFORF2973-PPARD | 338 |
| TFORF0114-SMAD3 | 339 |
| TFORF0667-TGFB111 | 339 |
| TFORF1839-EZH2 | 339 |
| TFORF2133-MNAT1 | 339 |
| TFORF3139-PPARG | 339 |
| TFORF0352-FOXL1 | 340 |
| TFORF1077-NFATC4 | 340 |
| TFORF1098-UBP1 | 340 |
| TFORF1567-ZNF683 | 340 |
| TFORF2320-TAF1A | 340 |
| TFORF0793-ATF5 | 341 |
| TFORF1264-ZNF135 | 341 |
| TFORF2460-IRF7 | 341 |
| TFORF2461-IRF7 | 341 |
| TFORF0294-MEF2A | 342 |
| TFORF1598-ZNF195 | 342 |
| TFORF2027-NPAS2 | 342 |
| TFORF2751-ZNF444 | 342 |
| TFORF0980-KLF7 | 343 |
| TFORF2051-ATF6B | 343 |
| TFORF2898-MTA3 | 343 |
| TFORF0273-TCF3 | 344 |
| TFORF0482-DMRTB1 | 344 |
| TFORF1005-POU1F1 | 344 |
| TFORF1355-ILF3 | 344 |
| TFORF1815-ZNF433 | 344 |
| TFORF2723-ZNF76 | 344 |
| TFORF2840-IKZF3 | 344 |
| TFORF2951-TWIST2 | 344 |
| TFORF0101-FOXC2 | 345 |
| TFORF0105-TRERF1 | 345 |
| TFORF1048-PLAGL2 | 345 |
| TFORF1272-DUXA | 345 |
| TFORF1537-ZBTB45 | 345 |
| TFORF1931-XRCC6 | 345 |
| TFORF2094-DEK | 345 |
| TFORF2199-RXRA | 345 |
| TFORF2777-KDM5C | 345 |
| TFORF3448-TP63 | 345 |
| TFORF0856-VSX1 | 346 |
| TFORF1066-NFATC2 | 346 |
| TFORF1705-E2F2 | 346 |
| TFORF1926-ZBTB25 | 346 |
| TFORF2262-ZFP28 | 346 |
| TFORF3047-ZNF266 | 346 |
| TFORF0029-ZNF43 | 347 |
| TFORF0113-SMAD3 | 347 |
| TFORF0687-PRDM10 | 347 |
| TFORF0758-OVOL3 | 347 |
| TFORF1055-PLAGL1 | 347 |
| TFORF1090-TULP1 | 347 |
| TFORF1587-ZNF772 | 347 |
| TFORF1593-ZNF197 | 347 |
| TFORF1667-TP73 | 347 |
| TFORF1982-TBX5 | 347 |
| TFORF2119-HOPX | 347 |
| TFORF2182-ZNF415 | 347 |
| TFORF2410-ZNF705G | 347 |
| TFORF2787-DCP1A | 347 |
| TFORF3103-HOXA1 | 347 |
| TFORF3214-ZNF484 | 347 |
| TFORF1650-ZSCAN5A | 348 |
| TFORF2307-ETV1 | 348 |
| TFORF2458-IRF3 | 348 |
| TFORF2648-PAX3 | 348 |
| TFORF2761-ZKSCAN3 | 348 |
| TFORF2931-LHX4 | 348 |
| TFORF0287-MEF2C | 349 |
| TFORF0620-ZSCAN21 | 349 |
| TFORF0934-ZNF85 | 349 |
| TFORF1726-ZNF692 | 349 |
| TFORF1763-ZNF26 | 349 |
| TFORF1927-ZNF75D | 349 |
| TFORF2667-ZBED4 | 349 |
| TFORF2727-ZFP1 | 349 |
| TFORF0142-FXN | 350 |
| TFORF0262-TCF4 | 350 |
| TFORF0303-CREM | 350 |
| TFORF0550-PAX8 | 350 |
| TFORF0783-SEBOX | 350 |
| TFORF0828-ZNF585B | 350 |
| TFORF1059-NFATC1 | 350 |
| TFORF1417-ZNF214 | 350 |
| TFORF1642-ZNF426 | 350 |
| TFORF1656-SPIB | 350 |
| TFORF2128-ZNF740 | 350 |
| TFORF2610-FOXA2 | 350 |
| TFORF2721-ZNF79 | 350 |
| TFORF2983-SUZ12 | 350 |
| TFORF3149-ZNF254 | 350 |
| TFORF3297-HIF1A | 350 |
| TFORF0168-SIX2 | 351 |
| TFORF0427-PBX1 | 351 |
| TFORF1830-ZNF717 | 351 |
| TFORF2447-ZIK1 | 351 |
| TFORF2958-SP1 | 351 |
| TFORF0226-ZNF593 | 352 |
| TFORF0347-FOXB1 | 352 |
| TFORF0778-SHOX | 352 |
| TFORF1220-HELT | 352 |
| TFORF2348-HOXD8 | 352 |
| TFORF0572-MEOX1 | 353 |
| TFORF0573-MEOX2 | 353 |
| TFORF0715-ZNF620 | 353 |
| TFORF1008-ZNF544 | 353 |
| TFORF1969-ZNF233 | 353 |
| TFORF2484-CBX2 | 353 |
| TFORF2693-TEAD4 | 353 |
| TFORF2863-SREBF1 | 353 |
| TFORF3435-SUPT5H | 353 |
| TFORF3479-ZNF132 | 353 |
| TFORF0593-UNCX | 354 |
| TFORF0945-LMO3 | 354 |
| TFORF1429-NR3C2 | 354 |
| TFORF2300-HIC1 | 354 |
| TFORF2496-ASCL3 | 354 |
| TFORF2497-ASCL1 | 354 |
| TFORF2498-ASCL4 | 354 |
| TFORF2534-SOX6 | 354 |
| TFORF2539-SOX5 | 354 |
| TFORF2596-RORB | 354 |
| TFORF3062-ZNF549 | 354 |
| TFORF3250-ZKSCAN8 | 354 |
| TFORF3367-ZNF281 | 354 |
| TFORF3472-NFATC3 | 354 |
| TFORF0187-DMRTC2 | 355 |
| TFORF0395-ZNF7 | 355 |
| TFORF0833-GTF2F2 | 355 |
| TFORF1089-TULP1 | 355 |
| TFORF1203-SETDB2 | 355 |
| TFORF1679-RUNX1T1 | 355 |
| TFORF2293-HES7 | 355 |
| TFORF2451-MLLT10 | 355 |
| TFORF3229-MAX | 355 |
| TFORF0063-GTF3C2 | 356 |
| TFORF0072-CSDE1 | 356 |
| TFORF0122-BARX1 | 356 |
| TFORF0274-TCF3 | 356 |
| TFORF0378-SMARCA1 | 356 |
| TFORF0512-TSHZ1 | 356 |
| TFORF0859-ZIC3 | 356 |
| TFORF0926-ATOH7 | 356 |
| TFORF0947-EMX2 | 356 |
| TFORF0995-ZNF304 | 356 |
| TFORF1073-NFATC4 | 356 |
| TFORF1306-ZSCAN9 | 356 |
| TFORF1308-JARID2 | 356 |
| TFORF1550-TAZ | 356 |
| TFORF1938-MEIS1 | 356 |
| TFORF2123-ZNF273 | 356 |
| TFORF2219-YAP1 | 356 |
| TFORF2237-GATA4 | 356 |
| TFORF2244-TCF15 | 356 |
| TFORF2295-TAF11 | 356 |
| TFORF2301-HIC2 | 356 |
| TFORF2344-MITF | 356 |
| TFORF2537-SOX7 | 356 |
| TFORF2946-MYOD1 | 356 |
| TFORF2956-HNF4A | 356 |
| TFORF2960-PGR | 356 |
| TFORF3067-ZNF8 | 356 |
| TFORF3077-AP2B1 | 356 |
| TFORF3091-ZNF260 | 356 |
| TFORF3120-ZNF341 | 356 |
| TFORF3155-HLX | 356 |
| TFORF3161-ZNF433 | 356 |
| TFORF3162-ZNF253 | 356 |
| TFORF3206-TBR1 | 356 |
| TFORF3213-ZNF572 | 356 |
| TFORF3248-ZNF311 | 356 |
| TFORF3296-HIF1A | 356 |
| TFORF3307-ZNF563 | 356 |
| TFORF3310-ZNF561 | 356 |
| TFORF3359-ZNF263 | 356 |
| TFORF3365-FOXA1 | 356 |
| TFORF3415-NKRF | 356 |
| TFORF3432-NR3C1 | 356 |
| TFORF3451-ZNF366 | 356 |
| TFORF3473-RUNX1 | 356 |
| TFORF3487-NFATC1 | 356 |
| TFORF3508-ZNF134 | 356 |
| TFORF3519-TCF4 | 356 |
| TFORF3526-THAP12 | 356 |
| TFORF3536-HOXD4 | 356 |
| TFORF3549-GFP | 356 |
| TFORF3550-mCherry | 356 |
| TFORF0049-MAX | 357 |
| TFORF0977-ZNF121 | 357 |
| TFORF1388-PMS1 | 357 |
| TFORF1838-EZH2 | 357 |
| TFORF2106-ZBTB37 | 357 |
| TFORF2518-ZFP37 | 357 |
| TFORF3163-PPP1R13B | 357 |
| TFORF3277-ZNF518A | 357 |
| TFORF3409-ZNF621 | 357 |
| TFORF3413-ZFP82 | 357 |
| TFORF1162-NFKBIL1 | 358 |
| TFORF1867-POU2F2 | 358 |
| TFORF2600-POU6F2 | 358 |
| TFORF2897-MTA2 | 358 |
| TFORF2978-NROB2 | 358 |
| TFORF3039-NR1H3 | 358 |
| TFORF0302-CREM | 359 |
| TFORF0313-CREM | 359 |
| TFORF0531-PAX6 | 359 |
| TFORF0904-DNAJC1 | 359 |
| TFORF1384-ZNF788 | 359 |
| TFORF1496-HHEX | 359 |
| TFORF1800-USF2 | 359 |
| TFORF2044-ARID3C | 359 |
| TFORF3184-HSBP1 | 359 |
| TFORF3241-ZNF490 | 359 |
| TFORF3434-ZNF37A | 359 |
| TFORF3449-DMRT1 | 359 |
| TFORF0050-MAZ | 360 |
| TFORF0254-CAMTA1 | 360 |
| TFORF0416-ZNF559-ZNF177 | 360 |
| TFORF0735-ZNF480 | 360 |
| TFORF0850-ZIC4 | 360 |
| TFORF0882-HOXB1 | 360 |
| TFORF1004-POU1F1 | 360 |
| TFORF1047-SNAI2 | 360 |
| TFORF1068-NFATC2 | 360 |
| TFORF1241-LBX2 | 360 |
| TFORF1263-TP53 | 360 |
| TFORF1545-ZNF160 | 360 |
| TFORF1646-ZNF423 | 360 |
| TFORF1710-CBFB | 360 |
| TFORF1811-ZNF438 | 360 |
| TFORF2126-ZNF746 | 360 |
| TFORF2220-YAP1 | 360 |
| TFORF2415-ZNF268 | 360 |
| TFORF2619-ZXDB | 360 |
| TFORF2850-HMGA2 | 360 |
| TFORF3017-ETV4 | 360 |
| TFORF3288-HOXA9 | 360 |
| TFORF3408-ZNF286A | 360 |
| TFORF3438-GCM1 | 360 |
| TFORF0492-ZSCAN2 | 361 |
| TFORF1198-ZNF578 | 361 |
| TFORF1497-LYL1 | 361 |
| TFORF1821-ZNF138 | 361 |
| TFORF2028-NPAS1 | 361 |
| TFORF2517-PDCD2 | 361 |
| TFORF2815-FOSB | 361 |
| TFORF2851-HMGA2 | 361 |
| TFORF3301-OLIG3 | 361 |
| TFORF0407-CTCFL | 362 |
| TFORF1318-MKX | 362 |
| TFORF1451-DLX1 | 362 |
| TFORF1467-HOXD13 | 362 |
| TFORF1723-ZNF691 | 362 |
| TFORF2874-ELF1 | 362 |
| TFORF0410-CTCFL | 363 |
| TFORF0429-PBX1 | 363 |
| TFORF0623-DDIT3 | 363 |
| TFORF0760-OVOL1 | 363 |
| TFORF0823-LHX6 | 363 |
| TFORF0847-YBX3 | 363 |
| TFORF1127-THAP3 | 363 |
| TFORF1559-YAF2 | 363 |
| TFORF1722-DMRT3 | 363 |
| TFORF2385-MBD3 | 363 |
| TFORF2394-ZNF396 | 363 |
| TFORF2512-PDCD2 | 363 |
| TFORF2749-NKX6-3 | 363 |
| TFORF0309-CREM | 364 |
| TFORF1333-TFAP2D | 364 |
| TFORF1455-TFEC | 364 |
| TFORF1514-NKX3-1 | 364 |
| TFORF1866-POU2F2 | 364 |
| TFORF2001-MYEF2 | 364 |
| TFORF2122-ZNF563 | 364 |
| TFORF2242-GATA1 | 364 |
| TFORF2551-BID | 364 |
| TFORF3304-MITF | 364 |
| TFORF1457-TFEB | 365 |
| TFORF2341-MITF | 365 |
| TFORF2342-MITF | 365 |
| TFORF2345-MITF | 365 |
| TFORF2346-MITF | 365 |
| TFORF3303-MITF | 365 |
| TFORF3327-LHX6 | 365 |

TABLE 19B
Predicted double TFs for reference cell types from the human fetal cell atlas (42). Combinations were ranked based on the cell type-specific
gene signature score. Only the top ranked 100 possible combinations are shown. Combinations are presented as clusters from (A).

| | | Antigen presenting | | | | | | Bronchiolar and | | CCL19_CCL21 positive | |
|---|---|---|---|---|---|---|---|---|---|---|---|
| Amacrine cells | | cells | | Astrocytes | | Bipolar cells | | alveolar epithelial cells | | cells | |
| Clusters | Score | Clusters | Score | Clusters | Score | Clusters | Score | Clusters | Score | Clusters | Score |
| 57;243 | 5.96 | 156;270 | 4.43 | 208;327 | 7.96 | 31;92 | 5.02 | 99;261 | 2.81 | 299;336 | 9.48 |
| 58;293 | 5.96 | 69;98 | 3.46 | 95;327 | 7.96 | 34;106 | 5.02 | 97;261 | 2.81 | 192;299 | 8.32 |
| 53;256 | 4.93 | 79;97 | 3.46 | 327;362 | 6.62 | 27;245 | 3.94 | 96;261 | 2.81 | 250;281 | 7.22 |
| 79;256 | 4.93 | 79;138 | 3.46 | 169;327 | 6.62 | 49;180 | 3.94 | 139;261 | 2.81 | 299;338 | 7.22 |
| 248;256 | 4.93 | 58;80 | 3.46 | 187;327 | 6.62 | 50;225 | 3.94 | 163;261 | 2.81 | 282;298 | 7.22 |
| 17;256 | 4.93 | 98;156 | 3.46 | 320;327 | 6.62 | 38;154 | 3.94 | 142;261 | 2.81 | 178;282 | 7.22 |
| 51;293 | 4.93 | 73;98 | 3.46 | 197;327 | 6.62 | 29;101 | 3.94 | 153;353 | 2.81 | 203;282 | 7.22 |
| 59;256 | 4.93 | 78;138 | 3.46 | 265;327 | 6.62 | 27;254 | 3.94 | 325;354 | 2.81 | 299;337 | 7.22 |
| 72;256 | 3.96 | 98;180 | 3.46 | 181;327 | 6.62 | 100;253 | 3.94 | 153;354 | 2.81 | 281;362 | 7.22 |
| 121;293 | 3.96 | 98;169 | 3.46 | 170;327 | 6.62 | 55;68 | 3.94 | 74;354 | 2.81 | 175;282 | 7.22 |
| 73;256 | 3.96 | 98;182 | 3.46 | 207;327 | 6.62 | 34;93 | 3.94 | 95;261 | 2.81 | 185;282 | 7.22 |
| 256;348 | 3.96 | 49;214 | 2.58 | 68;327 | 6.62 | 31;164 | 3.94 | 143;261 | 2.81 | 282;300 | 7.22 |
| 65;243 | 3.96 | 49;162 | 2.58 | 325;327 | 6.62 | 92;254 | 3.94 | 88;331 | 1.83 | 280;303 | 6.17 |
| 190;256 | 3.96 | 98;206 | 2.58 | 206;327 | 6.62 | 34;68 | 3.94 | 161;261 | 1.83 | 300;364 | 6.17 |
| 184;225 | 3.96 | 98;214 | 2.58 | 247;327 | 6.62 | 29;267 | 3.94 | 61;354 | 1.83 | 212;281 | 6.17 |
| 144;256 | 3.96 | 49;216 | 2.58 | 171;327 | 6.62 | 92;239 | 3.94 | 198;261 | 1.83 | 93;300 | 6.17 |
| 121;256 | 3.96 | 35;71 | 2.58 | 164;327 | 6.62 | 29;244 | 3.94 | 249;354 | 1.83 | 281;338 | 6.17 |
| 69;256 | 3.96 | 219;326 | 2.58 | 298;327 | 6.62 | 29;103 | 3.94 | 7;261 | 1.83 | 61;282 | 6.17 |
| 58;288 | 3.96 | 35;270 | 2.58 | 19;327 | 6.62 | 29;254 | 3.94 | 171;354 | 1.83 | 137;282 | 6.17 |
| 58;256 | 3.96 | 77;138 | 2.58 | 233;327 | 6.62 | 118;234 | 3.94 | 231;316 | 1.83 | 282;345 | 6.17 |
| 217;249 | 3.96 | 156;314 | 2.58 | 165;327 | 6.62 | 34;208 | 3.94 | 216;354 | 1.83 | 282;299 | 6.17 |
| 66;293 | 3.96 | 77;150 | 2.58 | 271;327 | 6.62 | 2;230 | 3.94 | 111;261 | 1.83 | 146;282 | 6.17 |
| 94;229 | 3.96 | 77;192 | 2.58 | 192;327 | 6.62 | 34;118 | 3.94 | 73;354 | 1.83 | 151;281 | 6.17 |
| 249;256 | 3.96 | 61;138 | 2.58 | 194;327 | 6.62 | 32;254 | 3.94 | 130;261 | 1.83 | 193;282 | 6.17 |
| 70;249 | 3.96 | 98;193 | 2.58 | 185;327 | 6.62 | 32;179 | 3.94 | 156;261 | 1.83 | 250;282 | 6.17 |
| 63;249 | 3.96 | 98;216 | 2.58 | 73;327 | 6.62 | 32;208 | 3.94 | 74;170 | 1.83 | 152;282 | 6.17 |
| 58;249 | 3.96 | 79;169 | 2.58 | 220;327 | 6.62 | 34;105 | 3.94 | 312;328 | 1.83 | 282;315 | 6.17 |
| 64;256 | 3.96 | 107;138 | 2.58 | 195;327 | 6.62 | 32;359 | 2.96 | 41;261 | 1.83 | 151;282 | 6.17 |
| 242;256 | 3.96 | 138;294 | 2.58 | 236;327 | 6.62 | 116;236 | 2.96 | 51;261 | 1.83 | 193;299 | 6.17 |
| 63;256 | 3.96 | 138;323 | 2.58 | 237;327 | 6.62 | 230;253 | 2.96 | 239;261 | 1.83 | 282;302 | 6.17 |
| 195;256 | 3.96 | 79;150 | 2.58 | 64;327 | 6.62 | 32;362 | 2.96 | 216;261 | 1.83 | 303;338 | 6.17 |
| 41;256 | 3.96 | 314;335 | 2.58 | 193;327 | 6.62 | 27;291 | 2.96 | 25;261 | 1.83 | 202;299 | 6.17 |
| 215;256 | 3.96 | 138;359 | 2.58 | 203;327 | 6.62 | 33;51 | 2.96 | 88;318 | 1.83 | 202;282 | 6.17 |
| 229;256 | 3.96 | 80;96 | 2.58 | 58;327 | 6.62 | 27;208 | 2.96 | 82;261 | 1.83 | 282;338 | 6.17 |
| 253;287 | 3.96 | 80;219 | 2.58 | 210;327 | 6.62 | 51;254 | 2.96 | 88;354 | 1.83 | 299;347 | 6.17 |
| 42;293 | 3.96 | 138;245 | 2.58 | 327;350 | 6.62 | 33;71 | 2.96 | 312;332 | 1.83 | 199;282 | 6.17 |
| 125;293 | 3.96 | 98;152 | 2.58 | 327;352 | 6.62 | 27;220 | 2.96 | 16;261 | 1.83 | 299;350 | 6.17 |
| 71;256 | 3.96 | 150;213 | 2.58 | 178;327 | 6.62 | 29;266 | 2.96 | 184;354 | 1.83 | 277;299 | 6.17 |
| 195;213 | 3.96 | 62;203 | 2.58 | 131;327 | 6.62 | 29;262 | 2.96 | 160;261 | 1.83 | 4;282 | 6.17 |
| 16;242 | 3.96 | 150;207 | 2.58 | 204;327 | 6.62 | 92;118 | 2.96 | 237;354 | 1.83 | 72;282 | 6.17 |
| 75;256 | 3.96 | 138;223 | 2.58 | 327;363 | 6.62 | 92;121 | 2.96 | 172;323 | 1.83 | 73;282 | 6.17 |
| 65;256 | 3.96 | 98;147 | 2.58 | 327;360 | 6.62 | 54;223 | 2.96 | 135;261 | 1.83 | 281;298 | 6.17 |
| 98;256 | 3.96 | 135;360 | 2.58 | 327;336 | 6.62 | 130;352 | 2.96 | 197;261 | 1.83 | 267;299 | 6.17 |
| 74;293 | 3.96 | 138;180 | 2.58 | 9;327 | 5.38 | 32;323 | 2.96 | 130;354 | 1.83 | 217;282 | 6.17 |
| 42;256 | 3.96 | 138;183 | 2.58 | 302;327 | 5.38 | 27;223 | 2.96 | 20;261 | 1.83 | 207;299 | 6.17 |
| 216;256 | 3.96 | 87;138 | 2.58 | 167;327 | 5.38 | 32;262 | 2.96 | 152;261 | 1.83 | 176;282 | 6.17 |
| 195;297 | 3.96 | 75;97 | 2.58 | 215;327 | 5.38 | 32;267 | 2.96 | 122;261 | 1.83 | 60;281 | 6.17 |
| 68;293 | 3.96 | 17;80 | 2.58 | 267;327 | 5.38 | 27;230 | 2.96 | 157;261 | 1.83 | 175;278 | 6.17 |
| 62;242 | 3.96 | 206;270 | 2.58 | 316;327 | 5.38 | 27;234 | 2.96 | 224;261 | 1.83 | 2;282 | 6.17 |
| 132;293 | 3.96 | 98;364 | 2.58 | 238;327 | 5.38 | 27;225 | 2.96 | 33;261 | 1.83 | 299;325 | 5.18 |
| 143;256 | 3.96 | 59;78 | 2.58 | 239;327 | 5.38 | 27;236 | 2.96 | 120;261 | 1.83 | 210;304 | 5.18 |
| 18;293 | 3.96 | 169;270 | 2.58 | 101;327 | 5.38 | 27;239 | 2.96 | 68;261 | 1.83 | 282;304 | 5.18 |
| 67;228 | 3.96 | 53;97 | 2.58 | 266;333 | 5.38 | 38;117 | 2.96 | 103;261 | 1.83 | 147;300 | 5.18 |
| 56;293 | 3.96 | 12;150 | 1.79 | 272;327 | 5.38 | 230;308 | 2.96 | 132;354 | 1.83 | 299;330 | 5.18 |
| 256;324 | 3.96 | 79;182 | 1.79 | 14;327 | 5.38 | 51;253 | 2.96 | 61;171 | 1.83 | 192;300 | 5.18 |
| 228;256 | 3.96 | 96;351 | 1.79 | 59;327 | 5.38 | 33;92 | 2.96 | 82;354 | 1.83 | 300;315 | 5.18 |
| 66;256 | 3.96 | 73;99 | 1.79 | 147;327 | 5.38 | 130;290 | 2.96 | 147;354 | 1.83 | 104;299 | 5.18 |
| 110;256 | 3.96 | 45;277 | 1.79 | 254;327 | 5.38 | 54;247 | 2.96 | 106;261 | 1.83 | 52;299 | 5.18 |
| 111;297 | 3.96 | 75;138 | 1.79 | 234;327 | 5.38 | 92;94 | 2.96 | 61;261 | 1.83 | 300;316 | 5.18 |
| 20;256 | 3.96 | 45;294 | 1.79 | 266;324 | 5.38 | 85;92 | 2.96 | 30;261 | 1.83 | 300;334 | 5.18 |
| 142;256 | 3.96 | 138;264 | 1.79 | 11;327 | 5.38 | 38;119 | 2.96 | 144;354 | 1.83 | 105;299 | 5.18 |
| 65;293 | 3.96 | 270;282 | 1.79 | 266;327 | 5.38 | 29;290 | 2.96 | 73;261 | 1.83 | 300;340 | 5.18 |
| 155;256 | 3.96 | 45;214 | 1.79 | 327;348 | 5.38 | 144;239 | 2.96 | 61;173 | 1.83 | 300;345 | 5.18 |
| 62;256 | 3.96 | 97;138 | 1.79 | 213;327 | 5.38 | 54;241 | 2.96 | 94;261 | 1.83 | 299;364 | 5.18 |
| 67;256 | 3.96 | 79;206 | 1.79 | 295;327 | 5.38 | 34;214 | 2.96 | 217;261 | 1.83 | 280;302 | 5.18 |
| 59;297 | 3.96 | 97;137 | 1.79 | 244;327 | 5.38 | 54;213 | 2.96 | 262;330 | 1.83 | 106;281 | 5.18 |
| 19;256 | 3.96 | 97;135 | 1.79 | 262;327 | 5.38 | 2;54 | 2.96 | 172;261 | 1.83 | 300;361 | 5.18 |
| 187;256 | 3.96 | 107;150 | 1.79 | 35;327 | 5.38 | 21;51 | 2.96 | 238;261 | 1.83 | 280;300 | 5.18 |
| 233;256 | 3.96 | 97;131 | 1.79 | 288;327 | 5.38 | 34;359 | 2.96 | 185;261 | 1.83 | 252;281 | 5.18 |
| 247;293 | 3.96 | 107;162 | 1.79 | 139;327 | 5.38 | 29;201 | 2.96 | 200;261 | 1.83 | 17;281 | 5.18 |
| 178;256 | 3.96 | 97;128 | 1.79 | 214;327 | 5.38 | 34;355 | 2.96 | 261;342 | 1.83 | 92;299 | 5.18 |
| 18;256 | 3.96 | 91;228 | 1.79 | 107;327 | 5.38 | 29;194 | 2.96 | 137;149 | 1.83 | 161;303 | 5.18 |
| 67;249 | 3.96 | 45;302 | 1.79 | 172;327 | 5.38 | 29;193 | 2.96 | 261;343 | 1.83 | 202;281 | 5.18 |
| 184;242 | 3.96 | 138;168 | 1.79 | 264;327 | 5.38 | 29;192 | 2.96 | 42;132 | 1.83 | 225;281 | 5.18 |
| 189;293 | 3.07 | 46;150 | 1.79 | 62;327 | 5.38 | 100;323 | 2.96 | 25;354 | 1.83 | 210;299 | 5.18 |
| 65;248 | 3.07 | 58;162 | 1.79 | 241;327 | 5.38 | 33;225 | 2.96 | 261;346 | 1.83 | 302;338 | 5.18 |
| 154;293 | 3.07 | 138;197 | 1.79 | 135;327 | 5.38 | 34;351 | 2.96 | 261;347 | 1.83 | 175;357 | 5.18 |
| 136;256 | 3.07 | 138;196 | 1.79 | 296;327 | 5.38 | 92;176 | 2.96 | 261;348 | 1.83 | 73;299 | 5.18 |
| 165;256 | 3.07 | 138;195 | 1.79 | 327;356 | 5.38 | 100;346 | 2.96 | 62;261 | 1.83 | 175;361 | 5.18 |
| 51;256 | 3.07 | 94;150 | 1.79 | 242;327 | 5.38 | 103;218 | 2.96 | 215;261 | 1.83 | 175;364 | 5.18 |
| 14;256 | 3.07 | 73;95 | 1.79 | 182;327 | 5.38 | 54;215 | 2.96 | 202;261 | 1.83 | 207;280 | 5.18 |
| 160;293 | 3.07 | 270;365 | 1.79 | 327;354 | 5.38 | 33;253 | 2.96 | 15;261 | 1.83 | 195;282 | 5.18 |
| 16;293 | 3.07 | 138;187 | 1.79 | 160;327 | 5.38 | 29;179 | 2.96 | 261;350 | 1.83 | 74;281 | 5.18 |
| 131;256 | 3.07 | 79;80 | 1.79 | 198;327 | 5.38 | 34;324 | 2.96 | 249;261 | 1.83 | 330;345 | 5.18 |
| 131;293 | 3.07 | 138;184 | 1.79 | 103;327 | 5.38 | 103;197 | 2.96 | 214;354 | 1.83 | 282;363 | 5.18 |
| 97;256 | 3.07 | 138;143 | 1.79 | 320;321 | 5.38 | 29;174 | 2.96 | 162;261 | 1.83 | 282;361 | 5.18 |
| 127;308 | 3.07 | 138;182 | 1.79 | 275;327 | 5.38 | 29;173 | 2.96 | 261;335 | 1.83 | 208;282 | 5.18 |
| 195;206 | 3.07 | 138;179 | 1.79 | 228;327 | 5.38 | 29;172 | 2.96 | 261;336 | 1.83 | 331;338 | 5.18 |
| 58;308 | 3.07 | 138;177 | 1.79 | 6;327 | 5.38 | 29;171 | 2.96 | 261;337 | 1.83 | 204;300 | 5.18 |
| 217;292 | 3.07 | 73;80 | 1.79 | 163;327 | 5.38 | 29;170 | 2.96 | 129;261 | 1.83 | 85;356 | 5.18 |
| 195;215 | 3.07 | 78;335 | 1.79 | 7;327 | 5.38 | 1;246 | 2.96 | 240;261 | 1.83 | 283;336 | 5.18 |
| 72;249 | 3.07 | 138;166 | 1.79 | 229;327 | 5.38 | 239;342 | 2.96 | 203;261 | 1.83 | 175;281 | 5.18 |
| 151;247 | 3.07 | 138;204 | 1.79 | 225;327 | 5.38 | 34;360 | 2.96 | 261;339 | 1.83 | 197;281 | 5.18 |
| 58;227 | 3.07 | 138;206 | 1.79 | 143;327 | 5.38 | 46;243 | 2.96 | 261;340 | 1.83 | 283;347 | 5.18 |
| 182;293 | 3.07 | 23;138 | 1.79 | 157;327 | 5.38 | 54;171 | 2.96 | 261;341 | 1.83 | 206;282 | 5.18 |
| 177;195 | 3.07 | 64;314 | 1.79 | 211;327 | 5.38 | 46;239 | 2.96 | 49;261 | 1.83 | 175;242 | 5.18 |
| 59;209 | 3.07 | 97;112 | 1.79 | 226;327 | 5.38 | 54;214 | 2.96 | 261;351 | 1.83 | 16;282 | 5.18 |
| 35;58 | 3.07 | 214;314 | 1.79 | 18;327 | 5.38 | 38;128 | 2.96 | 50;161 | 1.83 | 206;299 | 5.18 |
| 204;256 | 3.07 | 58;138 | 1.79 | 152;327 | 5.38 | 32;241 | 2.96 | 261;364 | 1.83 | 208;300 | 5.18 |
| 151;293 | 3.07 | 138;219 | 1.79 | 127;327 | 5.38 | 92;136 | 2.96 | 171;261 | 1.83 | 166;299 | 5.18 |

| | | | | | | | | | | Corneal and | |
|---|---|---|---|---|---|---|---|---|---|---|---|
| | | CSH1_CSH2 positive | | | | | | | | conjunctival epithelial | |
| CLC_IL5RA positive cells | | cells | | Cardiomyocytes | | Chromaffin cells | | Ciliated epithelial cells | | cells | |
| Clusters | Score | Clusters | Score | Clusters | Score | Clusters | Score | Clusters | Score | Clusters | Score |
| 175;331 | 12.73 | 151;273 | 9.92 | 175;331 | 13.76 | 254;316 | 5.19 | 259;343 | 25.41 | 80;357 | 6.03 |
| 280;331 | 9.95 | 10;273 | 9.92 | 210;280 | 12.22 | 254;315 | 5.19 | 154;259 | 25.41 | 273;334 | 6.03 |
| 162;280 | 9.95 | 67;273 | 9.92 | 150;280 | 12.22 | 62;254 | 3.93 | 162;259 | 25.41 | 170;273 | 6.03 |
| 150;280 | 9.95 | 200;273 | 9.92 | 162;280 | 12.22 | 79;254 | 3.93 | 91;259 | 25.41 | 156;273 | 6.03 |
| 280;363 | 9.95 | 60;273 | 9.92 | 280;363 | 12.22 | 213;254 | 3.93 | 252;259 | 23.38 | 150;273 | 6.03 |
| 211;280 | 9.95 | 182;273 | 8.53 | 211;280 | 12.22 | 197;254 | 3.93 | 89;259 | 23.38 | 80;156 | 6.03 |
| 210;280 | 9.95 | 273;316 | 8.53 | 171;280 | 10.75 | 86;254 | 3.93 | 259;342 | 23.38 | 164;273 | 6.03 |
| 298;331 | 9.95 | 146;273 | 8.53 | 197;280 | 10.75 | 201;254 | 3.93 | 155;259 | 23.38 | 80;334 | 6.03 |
| 280;321 | 9.95 | 154;273 | 8.53 | 280;338 | 10.75 | 61;254 | 3.93 | 163;259 | 23.38 | 11;273 | 6.03 |
| 180;280 | 8.66 | 68;273 | 8.53 | 172;280 | 10.75 | 223;254 | 3.93 | 259;265 | 23.38 | 80;203 | 4.75 |
| 206;280 | 8.66 | 128;273 | 8.53 | 195;280 | 10.75 | 254;351 | 3.93 | 157;259 | 23.38 | 173;273 | 4.75 |
| 202;331 | 8.66 | 152;273 | 8.53 | 146;280 | 10.75 | 129;254 | 3.93 | 153;259 | 23.38 | 80;200 | 4.75 |
| 146;280 | 8.66 | 18;273 | 8.53 | 159;280 | 10.75 | 64;254 | 3.93 | 138;259 | 23.38 | 80;193 | 4.75 |
| 280;309 | 8.66 | 246;273 | 8.53 | 103;280 | 10.75 | 237;254 | 3.93 | 259;268 | 23.38 | 80;194 | 4.75 |
| 176;280 | 8.66 | 273;338 | 8.53 | 182;280 | 10.75 | 254;270 | 3.93 | 106;259 | 23.38 | 105;273 | 4.75 |
| 159;281 | 8.66 | 273;353 | 8.53 | 185;280 | 10.75 | 32;254 | 3.93 | 118;259 | 23.38 | 175;283 | 4.75 |
| 85;280 | 8.66 | 15;273 | 8.53 | 178;280 | 10.75 | 128;254 | 3.93 | 221;259 | 23.38 | 80;238 | 4.75 |
| 185;280 | 8.66 | 13;273 | 8.53 | 102;280 | 10.75 | 210;254 | 3.93 | 209;259 | 23.38 | 283;361 | 4.75 |
| 152;280 | 8.66 | 93;273 | 8.53 | 205;280 | 10.75 | 173;254 | 3.93 | 186;259 | 23.38 | 178;273 | 4.75 |
| 280;310 | 8.66 | 157;273 | 8.53 | 280;320 | 10.75 | 238;254 | 3.93 | 259;352 | 23.38 | 80;224 | 4.75 |
| 12;280 | 8.66 | 171;273 | 8.53 | 280;355 | 10.75 | 217;254 | 3.93 | 259;260 | 23.38 | 80;178 | 4.75 |
| 182;280 | 8.66 | 76;273 | 8.53 | 147;280 | 10.75 | 45;254 | 3.93 | 131;259 | 23.38 | 80;154 | 4.75 |
| 217;280 | 8.66 | 168;273 | 8.53 | 298;331 | 10.75 | 2;254 | 3.93 | 132;259 | 23.38 | 172;283 | 4.75 |
| 159;280 | 8.66 | 214;273 | 8.53 | 280;364 | 10.75 | 254;362 | 3.93 | 34;259 | 23.38 | 194;273 | 4.75 |
| 171;280 | 8.66 | 231;273 | 8.53 | 62;280 | 10.75 | 178;254 | 3.93 | 187;259 | 23.38 | 249;273 | 4.75 |
| 89;280 | 8.66 | 160;273 | 8.53 | 280;331 | 10.75 | 253;316 | 3.93 | 256;259 | 23.38 | 193;272 | 4.75 |
| 149;280 | 8.66 | 156;273 | 8.53 | 161;280 | 10.75 | 85;254 | 3.93 | 52;259 | 23.38 | 193;273 | 4.75 |
| 103;280 | 8.66 | 81;273 | 8.53 | 280;296 | 10.75 | 253;315 | 3.93 | 108;259 | 23.38 | 113;283 | 4.75 |
| 167;331 | 8.66 | 11;273 | 8.53 | 159;281 | 10.75 | 88;254 | 3.93 | 139;259 | 23.38 | 197;273 | 4.75 |
| 175;280 | 8.66 | 130;273 | 8.53 | 280;310 | 10.75 | 171;254 | 3.93 | 137;259 | 23.38 | 167;283 | 4.75 |
| 72;280 | 8.66 | 273;360 | 8.53 | 180;280 | 10.75 | 174;254 | 3.93 | 259;341 | 21.45 | 172;273 | 4.75 |
| 205;280 | 8.66 | 229;273 | 8.53 | 280;352 | 10.75 | 183;254 | 3.93 | 143;259 | 21.45 | 171;283 | 4.75 |
| 280;296 | 8.66 | 105;273 | 8.53 | 152;280 | 10.75 | 182;254 | 3.93 | 259;339 | 21.45 | 171;273 | 4.75 |
| 62;280 | 8.66 | 43;273 | 8.53 | 149;280 | 10.75 | 206;254 | 3.93 | 70;259 | 21.45 | 80;164 | 4.75 |
| 280;291 | 8.66 | 60;274 | 8.53 | 175;280 | 9.37 | 254;363 | 3.93 | 189;259 | 21.45 | 170;283 | 4.75 |
| 161;280 | 8.66 | 212;273 | 8.53 | 152;281 | 9.37 | 68;254 | 3.93 | 227;259 | 21.45 | 80;150 | 4.75 |
| 195;280 | 8.66 | 211;273 | 8.53 | 68;280 | 9.37 | 15;254 | 3.93 | 234;259 | 21.45 | 170;272 | 4.75 |
| 173;280 | 8.66 | 148;273 | 8.53 | 280;298 | 9.37 | 169;254 | 3.93 | 148;259 | 21.45 | 80;113 | 4.75 |
| 135;280 | 8.66 | 167;273 | 8.53 | 72;280 | 9.37 | 177;254 | 3.93 | 3;259 | 21.45 | 169;273 | 4.75 |
| 183;280 | 8.66 | 189;273 | 8.53 | 135;280 | 9.37 | 92;254 | 3.93 | 156;259 | 21.45 | 80;96 | 4.75 |
| 280;364 | 8.66 | 249;273 | 8.53 | 108;280 | 9.37 | 214;254 | 3.93 | 259;262 | 21.45 | 273;294 | 4.75 |
| 214;280 | 8.66 | 147;273 | 8.53 | 203;281 | 9.37 | 205;254 | 3.93 | 104;259 | 21.45 | 273;298 | 4.75 |
| 153;280 | 8.66 | 207;273 | 8.53 | 265;280 | 9.37 | 13;254 | 3.93 | 188;259 | 21.45 | 93;185 | 4.75 |
| 177;280 | 8.66 | 203;273 | 8.53 | 281;298 | 9.37 | 152;254 | 3.93 | 80;259 | 21.45 | 93;164 | 4.75 |
| 153;281 | 8.66 | 273;355 | 8.53 | 280;282 | 9.37 | 254;269 | 3.93 | 245;259 | 21.45 | 93;156 | 4.75 |
| 147;280 | 8.66 | 175;273 | 8.53 | 196;280 | 9.37 | 215;254 | 3.93 | 83;259 | 21.45 | 273;338 | 4.75 |
| 178;280 | 8.66 | 61;273 | 8.53 | 215;280 | 9.37 | 71;254 | 3.93 | 259;338 | 21.45 | 273;348 | 4.75 |
| 265;280 | 8.66 | 169;273 | 8.53 | 280;300 | 9.37 | 195;254 | 3.93 | 84;259 | 21.45 | 263;273 | 4.75 |
| 11;280 | 8.66 | 60;207 | 7.22 | 174;280 | 9.37 | 196;254 | 3.93 | 77;259 | 21.45 | 273;351 | 4.75 |
| 129;280 | 8.66 | 4;273 | 7.22 | 154;280 | 9.37 | 254;291 | 3.93 | 242;259 | 21.45 | 271;334 | 4.75 |
| 280;355 | 8.66 | 56;273 | 7.22 | 254;280 | 9.37 | 254;320 | 3.93 | 259;307 | 21.45 | 271;284 | 4.75 |
| 172;280 | 8.66 | 273;351 | 7.22 | 280;325 | 9.37 | 254;295 | 3.93 | 259;306 | 21.45 | 270;273 | 4.75 |
| 280;352 | 8.66 | 129;273 | 7.22 | 214;280 | 9.37 | 166;254 | 3.93 | 142;259 | 21.45 | 93;361 | 4.75 |
| 197;280 | 8.66 | 20;273 | 7.22 | 206;280 | 9.37 | 203;254 | 3.93 | 150;259 | 21.45 | 93;355 | 4.75 |
| 213;280 | 8.66 | 273;350 | 7.22 | 175;296 | 9.37 | 146;254 | 3.93 | 38;259 | 21.45 | 93;334 | 4.75 |
| 186;280 | 8.66 | 205;273 | 7.22 | 153;281 | 9.37 | 168;254 | 3.93 | 66;259 | 21.45 | 93;284 | 4.75 |
| 280;338 | 8.66 | 238;273 | 7.22 | 153;280 | 9.37 | 172;254 | 3.93 | 258;259 | 21.45 | 93;270 | 4.75 |
| 157;280 | 8.66 | 103;273 | 7.22 | 173;280 | 9.37 | 186;254 | 3.93 | 31;259 | 21.45 | 89;283 | 4.75 |
| 179;280 | 8.66 | 273;354 | 7.22 | 18;280 | 9.37 | 193;254 | 3.93 | 171;259 | 21.45 | 35;273 | 4.75 |
| 280;325 | 8.66 | 197;273 | 7.22 | 129;280 | 9.37 | 216;254 | 3.93 | 116;259 | 21.45 | 35;283 | 4.75 |
| 175;296 | 8.66 | 165;273 | 7.22 | 280;321 | 9.37 | 147;254 | 3.93 | 259;305 | 21.45 | 283;308 | 4.75 |
| 280;361 | 8.66 | 9;273 | 7.22 | 280;291 | 9.37 | 254;325 | 3.93 | 82;259 | 21.45 | 283;321 | 4.75 |
| 196;280 | 8.66 | 208;273 | 7.22 | 12;280 | 9.37 | 12;254 | 3.93 | 159;259 | 21.45 | 80;360 | 4.75 |
| 102;280 | 8.66 | 163;273 | 7.22 | 2;280 | 9.37 | 207;254 | 3.93 | 166;259 | 21.45 | 80;355 | 4.75 |
| 215;280 | 8.66 | 273;310 | 7.22 | 156;280 | 9.37 | 202;254 | 3.93 | 128;259 | 21.45 | 283;331 | 4.75 |
| 280;319 | 8.66 | 166;273 | 7.22 | 11;280 | 9.37 | 192;254 | 3.93 | 165;259 | 21.45 | 283;338 | 4.75 |
| 280;320 | 8.66 | 1;273 | 7.22 | 9;280 | 9.37 | 185;254 | 3.93 | 93;259 | 21.45 | 73;273 | 4.75 |
| 154;280 | 8.66 | 213;273 | 7.22 | 280;309 | 9.37 | 236;254 | 3.93 | 110;259 | 21.45 | 283;355 | 4.75 |
| 94;280 | 8.66 | 215;273 | 7.22 | 183;280 | 9.37 | 208;254 | 3.93 | 119;259 | 21.45 | 98;273 | 4.75 |
| 280;359 | 8.66 | 145;273 | 7.22 | 176;280 | 9.37 | 254;309 | 3.93 | 129;259 | 21.45 | 35;272 | 4.75 |
| 2;280 | 7.43 | 273;318 | 7.22 | 179;280 | 9.37 | 253;271 | 2.81 | 144;259 | 21.45 | 83;273 | 4.75 |
| 281;319 | 7.43 | 273;320 | 7.22 | 94;280 | 9.37 | 214;253 | 2.81 | 185;259 | 21.45 | 185;273 | 4.75 |
| 175;219 | 7.43 | 198;273 | 7.22 | 192;280 | 9.37 | 150;254 | 2.81 | 164;259 | 21.45 | 273;361 | 4.75 |
| 280;282 | 7.43 | 273;321 | 7.22 | 208;280 | 9.37 | 135;254 | 2.81 | 259;348 | 21.45 | 273;363 | 4.75 |
| 166;280 | 7.43 | 41;273 | 7.22 | 166;280 | 9.37 | 241;254 | 2.81 | 90;259 | 21.45 | 24;283 | 4.75 |
| 103;331 | 7.43 | 242;273 | 7.22 | 177;280 | 9.37 | 153;237 | 2.81 | 259;336 | 21.45 | 188;283 | 4.75 |
| 149;281 | 7.43 | 273;322 | 7.22 | 85;280 | 9.37 | 74;254 | 2.81 | 24;259 | 21.45 | 85;283 | 4.75 |
| 128;280 | 7.43 | 177;273 | 7.22 | 217;280 | 9.37 | 117;254 | 2.81 | 241;259 | 21.45 | 97;273 | 4.75 |
| 74;280 | 7.43 | 155;273 | 7.22 | 86;280 | 9.37 | 1;254 | 2.81 | 107;259 | 21.45 | 23;273 | 4.75 |
| 156;280 | 7.43 | 121;273 | 7.22 | 157;280 | 9.37 | 202;253 | 2.81 | 259;362 | 21.45 | 35;93 | 4.75 |
| 64;280 | 7.43 | 273;323 | 7.22 | 207;280 | 9.37 | 182;253 | 2.81 | 211;259 | 21.45 | 11;80 | 4.75 |
| 18;280 | 7.43 | 202;273 | 7.22 | 151;281 | 9.37 | 247;252 | 2.81 | 259;365 | 21.45 | 46;273 | 4.75 |
| 55;282 | 7.43 | 30;273 | 7.22 | 169;280 | 9.37 | 253;308 | 2.81 | 173;259 | 21.45 | 46;271 | 4.75 |
| 153;330 | 7.43 | 79;273 | 7.22 | 202;331 | 9.37 | 65;254 | 2.81 | 56;259 | 21.45 | 57;273 | 4.75 |
| 55;281 | 7.43 | 95;273 | 7.22 | 222;280 | 9.37 | 26;254 | 2.81 | 200;259 | 21.45 | 63;273 | 4.75 |
| 4;280 | 7.43 | 139;273 | 7.22 | 155;280 | 9.37 | 26;253 | 2.81 | 127;259 | 21.45 | 46;80 | 4.75 |
| 207;280 | 7.43 | 186;273 | 7.22 | 280;362 | 9.37 | 103;253 | 2.81 | 167;259 | 21.45 | 155;272 | 4.75 |
| 280;362 | 7.43 | 153;273 | 7.22 | 97;280 | 9.37 | 103;254 | 2.81 | 212;259 | 21.45 | 135;273 | 4.75 |
| 186;281 | 7.43 | 196;273 | 7.22 | 216;280 | 9.37 | 88;253 | 2.81 | 202;259 | 21.45 | 119;283 | 4.75 |
| 175;330 | 7.43 | 138;273 | 7.22 | 213;280 | 9.37 | 54;248 | 2.81 | 210;259 | 21.45 | 155;273 | 4.75 |
| 155;280 | 7.43 | 273;346 | 7.22 | 167;331 | 9.37 | 72;254 | 2.81 | 259;318 | 21.45 | 215;273 | 4.75 |
| 175;323 | 7.43 | 2;273 | 7.22 | 280;361 | 9.37 | 67;253 | 2.81 | 259;316 | 21.45 | 214;273 | 4.75 |
| 280;330 | 7.43 | 42;273 | 7.22 | 186;280 | 9.37 | 67;252 | 2.81 | 174;259 | 21.45 | 156;272 | 4.75 |
| 169;280 | 7.43 | 60;358 | 7.22 | 280;359 | 9.37 | 154;254 | 2.81 | 259;291 | 21.45 | 150;283 | 4.75 |
| 68;280 | 7.43 | 273;340 | 7.22 | 149;281 | 9.37 | 117;253 | 2.81 | 113;226 | 21.45 | 208;283 | 4.75 |
| 153;282 | 7.43 | 170;273 | 7.22 | 151;280 | 9.37 | 15;253 | 2.81 | 259;315 | 21.45 | 156;283 | 4.75 |
| 175;355 | 7.43 | 135;273 | 7.22 | 89;280 | 9.37 | 225;297 | 2.81 | 244;259 | 21.45 | 154;283 | 4.75 |
| 178;331 | 7.43 | 94;273 | 7.22 | 18;281 | 8.05 | 191;254 | 2.81 | 259;285 | 21.45 | 66;273 | 4.75 |
| 240;280 | 7.43 | 225;273 | 7.22 | 280;343 | 8.05 | 89;253 | 2.81 | 120;259 | 21.45 | 207;273 | 4.75 |
| 217;331 | 7.43 | 273;339 | 7.22 | 128;280 | 8.05 | 185;253 | 2.81 | 259;286 | 21.45 | 206;283 | 4.75 |

| ELF3_AGBL2 positive | | | | | | | | | | | |
|---|---|---|---|---|---|---|---|---|---|---|---|
| cells | | ENS glia | | ENS neurons | | Endocardial cells | | Epicardial fat cells | | Erythroblasts | |
| Clusters | Score | Clusters | Score | Clusters | Score | Clusters | Score | Clusters | Score | Clusters | Score |
| 175;331 | 13.76 | 153;336 | 4.23 | 251;303 | 4.86 | 305;315 | 10.54 | 55;282 | 4.60 | 158;165 | 3.31 |
| 210;280 | 12.22 | 155;337 | 3.19 | 251;287 | 3.81 | 16;304 | 9.27 | 280;340 | 3.30 | 106;161 | 3.31 |
| 150;280 | 12.22 | 193;362 | 3.19 | 210;254 | 3.81 | 165;305 | 9.27 | 33;282 | 3.30 | 19;69 | 3.31 |
| 162;280 | 12.22 | 107;242 | 3.19 | 251;293 | 3.81 | 175;304 | 9.27 | 149;303 | 3.30 | 155;158 | 3.31 |
| 280;363 | 12.22 | 65;198 | 3.19 | 155;251 | 3.81 | 230;305 | 9.27 | 133;280 | 3.30 | 131;158 | 3.31 |
| 211;280 | 12.22 | 65;202 | 3.19 | 101;251 | 3.81 | 305;330 | 9.27 | 118;299 | 3.30 | 19;210 | 3.31 |
| 171;280 | 10.75 | 65;227 | 3.19 | 251;260 | 3.81 | 299;304 | 9.27 | 55;356 | 3.30 | 158;364 | 2.34 |
| 197;280 | 10.75 | 107;357 | 3.19 | 167;178 | 3.81 | 305;331 | 9.27 | 280;339 | 3.30 | 158;362 | 2.34 |
| 280;338 | 10.75 | 190;336 | 3.19 | 150;251 | 3.81 | 304;363 | 8.05 | 55;280 | 3.30 | 158;223 | 2.34 |
| 172;280 | 10.75 | 190;337 | 3.19 | 220;252 | 3.81 | 245;304 | 8.05 | 21;198 | 2.16 | 158;222 | 2.34 |
| 195;280 | 10.75 | 65;334 | 3.19 | 220;251 | 3.81 | 72;305 | 8.05 | 95;149 | 2.16 | 107;156 | 2.34 |
| 146;280 | 10.75 | 65;335 | 3.19 | 9;250 | 3.81 | 8;304 | 8.05 | 329;342 | 2.16 | 61;169 | 2.34 |
| 159;280 | 10.75 | 193;363 | 3.19 | 119;251 | 3.81 | 304;346 | 8.05 | 329;341 | 2.16 | 84;323 | 2.34 |
| 103;280 | 10.75 | 212;336 | 3.19 | 251;313 | 3.81 | 171;305 | 8.05 | 95;329 | 2.16 | 158;325 | 2.34 |
| 182;280 | 10.75 | 250;321 | 2.25 | 160;251 | 3.81 | 304;333 | 8.05 | 95;296 | 2.16 | 157;165 | 2.34 |
| 185;280 | 10.75 | 65;262 | 2.25 | 193;254 | 3.81 | 304;361 | 8.05 | 95;285 | 2.16 | 158;178 | 2.34 |
| 178;280 | 10.75 | 222;362 | 2.25 | 201;251 | 3.81 | 203;304 | 8.05 | 282;361 | 2.16 | 71;158 | 2.34 |
| 102;280 | 10.75 | 53;337 | 2.25 | 251;364 | 3.81 | 185;304 | 8.05 | 21;280 | 2.16 | 158;365 | 2.34 |
| 205;280 | 10.75 | 316;342 | 2.25 | 63;251 | 3.81 | 286;305 | 8.05 | 21;356 | 2.16 | 158;323 | 2.34 |
| 280;320 | 10.75 | 195;338 | 2.25 | 251;295 | 3.81 | 180;304 | 8.05 | 131;280 | 2.16 | 169;205 | 2.34 |
| 280;355 | 10.75 | 223;250 | 2.25 | 251;343 | 2.85 | 298;304 | 8.05 | 171;280 | 2.16 | 169;218 | 2.34 |
| 147;280 | 10.75 | 65;284 | 2.25 | 204;251 | 2.85 | 188;304 | 8.05 | 170;280 | 2.16 | 106;158 | 2.34 |
| 298;331 | 10.75 | 65;280 | 2.25 | 251;346 | 2.85 | 304;322 | 8.05 | 146;280 | 2.16 | 326;328 | 2.34 |
| 280;364 | 10.75 | 172;348 | 2.25 | 251;340 | 2.85 | 190;304 | 8.05 | 74;280 | 2.16 | 229;326 | 2.34 |
| 62;280 | 10.75 | 223;336 | 2.25 | 251;348 | 2.85 | 302;304 | 8.05 | 286;324 | 2.16 | 106;155 | 2.34 |
| 280;331 | 10.75 | 146;250 | 2.25 | 251;354 | 2.85 | 304;305 | 8.05 | 286;299 | 2.16 | 130;330 | 2.34 |
| 161;280 | 10.75 | 107;350 | 2.25 | 94;253 | 2.85 | 196;305 | 8.05 | 129;280 | 2.16 | 158;184 | 2.34 |
| 280;296 | 10.75 | 89;193 | 2.25 | 94;251 | 2.85 | 305;322 | 8.05 | 129;282 | 2.16 | 169;206 | 2.34 |
| 159;281 | 10.75 | 39;349 | 2.25 | 204;254 | 2.85 | 230;304 | 8.05 | 130;280 | 2.16 | 158;225 | 2.34 |
| 280;310 | 10.75 | 173;250 | 2.25 | 251;350 | 2.85 | 214;305 | 8.05 | 47;280 | 2.16 | 146;324 | 2.34 |
| 180;280 | 10.75 | 107;338 | 2.25 | 251;322 | 2.85 | 148;304 | 8.05 | 96;280 | 2.16 | 18;158 | 2.34 |
| 280;352 | 10.75 | 65;252 | 2.25 | 97;251 | 2.85 | 165;304 | 8.05 | 285;303 | 2.16 | 167;206 | 2.34 |
| 152;280 | 10.75 | 65;251 | 2.25 | 167;251 | 2.85 | 82;304 | 8.05 | 285;299 | 2.16 | 46;158 | 2.34 |
| 149;280 | 10.75 | 65;250 | 2.25 | 95;193 | 2.85 | 224;304 | 8.05 | 190;280 | 2.16 | 69;240 | 2.34 |
| 175;280 | 9.37 | 173;338 | 2.25 | 251;336 | 2.85 | 227;305 | 8.05 | 132;280 | 2.16 | 158;309 | 2.34 |
| 152;281 | 9.37 | 251;337 | 2.25 | 251;335 | 2.85 | 55;304 | 8.05 | 186;280 | 2.16 | 158;294 | 2.34 |
| 68;280 | 9.37 | 65;292 | 2.25 | 251;334 | 2.85 | 237;304 | 8.05 | 134;285 | 2.16 | 158;163 | 2.34 |
| 280;298 | 9.37 | 146;336 | 2.25 | 251;330 | 2.85 | 305;336 | 8.05 | 175;286 | 2.16 | 158;162 | 2.34 |
| 72;280 | 9.37 | 222;336 | 2.25 | 251;356 | 2.85 | 7;304 | 6.90 | 134;280 | 2.16 | 70;158 | 2.34 |
| 135;280 | 9.37 | 65;298 | 2.25 | 166;262 | 2.85 | 277;304 | 6.90 | 175;280 | 2.16 | 101;158 | 2.34 |
| 108;280 | 9.37 | 161;360 | 2.25 | 211;251 | 2.85 | 143;305 | 6.90 | 91;280 | 2.16 | 84;128 | 2.34 |
| 203;281 | 9.37 | 65;343 | 2.25 | 218;251 | 2.85 | 118;304 | 6.90 | 187;280 | 2.16 | 158;214 | 2.34 |
| 265;280 | 9.37 | 163;239 | 2.25 | 166;207 | 2.85 | 155;305 | 6.90 | 31;209 | 2.16 | 153;333 | 2.34 |
| 281;298 | 9.37 | 65;342 | 2.25 | 166;210 | 2.85 | 76;304 | 6.90 | 277;282 | 2.16 | 158;219 | 2.34 |
| 280;282 | 9.37 | 222;250 | 2.25 | 227;251 | 2.85 | 152;304 | 6.90 | 90;282 | 2.16 | 69;132 | 2.34 |
| 196;280 | 9.37 | 171;337 | 2.25 | 216;251 | 2.85 | 1;304 | 6.90 | 90;280 | 2.16 | 27;158 | 2.34 |
| 215;280 | 9.37 | 65;338 | 2.25 | 64;167 | 2.85 | 131;305 | 6.90 | 185;282 | 2.16 | 173;240 | 2.34 |
| 280;300 | 9.37 | 201;250 | 2.25 | 214;251 | 2.85 | 275;305 | 6.90 | 185;280 | 2.16 | 158;336 | 2.34 |
| 174;280 | 9.37 | 65;337 | 2.25 | 210;251 | 2.85 | 130;304 | 6.90 | 49;280 | 2.16 | 158;164 | 2.34 |
| 154;280 | 9.37 | 65;336 | 2.25 | 89;251 | 2.85 | 137;304 | 6.90 | 49;282 | 2.16 | 158;171 | 2.34 |
| 254;280 | 9.37 | 195;336 | 2.25 | 154;251 | 2.85 | 61;304 | 6.90 | 25;280 | 2.16 | 106;169 | 2.34 |
| 280;325 | 9.37 | 171;348 | 2.25 | 60;251 | 2.85 | 58;304 | 6.90 | 342;352 | 2.16 | 158;174 | 2.34 |
| 214;280 | 9.37 | 52;337 | 2.25 | 251;363 | 2.85 | 24;304 | 6.90 | 89;280 | 2.16 | 87;158 | 2.34 |
| 206;280 | 9.37 | 171;360 | 2.25 | 251;362 | 2.85 | 305;356 | 6.90 | 176;280 | 2.16 | 139;321 | 2.34 |
| 153;281 | 9.37 | 166;250 | 2.25 | 251;360 | 2.85 | 305;334 | 6.90 | 92;280 | 2.16 | 158;298 | 2.34 |
| 153;280 | 9.37 | 199;362 | 2.25 | 251;359 | 2.85 | 305;320 | 6.90 | 280;324 | 2.16 | 158;350 | 2.34 |
| 173;280 | 9.37 | 149;250 | 2.25 | 230;251 | 2.85 | 72;304 | 6.90 | 98;342 | 2.16 | 20;158 | 2.34 |
| 18;280 | 9.37 | 294;316 | 2.25 | 207;251 | 2.85 | 305;316 | 6.90 | 94;296 | 2.16 | 139;330 | 2.34 |
| 129;280 | 9.37 | 82;250 | 2.25 | 207;254 | 2.85 | 305;359 | 6.90 | 94;285 | 2.16 | 146;165 | 2.34 |
| 280;321 | 9.37 | 158;165 | 2.25 | 156;246 | 2.85 | 85;304 | 6.90 | 94;280 | 2.16 | 139;333 | 2.34 |
| 280;291 | 9.37 | 294;336 | 2.25 | 209;251 | 2.85 | 92;304 | 6.90 | 280;363 | 2.16 | 67;158 | 2.34 |
| 12;280 | 9.37 | 294;337 | 2.25 | 167;195 | 2.85 | 94;304 | 6.90 | 280;361 | 2.16 | 158;203 | 2.34 |
| 2;280 | 9.37 | 65;229 | 2.25 | 208;254 | 2.85 | 304;364 | 6.90 | 280;348 | 2.16 | 152;164 | 2.34 |
| 156;280 | 9.37 | 146;193 | 2.25 | 208;251 | 2.85 | 291;304 | 6.90 | 189;280 | 2.16 | 165;167 | 2.34 |
| 11;280 | 9.37 | 169;203 | 2.25 | 88;251 | 2.85 | 300;305 | 6.90 | 280;342 | 2.16 | 19;171 | 2.34 |
| 9;280 | 9.37 | 65;192 | 2.25 | 88;254 | 2.85 | 102;304 | 6.90 | 280;341 | 2.16 | 86;158 | 2.34 |
| 280;309 | 9.37 | 250;316 | 2.25 | 143;251 | 2.85 | 104;304 | 6.90 | 280;338 | 2.16 | 240;324 | 2.34 |
| 183;280 | 9.37 | 250;343 | 2.25 | 186;254 | 2.85 | 35;304 | 6.90 | 280;336 | 2.16 | 164;193 | 2.34 |
| 176;280 | 9.37 | 14;250 | 2.25 | 186;251 | 2.85 | 294;305 | 6.90 | 280;335 | 2.16 | 169;240 | 2.34 |
| 179;280 | 9.37 | 107;193 | 2.25 | 139;251 | 2.85 | 294;304 | 6.90 | 280;323 | 2.16 | 158;240 | 2.34 |
| 94;280 | 9.37 | 250;341 | 2.25 | 171;251 | 2.85 | 108;304 | 6.90 | 280;320 | 2.16 | 86;164 | 2.34 |
| 192;280 | 9.37 | 309;338 | 2.25 | 184;220 | 2.85 | 304;362 | 6.90 | 280;304 | 2.16 | 157;294 | 2.34 |
| 208;280 | 9.37 | 89;155 | 2.25 | 243;251 | 2.85 | 98;304 | 6.90 | 280;298 | 2.16 | 164;181 | 2.34 |
| 166;280 | 9.37 | 250;340 | 2.25 | 169;251 | 2.85 | 304;360 | 6.90 | 257;296 | 2.16 | 161;190 | 2.34 |
| 177;280 | 9.37 | 165;350 | 2.25 | 169;351 | 2.85 | 304;359 | 6.90 | 93;280 | 2.16 | 68;158 | 2.34 |
| 85;280 | 9.37 | 309;342 | 2.25 | 144;251 | 2.85 | 304;356 | 6.90 | 23;233 | 2.16 | 158;193 | 2.34 |
| 217;280 | 9.37 | 250;338 | 2.25 | 170;251 | 2.85 | 304;352 | 6.90 | 188;280 | 2.16 | 164;190 | 2.34 |
| 86;280 | 9.37 | 250;337 | 2.25 | 113;251 | 2.85 | 304;351 | 6.90 | 173;280 | 2.16 | 158;229 | 2.34 |
| 157;280 | 9.37 | 250;336 | 2.25 | 183;254 | 2.85 | 304;341 | 6.90 | 143;280 | 2.16 | 158;204 | 2.34 |
| 207;280 | 9.37 | 250;335 | 2.25 | 183;251 | 2.85 | 304;339 | 6.90 | 155;280 | 2.16 | 158;195 | 2.34 |
| 151;281 | 9.37 | 250;334 | 2.25 | 9;251 | 2.85 | 304;331 | 6.90 | 209;280 | 2.16 | 158;247 | 2.34 |
| 169;280 | 9.37 | 250;331 | 2.25 | 173;254 | 2.85 | 304;330 | 6.90 | 149;306 | 2.16 | 158;194 | 2.34 |
| 202;331 | 9.37 | 250;330 | 2.25 | 177;251 | 2.85 | 304;324 | 6.90 | 149;290 | 2.16 | 19;169 | 2.34 |
| 222;280 | 9.37 | 250;325 | 2.25 | 130;251 | 2.85 | 304;316 | 6.90 | 149;280 | 2.16 | 106;321 | 2.34 |
| 155;280 | 9.37 | 250;320 | 2.25 | 173;251 | 2.85 | 304;315 | 6.90 | 208;280 | 2.16 | 158;322 | 2.34 |
| 280;362 | 9.37 | 196;250 | 2.25 | 32;251 | 2.85 | 107;304 | 6.90 | 11;352 | 2.16 | 158;254 | 2.34 |
| 97;280 | 9.37 | 89;192 | 2.25 | 127;251 | 2.85 | 213;304 | 6.90 | 207;280 | 2.16 | 158;208 | 2.34 |
| 216;280 | 9.37 | 250;315 | 2.25 | 181;250 | 2.85 | 176;304 | 6.90 | 12;106 | 2.16 | 152;158 | 2.34 |
| 213;280 | 9.37 | 250;350 | 2.25 | 171;351 | 2.85 | 262;304 | 6.90 | 112;280 | 2.16 | 158;230 | 2.34 |
| 167;331 | 9.37 | 195;358 | 2.25 | 181;254 | 2.85 | 49;304 | 6.90 | 40;280 | 2.16 | 164;205 | 2.34 |
| 280;361 | 9.37 | 173;358 | 2.25 | 181;251 | 2.85 | 215;304 | 6.90 | 124;280 | 2.16 | 158;188 | 2.34 |
| 186;280 | 9.37 | 163;193 | 2.25 | 32;351 | 2.85 | 215;305 | 6.90 | 124;282 | 2.16 | 153;158 | 2.34 |
| 280;359 | 9.37 | 65;222 | 2.25 | 30;251 | 2.85 | 186;304 | 6.90 | 124;285 | 2.16 | 158;267 | 2.34 |
| 149;281 | 9.37 | 163;199 | 2.25 | 135;251 | 2.85 | 201;305 | 6.90 | 315;364 | 2.16 | 48;158 | 2.34 |
| 151;280 | 9.37 | 107;296 | 2.25 | 244;251 | 2.85 | 217;304 | 6.90 | 209;342 | 2.16 | 62;169 | 2.34 |
| 89;280 | 9.37 | 149;362 | 2.25 | 9;252 | 2.85 | 172;304 | 6.90 | 7;329 | 2.16 | 158;201 | 2.34 |
| 18;281 | 8.05 | 165;361 | 2.25 | 251;275 | 2.85 | 43;304 | 6.90 | 212;352 | 2.16 | 165;169 | 2.34 |
| 280;343 | 8.05 | 75;250 | 2.25 | 251;283 | 2.85 | 212;304 | 6.90 | 119;285 | 2.16 | 158;190 | 2.34 |
| 128;280 | 8.05 | 165;360 | 2.25 | 251;282 | 2.85 | 177;304 | 6.90 | 152;299 | 2.16 | 147;158 | 2.34 |
| 296;331 | 8.05 | 107;292 | 2.25 | 251;279 | 2.85 | 50;304 | 6.90 | 212;280 | 2.16 | 24;158 | 2.34 |

| | | Extravillous | | | | | | | | Hematopoietic stem | |
|---|---|---|---|---|---|---|---|---|---|---|---|
| Excitatory neurons | | trophoblasts | | Ganglion cells | | Goblet cells | | Granule neurons | | cells | |
| Clusters | Score | Clusters | Score | Clusters | Score | Clusters | Score | Clusters | Score | Clusters | Score |
| 66;257 | 3.30 | 245;274 | 4.35 | 79;312 | 3.57 | 60;87 | 3.45 | 74;355 | 4.75 | 41;169 | 7.41 |
| 31;69 | 3.30 | 68;274 | 3.12 | 142;312 | 3.57 | 60;83 | 3.45 | 66;324 | 3.60 | 162;191 | 6.03 |
| 213;226 | 3.30 | 89;274 | 3.12 | 312;326 | 3.57 | 60;161 | 3.45 | 73;192 | 3.60 | 53;162 | 6.03 |
| 85;226 | 3.30 | 214;274 | 3.12 | 36;312 | 2.66 | 322;353 | 3.45 | 68;266 | 3.60 | 169;191 | 6.03 |
| 146;266 | 3.30 | 213;274 | 3.12 | 32;311 | 2.66 | 13;60 | 3.45 | 66;291 | 3.60 | 173;220 | 6.03 |
| 226;330 | 3.30 | 201;241 | 3.12 | 61;312 | 2.66 | 43;322 | 3.45 | 73;152 | 3.60 | 31;325 | 6.03 |
| 182;183 | 3.30 | 206;274 | 3.12 | 113;313 | 2.66 | 43;316 | 3.45 | 73;153 | 3.60 | 158;199 | 6.03 |
| 217;226 | 3.30 | 201;242 | 3.12 | 98;312 | 2.66 | 60;266 | 3.45 | 73;174 | 3.60 | 41;210 | 6.03 |
| 212;226 | 3.30 | 234;274 | 3.12 | 22;313 | 2.66 | 60;181 | 2.45 | 73;178 | 3.60 | 72;194 | 6.03 |
| 30;296 | 3.30 | 129;283 | 3.12 | 69;293 | 2.66 | 60;89 | 2.45 | 11;74 | 3.60 | 53;163 | 6.03 |
| 184;226 | 3.30 | 238;360 | 3.12 | 72;312 | 2.66 | 115;251 | 2.45 | 74;209 | 3.60 | 41;173 | 6.03 |
| 30;292 | 3.30 | 172;274 | 3.12 | 250;313 | 2.66 | 60;182 | 2.45 | 73;240 | 3.60 | 31;169 | 6.03 |
| 226;291 | 3.30 | 201;202 | 3.12 | 101;312 | 2.66 | 200;248 | 2.45 | 65;255 | 3.60 | 41;171 | 6.03 |
| 59;243 | 3.30 | 82;282 | 3.12 | 164;256 | 2.66 | 60;91 | 2.45 | 73;239 | 3.60 | 41;170 | 6.03 |
| 66;243 | 3.30 | 201;238 | 3.12 | 239;314 | 2.66 | 60;183 | 2.45 | 30:68 | 3.60 | 41;167 | 6.03 |
| 95;242 | 3.30 | 204;274 | 2.04 | 30;267 | 2.66 | 83;300 | 2.45 | 66;258 | 3.60 | 41;162 | 6.03 |
| 180;226 | 3.30 | 32;272 | 2.04 | 103;312 | 2.66 | 60;318 | 2.45 | 73;210 | 3.60 | 31;161 | 6.03 |
| 66;197 | 3.30 | 93;336 | 2.04 | 35;312 | 2.66 | 60;320 | 2.45 | 30;73 | 3.60 | 31;69 | 6.03 |
| 129;226 | 3.30 | 32;189 | 2.04 | 253;293 | 2.66 | 61;302 | 2.45 | 111;134 | 2.56 | 116;199 | 6.03 |
| 226;233 | 3.30 | 139;356 | 2.04 | 179;294 | 2.66 | 60;322 | 2.45 | 74;336 | 2.56 | 53;191 | 4.75 |
| 65;243 | 3.30 | 245;282 | 2.04 | 131;311 | 2.66 | 60;323 | 2.45 | 74;359 | 2.56 | 43;161 | 4.75 |
| 59;226 | 3.30 | 32;274 | 2.04 | 179;256 | 2.66 | 60;225 | 2.45 | 68;144 | 2.56 | 43;162 | 4.75 |
| 71;226 | 3.30 | 94;282 | 2.04 | 220;236 | 2.66 | 48;322 | 2.45 | 74;363 | 2.56 | 31;210 | 4.75 |
| 226;281 | 3.30 | 175;214 | 2.04 | 251;313 | 2.66 | 153;322 | 2.45 | 50;87 | 2.56 | 158;239 | 4.75 |
| 226;290 | 3.30 | 18;282 | 2.04 | 94;312 | 2.66 | 60;131 | 2.45 | 68;136 | 2.56 | 191;325 | 4.75 |
| 226;353 | 3.30 | 89;283 | 2.04 | 95;312 | 2.66 | 60;363 | 2.45 | 74;360 | 2.56 | 53;199 | 4.75 |
| 182;213 | 3.30 | 79;201 | 2.04 | 121;313 | 2.66 | 60;138 | 2.45 | 50;71 | 2.56 | 31;198 | 4.75 |
| 19;243 | 3.30 | 245;357 | 2.04 | 77;312 | 2.66 | 78;113 | 2.45 | 50;69 | 2.56 | 43;348 | 4.75 |
| 66;355 | 3.30 | 89;238 | 2.04 | 183;312 | 2.66 | 87;250 | 2.45 | 20;30 | 2.56 | 41;325 | 4.75 |
| 91;217 | 3.30 | 89;242 | 2.04 | 58;293 | 2.66 | 60;179 | 2.45 | 68;121 | 2.56 | 41;324 | 4.75 |
| 175;226 | 3.30 | 89;252 | 2.04 | 83;313 | 2.66 | 135;251 | 2.45 | 74;347 | 2.56 | 117;239 | 4.75 |
| 96;226 | 3.30 | 279;338 | 2.04 | 73;312 | 2.66 | 215;322 | 2.45 | 68;103 | 2.56 | 158;193 | 4.75 |
| 96;243 | 3.30 | 94;201 | 2.04 | 122;308 | 2.66 | 60;231 | 2.45 | 68;100 | 2.56 | 158;194 | 4.75 |
| 69;243 | 3.30 | 89;272 | 2.04 | 122;312 | 2.66 | 60;82 | 2.45 | 20;69 | 2.56 | 158;198 | 4.75 |
| 226;359 | 3.30 | 93;363 | 2.04 | 30;312 | 2.66 | 214;322 | 2.45 | 115;336 | 2.56 | 158;202 | 4.75 |
| 226;360 | 3.30 | 89;229 | 2.04 | 30;313 | 2.66 | 167;322 | 2.45 | 146;310 | 2.56 | 116;356 | 4.75 |
| 176;226 | 3.30 | 89;237 | 2.04 | 30;314 | 2.66 | 183;212 | 2.45 | 20;194 | 2.56 | 41;198 | 4.75 |
| 19;309 | 3.30 | 139;330 | 2.04 | 9;256 | 2.66 | 19:60 | 2.45 | 66;77 | 2.56 | 41;199 | 4.75 |
| 66;354 | 3.30 | 245;296 | 2.04 | 118;312 | 2.66 | 60;315 | 2.45 | 74;237 | 2.56 | 31;162 | 4.75 |
| 167;247 | 2.16 | 139;282 | 2.04 | 180;312 | 2.66 | 60;86 | 2.45 | 66;83 | 2.56 | 117;199 | 4.75 |
| 170;290 | 2.16 | 274;336 | 2.04 | 214;217 | 2.66 | 152;322 | 2.45 | 146;196 | 2.56 | 53;68 | 4.75 |
| 12;65 | 2.16 | 238;338 | 2.04 | 313;321 | 2.66 | 67;322 | 2.45 | 111;253 | 2.56 | 43;193 | 4.75 |
| 128;243 | 2.16 | 274;324 | 2.04 | 313;327 | 2.66 | 80;83 | 2.45 | 65;336 | 2.56 | 220;325 | 4.75 |
| 167;226 | 2.16 | 274;320 | 2.04 | 127;312 | 2.66 | 60;222 | 2.45 | 42;68 | 2.56 | 31;53 | 4.75 |
| 290;307 | 2.16 | 142;254 | 2.04 | 184;312 | 2.66 | 60;211 | 2.45 | 111;150 | 2.56 | 43;202 | 4.75 |
| 210;226 | 2.16 | 238;330 | 2.04 | 209;351 | 2.66 | 60;115 | 2.45 | 111;164 | 2.56 | 43;216 | 4.75 |
| 222;226 | 2.16 | 274;363 | 2.04 | 56;293 | 2.66 | 87;148 | 2.45 | 111;166 | 2.56 | 41;69 | 4.75 |
| 129;182 | 2.16 | 274;360 | 2.04 | 241;312 | 2.66 | 87;138 | 2.45 | 111;167 | 2.56 | 158;297 | 4.75 |
| 12;243 | 2.16 | 274;356 | 2.04 | 77;209 | 2.66 | 60;354 | 2.45 | 111;169 | 2.56 | 43;169 | 4.75 |
| 169;226 | 2.16 | 238;320 | 2.04 | 112;312 | 2.66 | 60;198 | 2.45 | 111;171 | 2.56 | 41;194 | 4.75 |
| 222;290 | 2.16 | 64;282 | 2.04 | 30;211 | 2.66 | 20;80 | 2.45 | 69;347 | 2.56 | 41;193 | 4.75 |
| 170;247 | 2.16 | 274;348 | 2.04 | 26;244 | 2.66 | 60;200 | 2.45 | 69;355 | 2.56 | 53;169 | 4.75 |
| 170;226 | 2.16 | 92;358 | 2.04 | 137;312 | 2.66 | 60;108 | 2.45 | 255;262 | 2.56 | 31;173 | 4.75 |
| 125;244 | 2.16 | 272;360 | 2.04 | 254;315 | 2.66 | 60;353 | 2.45 | 69;363 | 2.56 | 31;170 | 4.75 |
| 72;226 | 2.16 | 215;274 | 2.04 | 307;312 | 2.66 | 60;210 | 2.45 | 69;319 | 2.56 | 53;161 | 4.75 |
| 290;354 | 2.16 | 215;272 | 2.04 | 85;312 | 2.66 | 60;357 | 2.45 | 173;355 | 2.56 | 116;194 | 4.75 |
| 290;360 | 2.16 | 186;282 | 2.04 | 187;312 | 2.66 | 60;202 | 2.45 | 97;111 | 2.56 | 53;158 | 4.75 |
| 168;226 | 2.16 | 92;296 | 2.04 | 306;312 | 2.66 | 60;358 | 2.45 | 18;73 | 2.56 | 41;161 | 4.75 |
| 290;355 | 2.16 | 272;356 | 2.04 | 254;293 | 2.66 | 43;193 | 2.45 | 68;238 | 2.56 | 116;297 | 4.75 |
| 210;290 | 2.16 | 92;274 | 2.04 | 63;312 | 2.66 | 60;208 | 2.45 | 229;255 | 2.56 | 129;193 | 4.75 |
| 70;226 | 2.16 | 272;330 | 2.04 | 212;313 | 1.86 | 43;197 | 2.45 | 64;237 | 2.56 | 198;325 | 4.75 |
| 218;356 | 2.16 | 238;363 | 2.04 | 267;293 | 1.86 | 148;251 | 2.45 | 50;220 | 2.56 | 53;348 | 4.75 |
| 70;91 | 2.16 | 274;292 | 2.04 | 120;312 | 1.86 | 60;351 | 2.45 | 50;214 | 2.56 | 53;356 | 4.75 |
| 164;226 | 2.16 | 238;356 | 2.04 | 167;306 | 1.86 | 60;77 | 2.45 | 50;212 | 2.56 | 116;296 | 4.75 |
| 69;361 | 2.16 | 35;282 | 2.04 | 17;313 | 1.86 | 60;340 | 2.45 | 50;194 | 2.56 | 129;194 | 4.75 |
| 218;290 | 2.16 | 93;146 | 2.04 | 112;293 | 1.86 | 60;185 | 2.45 | 50;179 | 2.56 | 42;198 | 4.75 |
| 69;311 | 2.16 | 93;213 | 2.04 | 187;293 | 1.86 | 87;113 | 2.45 | 50;173 | 2.56 | 116;244 | 4.75 |
| 211;309 | 2.16 | 93;215 | 2.04 | 167;267 | 1.86 | 60;325 | 2.45 | 11;69 | 2.56 | 194;325 | 3.60 |
| 69;297 | 2.16 | 93;214 | 2.04 | 154;312 | 1.86 | 60;220 | 2.45 | 50;163 | 2.56 | 116;193 | 3.60 |
| 69;294 | 2.16 | 32;345 | 2.04 | 113;239 | 1.86 | 60;101 | 2.45 | 50;155 | 2.56 | 31;167 | 3.60 |
| 69;290 | 2.16 | 93;206 | 2.04 | 236;256 | 1.86 | 60;188 | 2.45 | 50;153 | 2.56 | 192;325 | 3.60 |
| 134;226 | 2.16 | 93;201 | 2.04 | 7;312 | 1.86 | 60;334 | 2.45 | 50;145 | 2.56 | 116;170 | 3.60 |
| 69;266 | 2.16 | 36;201 | 2.04 | 153;313 | 1.86 | 185;322 | 2.45 | 50;338 | 2.56 | 63;170 | 3.60 |
| 69;258 | 2.16 | 245;272 | 2.04 | 121;147 | 1.86 | 60;346 | 2.45 | 34;66 | 2.56 | 70;198 | 3.60 |
| 69;257 | 2.16 | 114;356 | 2.04 | 17;312 | 1.86 | 60;105 | 2.45 | 50;256 | 2.56 | 188;191 | 3.60 |
| 69;256 | 2.16 | 32;296 | 2.04 | 69;101 | 1.86 | 20;60 | 2.45 | 50;244 | 2.56 | 176;194 | 3.60 |
| 69;249 | 2.16 | 89;354 | 2.04 | 112;264 | 1.86 | 248;302 | 2.45 | 11;71 | 2.56 | 70;194 | 3.60 |
| 219;243 | 2.16 | 254;283 | 2.04 | 195;313 | 1.86 | 133;200 | 2.45 | 111;256 | 2.56 | 72;193 | 3.60 |
| 11;247 | 2.16 | 238;282 | 2.04 | 195;312 | 1.86 | 222;322 | 2.45 | 66;266 | 2.56 | 116;161 | 3.60 |
| 11;226 | 2.16 | 93;161 | 2.04 | 231;312 | 1.86 | 60;214 | 2.45 | 193;310 | 2.56 | 72;198 | 3.60 |
| 71;247 | 2.16 | 93;173 | 2.04 | 167;312 | 1.86 | 60;119 | 2.45 | 9;66 | 2.56 | 116;202 | 3.60 |
| 295;303 | 2.16 | 93;172 | 2.04 | 154;313 | 1.86 | 9;60 | 2.45 | 73;237 | 2.56 | 69;158 | 3.60 |
| 11;91 | 2.16 | 93;170 | 2.04 | 119;313 | 1.86 | 60;206 | 2.45 | 73;226 | 2.56 | 70;193 | 3.60 |
| 130;226 | 2.16 | 201;297 | 2.04 | 213;312 | 1.86 | 310;322 | 2.45 | 73;213 | 2.56 | 79;169 | 3.60 |
| 296;303 | 2.16 | 131;274 | 2.04 | 213;313 | 1.86 | 60;164 | 2.45 | 73;208 | 2.56 | 78;161 | 3.60 |
| 71;91 | 2.16 | 201;315 | 2.04 | 155;312 | 1.86 | 162;322 | 2.45 | 73;266 | 2.56 | 158;296 | 3.60 |
| 296;348 | 2.16 | 126;201 | 2.04 | 87;313 | 1.86 | 156;322 | 2.45 | 115;360 | 2.56 | 116;239 | 3.60 |
| 166;226 | 2.16 | 97;252 | 2.04 | 225;313 | 1.86 | 60;153 | 2.45 | 73;202 | 2.56 | 41;53 | 3.60 |
| 211;226 | 2.16 | 87;201 | 2.04 | 87;312 | 1.86 | 80;225 | 2.45 | 66;294 | 2.56 | 78;194 | 3.60 |
| 73;216 | 2.16 | 50;274 | 2.04 | 214;229 | 1.86 | 223;322 | 2.45 | 73;185 | 2.56 | 69;78 | 3.60 |
| 73;226 | 2.16 | 97;280 | 2.04 | 112;313 | 1.86 | 60;174 | 2.45 | 71;355 | 2.56 | 129;169 | 3.60 |
| 226;321 | 2.16 | 97;283 | 2.04 | 225;312 | 1.86 | 60;265 | 2.45 | 66;296 | 2.56 | 43;214 | 3.60 |
| 226;356 | 2.16 | 201;291 | 2.04 | 69;226 | 1.86 | 60;146 | 2.45 | 144;229 | 2.56 | 177;198 | 3.60 |
| 226;355 | 2.16 | 73;274 | 2.04 | 71;236 | 1.86 | 60;166 | 2.45 | 66;209 | 2.56 | 117;169 | 3.60 |
| 226;354 | 2.16 | 201;272 | 2.04 | 31;293 | 1.86 | 60;71 | 2.45 | 66;221 | 2.56 | 78;162 | 3.60 |
| 226;352 | 2.16 | 73;282 | 2.04 | 98;244 | 1.86 | 60;291 | 2.45 | 182;214 | 2.56 | 187;191 | 3.60 |
| 226;350 | 2.16 | 73;283 | 2.04 | 119;312 | 1.86 | 78;251 | 2.45 | 182;212 | 2.56 | 119;199 | 3.60 |
| 226;348 | 2.16 | 201;274 | 2.04 | 167;256 | 1.86 | 60;167 | 2.45 | 182;206 | 2.56 | 69;235 | 3.60 |
| 226;346 | 2.16 | 38;337 | 2.04 | 194;312 | 1.86 | 60;152 | 2.45 | 182;196 | 2.56 | 161;242 | 3.60 |
| 226;343 | 2.16 | 201;290 | 2.04 | 80;312 | 1.86 | 60;168 | 2.45 | 182;194 | 2.56 | 117;170 | 3.60 |

| | | | | IGFBP1_DKK1 positive | | | | | | Intestinal epithelial | |
|---|---|---|---|---|---|---|---|---|---|---|---|
| Hepatoblasts | | Horizontal cells | | cells | | Inhibitory interneurons | | Inhibitory neurons | | cells | |
| Clusters | Score | Clusters | Score | Clusters | Score | Clusters | Score | Clusters | Score | Clusters | Score |
| 122;334 | 5.19 | 57;243 | 6.12 | 272;318 | 3.96 | 166;234 | 4.80 | 52;190 | 5.64 | 14;101 | 6.00 |
| 145;214 | 3.93 | 248;256 | 5.06 | 8;318 | 3.96 | 4;249 | 4.80 | 26;262 | 4.78 | 101;107 | 6.00 |
| 40;105 | 3.93 | 59;256 | 5.06 | 318;342 | 3.96 | 4;168 | 4.80 | 136;255 | 4.78 | 145;216 | 4.86 |
| 97;101 | 3.93 | 79;256 | 5.06 | 278;318 | 3.07 | 166;238 | 4.80 | 52;64 | 4.78 | 2;105 | 4.86 |
| 145;265 | 3.93 | 58;293 | 5.06 | 315;326 | 3.07 | 195;238 | 3.86 | 26;207 | 4.78 | 12;101 | 4.86 |
| 100;258 | 3.93 | 73;247 | 4.07 | 272;315 | 3.07 | 234;249 | 3.86 | 95;256 | 4.78 | 101;135 | 4.86 |
| 122;258 | 3.93 | 56;293 | 4.07 | 316;360 | 3.07 | 202;247 | 3.86 | 98;227 | 4.78 | 4;101 | 4.86 |
| 101;134 | 3.93 | 142;256 | 4.07 | 19;315 | 3.07 | 13;241 | 3.86 | 136;253 | 4.78 | 101;131 | 4.86 |
| 101;311 | 3.93 | 58;288 | 4.07 | 91;360 | 3.07 | 8;234 | 3.86 | 176;249 | 3.97 | 101;127 | 4.86 |
| 145;350 | 3.93 | 233;256 | 4.07 | 20;280 | 3.07 | 18;228 | 3.86 | 42;228 | 3.97 | 145;357 | 4.86 |
| 101;125 | 3.93 | 143;256 | 4.07 | 318;347 | 3.07 | 3;239 | 3.86 | 11;26 | 3.97 | 101;126 | 4.86 |
| 105;257 | 3.93 | 69;256 | 4.07 | 316;326 | 3.07 | 3;246 | 3.86 | 30;136 | 3.97 | 97;101 | 4.86 |
| 61;145 | 3.93 | 72;256 | 4.07 | 154;315 | 3.07 | 3;234 | 3.86 | 38;136 | 3.97 | 101;122 | 4.86 |
| 105;267 | 3.93 | 98;256 | 4.07 | 150;326 | 3.07 | 30;200 | 3.86 | 254;290 | 3.97 | 101;216 | 4.86 |
| 101;258 | 3.93 | 69;243 | 4.07 | 11;315 | 3.07 | 187;197 | 3.86 | 20;26 | 3.97 | 98;101 | 4.86 |
| 145;196 | 3.93 | 157;256 | 4.07 | 204;318 | 2.27 | 18;226 | 3.86 | 26;212 | 3.97 | 101;228 | 4.86 |
| 105;109 | 3.93 | 75;256 | 4.07 | 11;321 | 2.27 | 187;226 | 3.86 | 136;294 | 3.97 | 2;146 | 4.86 |
| 87;145 | 3.93 | 129;256 | 4.07 | 318;334 | 2.27 | 18;241 | 3.86 | 130;254 | 3.97 | 101;150 | 4.86 |
| 87;105 | 3.93 | 187;256 | 4.07 | 325;326 | 2.27 | 37;195 | 3.86 | 158;262 | 3.97 | 16;101 | 4.86 |
| 101;264 | 3.93 | 155;256 | 4.07 | 142;318 | 2.27 | 190;238 | 3.86 | 124;227 | 3.97 | 101;172 | 4.86 |
| 105;308 | 3.93 | 190;256 | 4.07 | 20;318 | 2.27 | 204;234 | 3.86 | 249;254 | 3.97 | 63;101 | 4.86 |
| 122;361 | 3.93 | 53;256 | 4.07 | 280;315 | 2.27 | 241;264 | 3.86 | 12;26 | 3.97 | 101;168 | 4.86 |
| 83;270 | 3.93 | 165;256 | 4.07 | 155;318 | 2.27 | 125;311 | 3.86 | 18;228 | 3.97 | 63;145 | 4.86 |
| 83;258 | 3.93 | 91;256 | 4.07 | 316;347 | 2.27 | 4;37 | 3.86 | 45;254 | 3.97 | 101;357 | 4.86 |
| 48;101 | 3.93 | 42;256 | 4.07 | 153;315 | 2.27 | 92;249 | 3.86 | 26;194 | 3.97 | 62;145 | 4.86 |
| 98;101 | 3.93 | 132;293 | 4.07 | 185;317 | 2.27 | 3;30 | 3.86 | 26;195 | 3.97 | 77;101 | 4.86 |
| 6;105 | 3.93 | 59;247 | 4.07 | 173;318 | 2.27 | 4;234 | 3.86 | 33;254 | 3.97 | 2;61 | 4.86 |
| 101;341 | 3.93 | 58;247 | 4.07 | 153;326 | 2.27 | 11;92 | 3.86 | 41;254 | 3.97 | 58;145 | 4.86 |
| 122;147 | 3.93 | 71;256 | 4.07 | 153;321 | 2.27 | 4;258 | 3.86 | 39;254 | 3.97 | 2;72 | 4.86 |
| 101;239 | 2.81 | 56;243 | 4.07 | 212;282 | 2.27 | 136;179 | 2.99 | 26;171 | 3.97 | 11;101 | 4.86 |
| 101;238 | 2.81 | 67;256 | 4.07 | 118;318 | 2.27 | 92;95 | 2.99 | 26;169 | 3.97 | 99;101 | 4.86 |
| 101;186 | 2.81 | 58;256 | 4.07 | 153;318 | 2.27 | 7;227 | 2.99 | 262;325 | 3.97 | 102;145 | 4.86 |
| 101;185 | 2.81 | 17;256 | 4.07 | 180;318 | 2.27 | 11;236 | 2.99 | 26;136 | 3.97 | 101;232 | 4.86 |
| 101;229 | 2.81 | 121;293 | 4.07 | 66;282 | 2.27 | 13;228 | 2.99 | 21;65 | 3.97 | 10;145 | 4.86 |
| 101;233 | 2.81 | 144;256 | 4.07 | 317;339 | 2.27 | 7;241 | 2.99 | 5;350 | 3.22 | 76;101 | 4.86 |
| 101;234 | 2.81 | 19;256 | 4.07 | 269;318 | 2.27 | 7;244 | 2.99 | 30;76 | 3.22 | 101;294 | 4.86 |
| 64;101 | 2.81 | 19;293 | 3.16 | 25;356 | 2.27 | 177;226 | 2.99 | 30;85 | 3.22 | 101;111 | 4.86 |
| 101;206 | 2.81 | 256;352 | 3.16 | 191;326 | 2.27 | 187;244 | 2.99 | 136;168 | 3.22 | 122;145 | 4.86 |
| 5;101 | 2.81 | 59;243 | 3.16 | 125;318 | 2.27 | 3;244 | 2.99 | 230;266 | 3.22 | 101;270 | 4.86 |
| 101;205 | 2.81 | 228;243 | 3.16 | 278;316 | 2.27 | 201;241 | 2.99 | 52;68 | 3.22 | 101;102 | 4.86 |
| 101;240 | 2.81 | 222;256 | 3.16 | 5;318 | 2.27 | 7;176 | 2.99 | 41;166 | 3.22 | 2;214 | 4.86 |
| 101;184 | 2.81 | 212;256 | 3.16 | 52;318 | 2.27 | 179;241 | 2.99 | 50;227 | 3.22 | 58;101 | 4.86 |
| 101;183 | 2.81 | 59;288 | 3.16 | 240;318 | 2.27 | 92;124 | 2.99 | 57;254 | 3.22 | 2;171 | 4.86 |
| 101;182 | 2.81 | 171;256 | 3.16 | 196;317 | 2.27 | 11;226 | 2.99 | 181;227 | 3.22 | 101;106 | 4.86 |
| 101;210 | 2.81 | 253;293 | 3.16 | 342;347 | 2.27 | 13;238 | 2.99 | 181;262 | 3.22 | 2;169 | 4.86 |
| 101;181 | 2.81 | 134;247 | 3.16 | 318;320 | 2.27 | 239;251 | 2.99 | 146;294 | 3.22 | 145;209 | 4.86 |
| 101;203 | 2.81 | 212;293 | 3.16 | 274;282 | 2.27 | 234;264 | 2.99 | 158;266 | 3.22 | 10;101 | 4.86 |
| 101;180 | 2.81 | 72;293 | 3.16 | 16;194 | 2.27 | 13;239 | 2.99 | 158;254 | 3.22 | 103;146 | 4.86 |
| 101;179 | 2.81 | 24;256 | 3.16 | 202;318 | 2.27 | 37;247 | 2.99 | 50;266 | 3.22 | 86;101 | 4.86 |
| 101;178 | 2.81 | 256;364 | 3.16 | 239;318 | 2.27 | 202;226 | 2.99 | 30;43 | 3.22 | 101;180 | 3.81 |
| 101;236 | 2.81 | 188;256 | 3.16 | 42;315 | 2.27 | 202;234 | 2.99 | 52;59 | 3.22 | 101;181 | 3.81 |
| 101;237 | 2.81 | 188;293 | 3.16 | 208;280 | 2.27 | 20;244 | 2.99 | 30;166 | 3.22 | 145;350 | 3.81 |
| 101;202 | 2.81 | 203;256 | 3.16 | 86;318 | 2.27 | 202;244 | 2.99 | 30;227 | 3.22 | 101;196 | 3.81 |
| 101;177 | 2.81 | 185;293 | 3.16 | 133;282 | 2.27 | 202;246 | 2.99 | 21;252 | 3.22 | 145;351 | 3.81 |
| 101;176 | 2.81 | 121;256 | 3.16 | 318;326 | 2.27 | 238;262 | 2.99 | 44;227 | 3.22 | 101;296 | 3.81 |
| 101;204 | 2.81 | 71;293 | 3.16 | 119;318 | 2.27 | 215;234 | 2.99 | 30;195 | 3.22 | 145;352 | 3.81 |
| 101;197 | 2.81 | 238;243 | 3.16 | 222;318 | 2.27 | 238;247 | 2.99 | 41;227 | 3.22 | 145;230 | 3.81 |
| 101;198 | 2.81 | 243;293 | 3.16 | 222;315 | 2.27 | 187;246 | 2.99 | 30;205 | 3.22 | 145;234 | 3.81 |
| 101;228 | 2.81 | 187;297 | 3.16 | 91;347 | 2.27 | 234;309 | 2.99 | 41;228 | 3.22 | 145;353 | 3.81 |
| 101;196 | 2.81 | 160;293 | 3.16 | 319;347 | 2.27 | 127;244 | 2.99 | 35;254 | 3.22 | 122;207 | 3.81 |
| 101;195 | 2.81 | 171;293 | 3.16 | 96;318 | 2.27 | 30;249 | 2.99 | 254;266 | 3.22 | 145;354 | 3.81 |
| 101;211 | 2.81 | 93;293 | 3.16 | 132;318 | 2.27 | 30;250 | 2.99 | 217;266 | 3.22 | 145;217 | 3.81 |
| 101;194 | 2.81 | 256;355 | 3.16 | 318;359 | 2.27 | 238;353 | 2.99 | 254;311 | 3.22 | 145;286 | 3.81 |
| 101;212 | 2.81 | 106;293 | 3.16 | 166;317 | 2.27 | 13;249 | 2.99 | 30;146 | 3.22 | 16;145 | 3.81 |
| 101;213 | 2.81 | 256;359 | 3.16 | 74;326 | 2.27 | 12;234 | 2.99 | 11;57 | 3.22 | 101;278 | 3.81 |
| 101;193 | 2.81 | 242;256 | 3.16 | 280;282 | 2.27 | 91;244 | 2.99 | 30;215 | 3.22 | 101;193 | 3.81 |
| 101;192 | 2.81 | 142;243 | 3.16 | 315;347 | 2.27 | 234;236 | 2.99 | 92;136 | 3.22 | 145;228 | 3.81 |
| 101;209 | 2.81 | 214;217 | 3.16 | 20;272 | 2.27 | 234;238 | 2.99 | 30;266 | 3.22 | 101;177 | 3.81 |
| 101;190 | 2.81 | 60;249 | 3.16 | 224;318 | 2.27 | 238;246 | 2.99 | 30;251 | 3.22 | 58;78 | 3.81 |
| 101;214 | 2.81 | 98;247 | 3.16 | 8;315 | 2.27 | 201;249 | 2.99 | 11;32 | 3.22 | 101;182 | 3.81 |
| 101;215 | 2.81 | 238;293 | 3.16 | 319;326 | 2.27 | 226;264 | 2.99 | 41;195 | 3.22 | 101;178 | 3.81 |
| 101;216 | 2.81 | 112;293 | 3.16 | 126;318 | 2.27 | 226;262 | 2.99 | 212;249 | 3.22 | 145;223 | 3.81 |
| 101;189 | 2.81 | 214;249 | 3.16 | 16;356 | 2.27 | 52;311 | 2.99 | 5;227 | 3.22 | 101;183 | 3.81 |
| 101;217 | 2.81 | 256;348 | 3.16 | 326;342 | 2.27 | 197;246 | 2.99 | 124;247 | 3.22 | 145;222 | 3.81 |
| 101;218 | 2.81 | 178;256 | 3.16 | 200;274 | 2.27 | 131;234 | 2.99 | 26;182 | 3.22 | 101;184 | 3.81 |
| 101;241 | 2.81 | 240;293 | 3.16 | 298;315 | 2.27 | 121;226 | 2.99 | 180;205 | 3.22 | 145;220 | 3.81 |
| 101;188 | 2.81 | 97;256 | 3.16 | 55;317 | 2.27 | 124;236 | 2.99 | 26;186 | 3.22 | 145;237 | 3.81 |
| 101;220 | 2.81 | 20;256 | 3.16 | 194;342 | 2.27 | 226;228 | 2.99 | 26;193 | 3.22 | 101;186 | 3.81 |
| 101;222 | 2.81 | 186;256 | 3.16 | 96;317 | 2.27 | 197;226 | 2.99 | 227;231 | 3.22 | 101;188 | 3.81 |
| 101;208 | 2.81 | 207;256 | 3.16 | 166;315 | 2.27 | 184;226 | 2.99 | 227;242 | 3.22 | 101;291 | 3.81 |
| 101;207 | 2.81 | 50;293 | 3.16 | 109;318 | 2.27 | 241;262 | 2.99 | 227;249 | 3.22 | 101;189 | 3.81 |
| 57;101 | 2.81 | 170;256 | 3.16 | 226;315 | 2.27 | 244;269 | 2.99 | 26;206 | 3.22 | 101;185 | 3.81 |
| 101;223 | 2.81 | 97;293 | 3.16 | 56;282 | 2.27 | 196;234 | 2.99 | 26;210 | 3.22 | 101;240 | 3.81 |
| 101;224 | 2.81 | 256;320 | 3.16 | 272;321 | 2.27 | 244;245 | 2.99 | 137;226 | 3.22 | 101;201 | 3.81 |
| 101;226 | 2.81 | 256;321 | 3.16 | 16;282 | 2.27 | 52;179 | 2.99 | 129;212 | 3.22 | 101;174 | 3.81 |
| 101;187 | 2.81 | 256;323 | 3.16 | 315;324 | 2.27 | 244;264 | 2.99 | 26;214 | 3.22 | 101;262 | 3.81 |
| 101;201 | 2.81 | 125;293 | 3.16 | 318;339 | 2.27 | 244;266 | 2.99 | 85;249 | 3.22 | 101;257 | 3.81 |
| 101;268 | 2.81 | 229;256 | 3.16 | 91;356 | 2.27 | 195;234 | 2.99 | 227;294 | 3.22 | 101;210 | 3.81 |
| 101;242 | 2.81 | 256;292 | 3.16 | 128;272 | 2.27 | 7;52 | 2.99 | 136;354 | 3.22 | 145;270 | 3.81 |
| 101;338 | 2.81 | 256;293 | 3.16 | 316;339 | 2.27 | 3;201 | 2.99 | 226;227 | 3.22 | 145;269 | 3.81 |
| 101;336 | 2.81 | 186;293 | 3.16 | 318;338 | 2.27 | 68;243 | 2.99 | 25;227 | 3.22 | 101;213 | 3.81 |
| 101;334 | 2.81 | 256;289 | 3.16 | 158;318 | 2.27 | 7;79 | 2.99 | 26;59 | 3.22 | 101;214 | 3.81 |
| 101;333 | 2.81 | 103;244 | 3.16 | 72;280 | 2.27 | 68;227 | 2.99 | 15;136 | 3.22 | 101;249 | 3.81 |
| 101;331 | 2.81 | 256;270 | 3.16 | 288;347 | 2.27 | 3;195 | 2.99 | 26;85 | 3.22 | 101;215 | 3.81 |
| 101;330 | 2.81 | 36;247 | 3.16 | 229;315 | 2.27 | 68;197 | 2.99 | 26;95 | 3.22 | 101;217 | 3.81 |
| 101;326 | 2.81 | 256;295 | 3.16 | 12;318 | 2.27 | 227;262 | 2.99 | 26;170 | 3.22 | 101;218 | 3.81 |
| 101;325 | 2.81 | 256;297 | 3.16 | 132;315 | 2.27 | 5;262 | 2.99 | 38;154 | 3.22 | 105;197 | 3.81 |
| 101;324 | 2.81 | 205;256 | 3.16 | 20;274 | 2.27 | 3;236 | 2.99 | 85;325 | 3.22 | 101;225 | 3.81 |
| 101;322 | 2.81 | 206;256 | 3.16 | 278;336 | 2.27 | 28;69 | 2.99 | 5;136 | 3.22 | 101;245 | 3.81 |
| 101;321 | 2.81 | 58;215 | 3.16 | 91;318 | 2.27 | 7;39 | 2.99 | 238;254 | 3.22 | 101;231 | 3.81 |

| Lymphatic endothelial | | | | MUC13_DMBT1 | | | | | | | |
|---|---|---|---|---|---|---|---|---|---|---|---|
| cells | | Lymphoid cells | | positive cells | | Megakaryocytes | | Mesangial cells | | Mesothelial cells | |
| Clusters | Score | Clusters | Score | Clusters | Score | Clusters | Score | Clusters | Score | Clusters | Score |
| 298;358 | 5.73 | 11;326 | 5.34 | 78;150 | 4.07 | 85;147 | 3.76 | 188;278 | 9.88 | 146;353 | 3.93 |
| 176;360 | 5.73 | 96;365 | 4.31 | 101;307 | 4.07 | 157;343 | 3.76 | 172;277 | 9.88 | 55;282 | 3.93 |
| 91;358 | 4.35 | 96;266 | 4.31 | 206;307 | 4.07 | 94;172 | 2.68 | 176;278 | 8.68 | 257;295 | 2.81 |
| 209;316 | 4.35 | 25;96 | 4.31 | 101;157 | 4.07 | 43;252 | 2.68 | 15;277 | 8.68 | 257;296 | 2.81 |
| 193;308 | 4.35 | 96;245 | 4.31 | 101;294 | 4.07 | 67;111 | 2.68 | 276;345 | 8.68 | 261;285 | 2.81 |
| 298;351 | 4.35 | 96;97 | 4.31 | 101;149 | 4.07 | 180;343 | 2.68 | 69;279 | 8.68 | 88;358 | 2.81 |
| 294;316 | 4.35 | 96;211 | 4.31 | 101;201 | 4.07 | 157;238 | 2.68 | 249;357 | 8.68 | 55;356 | 2.81 |
| 40;318 | 4.35 | 6:96 | 4.31 | 14;101 | 4.07 | 94;167 | 2.68 | 174;277 | 8.68 | 188;360 | 2.81 |
| 198;308 | 4.35 | 96;324 | 4.31 | 2;72 | 4.07 | 111;123 | 2.68 | 173;277 | 8.68 | 86;282 | 2.81 |
| 308;358 | 4.35 | 96;347 | 4.31 | 101;161 | 4.07 | 94;166 | 2.68 | 277;325 | 8.68 | 159;299 | 2.81 |
| 304;316 | 4.35 | 133;134 | 4.31 | 101;168 | 4.07 | 50;157 | 2.68 | 90;277 | 8.68 | 277;282 | 2.81 |
| 181;316 | 4.35 | 96;310 | 4.31 | 98;101 | 4.07 | 94;180 | 2.68 | 57;279 | 8.68 | 154;241 | 2.81 |
| 315;359 | 4.35 | 96;355 | 4.31 | 101;357 | 4.07 | 136;364 | 2.68 | 74;277 | 8.68 | 118;299 | 2.81 |
| 298;316 | 4.35 | 96;98 | 4.31 | 2;152 | 4.07 | 34;85 | 2.68 | 276;286 | 8.68 | 152;299 | 2.81 |
| 298;308 | 4.35 | 96;241 | 4.31 | 101;107 | 4.07 | 34;89 | 2.68 | 72;277 | 8.68 | 255;342 | 2.81 |
| 254;298 | 4.35 | 96;270 | 4.31 | 101;146 | 3.16 | 111;148 | 2.68 | 277;278 | 8.68 | 55;330 | 2.81 |
| 212;298 | 4.35 | 171;187 | 3.36 | 69;78 | 3.16 | 22;89 | 2.68 | 76;278 | 8.68 | 146;330 | 2.81 |
| 317;345 | 4.35 | 65;96 | 3.36 | 101;150 | 3.16 | 94;182 | 2.68 | 168;277 | 8.68 | 154;342 | 2.81 |
| 269;298 | 4.35 | 96;209 | 3.36 | 101;148 | 3.16 | 22;355 | 2.68 | 64;277 | 8.68 | 286;299 | 2.81 |
| 318;345 | 3.12 | 96;210 | 3.36 | 101;147 | 3.16 | 94;160 | 2.68 | 279;302 | 8.68 | 280;348 | 2.81 |
| 57;308 | 3.12 | 40;96 | 3.36 | 100;152 | 3.16 | 119;361 | 2.68 | 44;279 | 8.68 | 94;194 | 2.81 |
| 251;300 | 3.12 | 96;205 | 3.36 | 78;211 | 3.16 | 34;150 | 2.68 | 278;353 | 8.68 | 31;338 | 2.81 |
| 317;338 | 3.12 | 96;212 | 3.36 | 101;151 | 3.16 | 185;343 | 2.68 | 9;278 | 8.68 | 106;350 | 2.81 |
| 317;337 | 3.12 | 95;104 | 3.36 | 101;152 | 3.16 | 110;159 | 2.68 | 278;361 | 8.68 | 31;337 | 2.81 |
| 251;302 | 3.12 | 96;213 | 3.36 | 101;340 | 3.16 | 119;295 | 2.68 | 137;278 | 8.68 | 31;336 | 2.81 |
| 298;310 | 3.12 | 42;96 | 3.36 | 101;169 | 3.16 | 136;252 | 2.68 | 276;302 | 8.68 | 106;358 | 2.81 |
| 298;304 | 3.12 | 67;95 | 3.36 | 66;101 | 3.16 | 109;143 | 2.68 | 276;301 | 8.68 | 33;282 | 2.81 |
| 251;317 | 3.12 | 96;325 | 3.36 | 101;167 | 3.16 | 34;154 | 2.68 | 175;278 | 8.68 | 280;340 | 2.81 |
| 199;298 | 3.12 | 96;167 | 3.36 | 101;165 | 3.16 | 94;123 | 2.68 | 73;277 | 8.68 | 96;280 | 2.81 |
| 252;298 | 3.12 | 96;166 | 3.36 | 101;164 | 3.16 | 94;159 | 2.68 | 215;277 | 8.68 | 257;347 | 1.83 |
| 252;305 | 3.12 | 96;169 | 3.36 | 101;163 | 3.16 | 22;252 | 2.68 | 214;277 | 8.68 | 91;282 | 1.83 |
| 317;336 | 3.12 | 96;322 | 3.36 | 101;160 | 3.16 | 34;134 | 2.68 | 16;277 | 8.68 | 21;198 | 1.83 |
| 252;316 | 3.12 | 96;168 | 3.36 | 101;155 | 3.16 | 136;209 | 2.68 | 171;277 | 7.53 | 257;350 | 1.83 |
| 59;305 | 3.12 | 96;208 | 3.36 | 101;154 | 3.16 | 105;136 | 2.68 | 278;286 | 7.53 | 257;351 | 1.83 |
| 325;360 | 3.12 | 92;96 | 3.36 | 101;145 | 3.16 | 136;204 | 2.68 | 58;276 | 7.53 | 152;257 | 1.83 |
| 86;308 | 3.12 | 96;207 | 3.36 | 101;143 | 3.16 | 111;159 | 2.68 | 145;276 | 7.53 | 318;342 | 1.83 |
| 57;358 | 3.12 | 18;96 | 3.36 | 101;117 | 3.16 | 119;360 | 2.68 | 205;277 | 7.53 | 257;356 | 1.83 |
| 57;336 | 3.12 | 96;323 | 3.36 | 101;121 | 3.16 | 22;330 | 2.68 | 179;278 | 7.53 | 257;358 | 1.83 |
| 250;330 | 3.12 | 20;326 | 3.36 | 72;101 | 3.16 | 94;364 | 2.68 | 248;276 | 7.53 | 257;360 | 1.83 |
| 318;358 | 3.12 | 96;206 | 3.36 | 101;119 | 3.16 | 94;363 | 2.68 | 278;291 | 7.53 | 257;363 | 1.83 |
| 89;316 | 3.12 | 162;187 | 3.36 | 101;118 | 3.16 | 67;135 | 2.68 | 164;277 | 7.53 | 152;353 | 1.83 |
| 298;359 | 3.12 | 87;187 | 3.36 | 78;147 | 3.16 | 23;157 | 2.68 | 170;277 | 7.53 | 257;353 | 1.83 |
| 137;316 | 3.12 | 67;96 | 3.36 | 101;111 | 3.16 | 22;143 | 2.68 | 98;277 | 7.53 | 58;282 | 1.83 |
| 298;354 | 3.12 | 37;96 | 3.36 | 103;206 | 3.16 | 150;343 | 2.68 | 278;294 | 7.53 | 286;324 | 1.83 |
| 250;318 | 3.12 | 96;222 | 3.36 | 101;106 | 3.16 | 22;138 | 2.68 | 278;298 | 7.53 | 152;194 | 1.83 |
| 298;352 | 3.12 | 15;96 | 3.36 | 78;105 | 3.16 | 119;351 | 2.68 | 58;278 | 7.53 | 171;257 | 1.83 |
| 250;300 | 3.12 | 19;96 | 3.36 | 219;306 | 3.16 | 22;154 | 2.68 | 273;276 | 7.53 | 257;282 | 1.83 |
| 207;298 | 3.12 | 6;326 | 3.36 | 78;171 | 3.16 | 171;343 | 2.68 | 277;353 | 7.53 | 188;280 | 1.83 |
| 57;318 | 3.12 | 96;121 | 3.36 | 101;135 | 3.16 | 111;321 | 2.68 | 238;277 | 7.53 | 171;280 | 1.83 |
| 203;316 | 3.12 | 96;223 | 3.36 | 152;364 | 3.16 | 119;330 | 2.68 | 39;279 | 7.53 | 151;358 | 1.83 |
| 317;347 | 3.12 | 87;96 | 3.36 | 145;278 | 3.16 | 211;252 | 2.68 | 71;277 | 7.53 | 21;356 | 1.83 |
| 203;298 | 3.12 | 7;95 | 3.36 | 19;101 | 3.16 | 23;175 | 2.68 | 17;276 | 7.53 | 21;360 | 1.83 |
| 298;340 | 3.12 | 96;152 | 3.36 | 78;172 | 3.16 | 22;157 | 2.68 | 150;277 | 7.53 | 194;320 | 1.83 |
| 207;292 | 3.12 | 12;96 | 3.36 | 101;126 | 3.16 | 109;330 | 2.68 | 136;279 | 7.53 | 58;330 | 1.83 |
| 203;256 | 3.12 | 187;340 | 3.36 | 101;132 | 3.16 | 22;110 | 2.68 | 54;350 | 7.53 | 185;282 | 1.83 |
| 298;338 | 3.12 | 96;217 | 3.36 | 101;131 | 3.16 | 23;138 | 2.68 | 196;277 | 7.53 | 257;338 | 1.83 |
| 298;334 | 3.12 | 96;214 | 3.36 | 101;129 | 3.16 | 343;363 | 2.68 | 184;277 | 7.53 | 257;337 | 1.83 |
| 198;298 | 3.12 | 96;215 | 3.36 | 101;128 | 3.16 | 119;356 | 2.68 | 225;276 | 7.53 | 137;280 | 1.83 |
| 252;348 | 3.12 | 96;159 | 3.36 | 62;101 | 3.16 | 34;68 | 2.68 | 124;276 | 7.53 | 137;282 | 1.83 |
| 40;316 | 3.12 | 96;216 | 3.36 | 94;101 | 3.16 | 119;357 | 2.68 | 231;276 | 7.53 | 257;331 | 1.83 |
| 193;299 | 3.12 | 96;298 | 3.36 | 101;171 | 3.16 | 23;134 | 2.68 | 113;276 | 7.53 | 58;299 | 1.83 |
| 193;298 | 3.12 | 96;220 | 3.36 | 101;181 | 3.16 | 119;359 | 2.68 | 85;277 | 7.53 | 286;350 | 1.83 |
| 40;302 | 3.12 | 23;96 | 3.36 | 101;172 | 3.16 | 149;217 | 2.68 | 145;277 | 7.53 | 58;300 | 1.83 |
| 40;300 | 3.12 | 134;187 | 3.36 | 16;101 | 3.16 | 67;119 | 2.68 | 6:277 | 7.53 | 257;318 | 1.83 |
| 40;298 | 3.12 | 134;188 | 3.36 | 101;298 | 3.16 | 94;324 | 2.68 | 103;276 | 7.53 | 194;342 | 1.83 |
| 256;317 | 3.12 | 82;96 | 3.36 | 2;101 | 3.16 | 94;321 | 2.68 | 122;276 | 7.53 | 152;354 | 1.83 |
| 294;298 | 3.12 | 132;322 | 3.36 | 101;246 | 3.16 | 23;298 | 2.68 | 91;278 | 7.53 | 35;353 | 1.83 |
| 256;337 | 3.12 | 96;204 | 3.36 | 10;101 | 3.16 | 34;362 | 2.68 | 103;278 | 7.53 | 188;257 | 1.83 |
| 293;341 | 3.12 | 68;96 | 3.36 | 104;306 | 3.16 | 34;188 | 2.68 | 188;277 | 7.53 | 94;285 | 1.83 |
| 260;358 | 3.12 | 96;181 | 3.36 | 101;309 | 3.16 | 34;363 | 2.68 | 146;277 | 7.53 | 289;337 | 1.83 |
| 293;317 | 3.12 | 96;182 | 3.36 | 104;307 | 3.16 | 34;185 | 2.68 | 86;278 | 7.53 | 94;296 | 1.83 |
| 262;308 | 3.12 | 96;183 | 3.36 | 101;315 | 3.16 | 34;181 | 2.68 | 86;277 | 7.53 | 86;337 | 1.83 |
| 191;298 | 3.12 | 229;326 | 3.36 | 101;218 | 3.16 | 34;180 | 2.68 | 147;277 | 7.53 | 86;330 | 1.83 |
| 263;302 | 3.12 | 97;147 | 3.36 | 101;291 | 3.16 | 158;298 | 2.68 | 276;312 | 7.53 | 223;282 | 1.83 |
| 292;360 | 3.12 | 96;184 | 3.36 | 101;216 | 3.16 | 119;252 | 2.68 | 61;277 | 7.53 | 134;353 | 1.83 |
| 62;308 | 3.12 | 96;185 | 3.36 | 2;173 | 3.16 | 34;217 | 2.68 | 201;279 | 7.53 | 289;299 | 1.83 |
| 193;316 | 3.12 | 97;133 | 3.36 | 2;196 | 3.16 | 34;346 | 2.68 | 239;276 | 7.53 | 154;257 | 1.83 |
| 256;298 | 3.12 | 60;96 | 3.36 | 61;101 | 3.16 | 23;68 | 2.68 | 223;279 | 7.53 | 168;342 | 1.83 |
| 195;316 | 3.12 | 85;96 | 3.36 | 2;208 | 3.16 | 74;351 | 2.68 | 202;277 | 7.53 | 154;234 | 1.83 |
| 198;300 | 3.12 | 99;326 | 3.36 | 145;208 | 3.16 | 43;126 | 2.68 | 270;278 | 7.53 | 134;285 | 1.83 |
| 207;308 | 3.12 | 96;103 | 3.36 | 101;262 | 3.16 | 119;258 | 2.68 | 222;279 | 7.53 | 86;354 | 1.83 |
| 198;269 | 3.12 | 97;137 | 3.36 | 101;217 | 3.16 | 144;298 | 2.68 | 88;357 | 7.53 | 89;280 | 1.83 |
| 197;356 | 3.12 | 96;172 | 3.36 | 101;215 | 3.16 | 136;157 | 2.68 | 222;277 | 7.53 | 86;353 | 1.83 |
| 254;304 | 3.12 | 97;203 | 3.36 | 101;173 | 3.16 | 119;249 | 2.68 | 278;313 | 7.53 | 223;353 | 1.83 |
| 254;305 | 3.12 | 98;190 | 3.36 | 101;182 | 3.16 | 135;346 | 2.68 | 278;312 | 7.53 | 223;350 | 1.83 |
| 254;308 | 3.12 | 14;326 | 3.36 | 104;145 | 3.16 | 325;351 | 2.68 | 6;276 | 7.53 | 258;338 | 1.83 |
| 196;316 | 3.12 | 96;173 | 3.36 | 101;325 | 3.16 | 119;150 | 2.68 | 83;276 | 7.53 | 289;349 | 1.83 |
| 254;338 | 3.12 | 91;326 | 3.36 | 101;186 | 3.16 | 34;171 | 2.68 | 256;276 | 7.53 | 258;337 | 1.83 |
| 254;347 | 3.12 | 96;175 | 3.36 | 101;185 | 3.16 | 34;165 | 2.68 | 49;277 | 7.53 | 258;336 | 1.83 |
| 195;308 | 3.12 | 134;356 | 3.36 | 78;306 | 3.16 | 154;252 | 2.68 | 278;309 | 7.53 | 154;233 | 1.83 |
| 193;358 | 3.12 | 96;178 | 3.36 | 101;184 | 3.16 | 34;175 | 2.68 | 168;278 | 7.53 | 35;360 | 1.83 |
| 4;308 | 3.12 | 96;179 | 3.36 | 100;104 | 3.16 | 34;157 | 2.68 | 134;279 | 7.53 | 153;299 | 1.83 |
| 294;360 | 3.12 | 96;180 | 3.36 | 99;101 | 3.16 | 59;119 | 2.68 | 104;277 | 7.53 | 35;347 | 1.83 |
| 194;342 | 3.12 | 96;294 | 3.36 | 100;101 | 3.16 | 67;343 | 2.68 | 100;276 | 7.53 | 35;350 | 1.83 |
| 294;358 | 3.12 | 96;309 | 3.36 | 101;180 | 3.16 | 23;188 | 1.74 | 225;278 | 7.53 | 153;257 | 1.83 |
| 4;316 | 3.12 | 96;307 | 3.36 | 101;178 | 3.16 | 119;154 | 1.74 | 105;276 | 7.53 | 35;358 | 1.83 |
| 256;264 | 3.12 | 96;188 | 3.36 | 101;177 | 3.16 | 23;193 | 1.74 | 102;278 | 7.53 | 236;257 | 1.83 |
| 194;316 | 3.12 | 315;326 | 3.36 | 101;175 | 3.16 | 23;252 | 1.74 | 88;277 | 7.53 | 188;252 | 1.83 |
| 294;348 | 3.12 | 96;320 | 3.36 | 101;188 | 3.16 | 237;343 | 1.74 | 37;312 | 7.53 | 188;253 | 1.83 |
| 317;335 | 3.12 | 96;321 | 3.36 | 101;193 | 3.16 | 143;211 | 1.74 | 90;276 | 7.53 | 222;338 | 1.83 |

| | | | | | | | | PAEP_MECOM positive | | PDE11A_FAM19A2 | |
|---|---|---|---|---|---|---|---|---|---|---|---|
| Metanephric cells | | Myeloid cells | | Neuroendocrine cells | | Oligodendrocytes | | cells | | positive cells | |
| Clusters | Score | Clusters | Score | Clusters | Score | Clusters | Score | Clusters | Score | Clusters | Score |
| 54;354 | 14.10 | 156;173 | 3.30 | 65;351 | 4.23 | 30;225 | 5.19 | 93;183 | 6.00 | 56;293 | 3.31 |
| 37;70 | 12.23 | 112;179 | 3.30 | 166;351 | 4.23 | 30;253 | 5.19 | 88;364 | 4.86 | 110;327 | 3.31 |
| 240;275 | 12.23 | 16;156 | 3.30 | 222;254 | 4.23 | 30;201 | 4.08 | 316;334 | 4.86 | 190;307 | 3.31 |
| 179;275 | 12.23 | 138;179 | 3.30 | 167;222 | 4.23 | 195;233 | 4.08 | 88;334 | 4.86 | 131;311 | 3.31 |
| 37;71 | 12.23 | 98;156 | 3.30 | 65;171 | 3.19 | 41;202 | 4.08 | 93;269 | 3.81 | 112;310 | 3.31 |
| 178;275 | 12.23 | 156;183 | 3.30 | 65;170 | 3.19 | 214;227 | 4.08 | 80;150 | 3.81 | 81;140 | 3.31 |
| 257;275 | 12.23 | 98;143 | 3.30 | 65;359 | 3.19 | 151;227 | 4.08 | 80;149 | 3.81 | 112;292 | 3.31 |
| 149;275 | 12.23 | 20;156 | 3.30 | 149;254 | 3.19 | 15;227 | 4.08 | 99;186 | 3.81 | 112;324 | 3.31 |
| 64;275 | 12.23 | 73;156 | 3.30 | 207;254 | 3.19 | 42;253 | 4.08 | 88;93 | 3.81 | 119;307 | 3.31 |
| 37;73 | 12.23 | 99;110 | 3.30 | 228;254 | 3.19 | 128;251 | 4.08 | 93;96 | 3.81 | 91;307 | 3.31 |
| 37;169 | 12.23 | 153;211 | 3.30 | 185;209 | 3.19 | 227;316 | 4.08 | 88;269 | 3.81 | 119;327 | 3.31 |
| 23;275 | 12.23 | 45;184 | 3.30 | 210;222 | 3.19 | 167;227 | 4.08 | 134;364 | 3.81 | 312;326 | 3.31 |
| 37;275 | 12.23 | 81;119 | 3.30 | 65;157 | 3.19 | 30;295 | 4.08 | 88;257 | 3.81 | 58;293 | 3.31 |
| 275;352 | 12.23 | 71;156 | 3.30 | 171;291 | 3.19 | 202;227 | 4.08 | 134;334 | 3.81 | 98;308 | 3.31 |
| 12;275 | 12.23 | 24;112 | 3.30 | 209;222 | 3.19 | 149;227 | 4.08 | 150;269 | 3.81 | 229;351 | 3.31 |
| 196;275 | 12.23 | 102;156 | 3.30 | 254;338 | 3.19 | 30;292 | 4.08 | 80;269 | 3.81 | 142;312 | 3.31 |
| 37;164 | 12.23 | 167;184 | 3.30 | 185;222 | 3.19 | 30;176 | 3.07 | 62;183 | 3.81 | 208;293 | 2.34 |
| 252;275 | 12.23 | 138;204 | 3.30 | 177;359 | 3.19 | 30;149 | 3.07 | 129;334 | 3.81 | 81;326 | 2.34 |
| 184;275 | 12.23 | 61;156 | 3.30 | 65;162 | 3.19 | 30;255 | 3.07 | 98;185 | 3.81 | 62;327 | 2.34 |
| 216;275 | 12.23 | 156;361 | 3.30 | 212;351 | 3.19 | 30;184 | 3.07 | 88;316 | 3.81 | 188;307 | 2.34 |
| 41;275 | 12.23 | 99;143 | 3.30 | 65;167 | 3.19 | 30;185 | 3.07 | 88;150 | 3.81 | 249;327 | 2.34 |
| 188;275 | 12.23 | 85;180 | 3.30 | 65;169 | 3.19 | 30;267 | 3.07 | 88:99 | 3.81 | 48;308 | 2.34 |
| 220;275 | 12.23 | 67;156 | 3.30 | 254;362 | 3.19 | 227;255 | 3.07 | 81;284 | 3.81 | 234;293 | 2.34 |
| 253;275 | 12.23 | 110;156 | 2.16 | 65;353 | 3.19 | 30;173 | 3.07 | 134;216 | 2.85 | 208;311 | 2.34 |
| 217;275 | 12.23 | 85;156 | 2.16 | 11;254 | 3.19 | 30;152 | 3.07 | 67;134 | 2.85 | 92;308 | 2.34 |
| 44;275 | 12.23 | 4;156 | 2.16 | 103;254 | 3.19 | 149;218 | 3.07 | 134;172 | 2.85 | 148;327 | 2.34 |
| 137;275 | 12.23 | 110;166 | 2.16 | 65;321 | 3.19 | 30;157 | 3.07 | 134;166 | 2.85 | 36;139 | 2.34 |
| 147;275 | 12.23 | 13;129 | 2.16 | 166;254 | 3.19 | 30;160 | 3.07 | 134;154 | 2.85 | 62;226 | 2.34 |
| 275;282 | 12.23 | 120;138 | 2.16 | 223;351 | 3.19 | 30;168 | 3.07 | 134;282 | 2.85 | 234;256 | 2.34 |
| 207;275 | 12.23 | 119;323 | 2.16 | 211;353 | 3.19 | 30;169 | 3.07 | 134;186 | 2.85 | 249;297 | 2.34 |
| 91;275 | 12.23 | 110;180 | 2.16 | 202;254 | 3.19 | 30;171 | 3.07 | 73;99 | 2.85 | 62;242 | 2.34 |
| 126;275 | 12.23 | 146;156 | 2.16 | 205;222 | 3.19 | 30;170 | 3.07 | 134;214 | 2.85 | 62;307 | 2.34 |
| 275;353 | 12.23 | 110;163 | 2.16 | 254;316 | 3.19 | 30;236 | 3.07 | 143;282 | 2.85 | 249;326 | 2.34 |
| 275;354 | 12.23 | 120;128 | 2.16 | 166;171 | 3.19 | 30;210 | 3.07 | 143;272 | 2.85 | 180;321 | 2.34 |
| 203;275 | 12.23 | 85;112 | 2.16 | 222;351 | 3.19 | 30;234 | 3.07 | 134;262 | 2.85 | 120;327 | 2.34 |
| 105;275 | 12.23 | 85;110 | 2.16 | 65;331 | 3.19 | 42;359 | 3.07 | 134;269 | 2.85 | 206;327 | 2.34 |
| 43;275 | 12.23 | 151;184 | 2.16 | 152;254 | 3.19 | 106;195 | 3.07 | 134;204 | 2.85 | 206;220 | 2.34 |
| 229;275 | 12.23 | 118;156 | 2.16 | 103;355 | 3.19 | 30;229 | 3.07 | 284;334 | 2.85 | 31;293 | 2.34 |
| 195;275 | 12.23 | 85;128 | 2.16 | 166;359 | 3.19 | 30;214 | 3.07 | 67;88 | 2.85 | 49;292 | 2.34 |
| 166;275 | 12.23 | 146;176 | 2.16 | 66;292 | 3.19 | 30;216 | 3.07 | 61;334 | 2.85 | 236;293 | 2.34 |
| 14;275 | 12.23 | 13;156 | 2.16 | 154;254 | 3.19 | 157;247 | 3.07 | 99;347 | 2.85 | 236;292 | 2.34 |
| 131;275 | 12.23 | 119;351 | 2.16 | 62;351 | 3.19 | 240;247 | 3.07 | 81;262 | 2.85 | 16;242 | 2.34 |
| 234;275 | 12.23 | 110;172 | 2.16 | 150;254 | 3.19 | 190;302 | 3.07 | 99;339 | 2.85 | 236;242 | 2.34 |
| 71;275 | 12.23 | 138;310 | 2.16 | 355;359 | 3.19 | 30;193 | 3.07 | 88;362 | 2.85 | 206;297 | 2.34 |
| 94;275 | 12.23 | 85;135 | 2.16 | 295;355 | 3.19 | 30;195 | 3.07 | 150;183 | 2.85 | 248;327 | 2.34 |
| 215;275 | 12.23 | 85;138 | 2.16 | 65;185 | 3.19 | 30;244 | 3.07 | 81;334 | 2.85 | 182;307 | 2.34 |
| 180;275 | 12.23 | 119;347 | 2.16 | 66;319 | 3.19 | 227;244 | 3.07 | 88;325 | 2.85 | 207;307 | 2.34 |
| 172;275 | 12.23 | 13;143 | 2.16 | 102;254 | 3.19 | 30;202 | 3.07 | 81;236 | 2.85 | 182;297 | 2.34 |
| 208;275 | 12.23 | 143;248 | 2.16 | 214;222 | 3.19 | 171;227 | 3.07 | 97;186 | 2.85 | 249;263 | 2.34 |
| 57;275 | 12.23 | 146;184 | 2.16 | 65;209 | 3.19 | 30;203 | 3.07 | 99;149 | 2.85 | 139;244 | 2.34 |
| 40;275 | 12.23 | 110;169 | 2.16 | 171;222 | 3.19 | 129;227 | 3.07 | 12;134 | 2.85 | 120;312 | 2.34 |
| 169;275 | 12.23 | 183;186 | 2.16 | 65;210 | 3.19 | 16;227 | 3.07 | 86;88 | 2.85 | 108;327 | 2.34 |
| 275;356 | 12.23 | 99;120 | 2.16 | 151;254 | 3.19 | 195;302 | 3.07 | 268;334 | 2.85 | 61;307 | 2.34 |
| 275;358 | 12.23 | 143;270 | 2.16 | 169;254 | 3.19 | 247;293 | 3.07 | 12;99 | 2.85 | 81;325 | 2.34 |
| 275;359 | 12.23 | 119;308 | 2.16 | 70;254 | 3.19 | 247;302 | 3.07 | 204;257 | 2.85 | 36;81 | 2.34 |
| 275;360 | 12.23 | 184;185 | 2.16 | 205;254 | 3.19 | 41;171 | 3.07 | 268;364 | 2.85 | 121;326 | 2.34 |
| 46;275 | 12.23 | 99;136 | 2.16 | 65;253 | 3.19 | 128;256 | 3.07 | 215;334 | 2.85 | 63;94 | 2.34 |
| 73;275 | 12.23 | 110;129 | 2.16 | 66;74 | 2.25 | 244;249 | 3.07 | 22;244 | 2.85 | 81;139 | 2.34 |
| 275;364 | 12.23 | 45;129 | 2.16 | 64;351 | 2.25 | 247;313 | 3.07 | 62;88 | 2.85 | 160;307 | 2.34 |
| 275;361 | 12.23 | 99;138 | 2.16 | 166;195 | 2.25 | 244;247 | 3.07 | 67;316 | 2.85 | 253;293 | 2.34 |
| 275;362 | 12.23 | 184;201 | 2.16 | 66:79 | 2.25 | 169;227 | 3.07 | 85:88 | 2.85 | 253;326 | 2.34 |
| 7;275 | 12.23 | 119;306 | 2.16 | 176;209 | 2.25 | 195;227 | 3.07 | 92;183 | 2.85 | 30;312 | 2.34 |
| 167;275 | 12.23 | 76;119 | 2.16 | 254;315 | 2.25 | 229;254 | 3.07 | 184;272 | 2.85 | 199;351 | 2.34 |
| 159;275 | 12.23 | 184;224 | 2.16 | 211;355 | 2.25 | 129;251 | 3.07 | 94;96 | 2.85 | 173;307 | 2.34 |
| 275;363 | 12.23 | 13;74 | 2.16 | 65;324 | 2.25 | 248;255 | 3.07 | 65;93 | 2.85 | 187;308 | 2.34 |
| 56;275 | 12.23 | 76;120 | 2.16 | 256;351 | 2.25 | 154;248 | 3.07 | 80;161 | 2.85 | 187;306 | 2.34 |
| 186;275 | 12.23 | 119;294 | 2.16 | 223;254 | 2.25 | 167;254 | 3.07 | 80;117 | 2.85 | 254;293 | 2.34 |
| 37;214 | 12.23 | 99;155 | 2.16 | 166;185 | 2.25 | 26;274 | 3.07 | 129;364 | 2.85 | 187;297 | 2.34 |
| 37;215 | 12.23 | 99;119 | 2.16 | 292;331 | 2.25 | 153;202 | 3.07 | 91;149 | 2.85 | 187;293 | 2.34 |
| 31;275 | 12.23 | 99;118 | 2.16 | 166;168 | 2.25 | 111;302 | 3.07 | 80;183 | 2.85 | 215;327 | 2.34 |
| 37;216 | 12.23 | 13;120 | 2.16 | 229;254 | 2.25 | 152;351 | 3.07 | 31;334 | 2.85 | 13;327 | 2.34 |
| 20;275 | 12.23 | 13;119 | 2.16 | 222;353 | 2.25 | 152;254 | 3.07 | 20;274 | 2.85 | 13;312 | 2.34 |
| 181;275 | 12.23 | 85;176 | 2.16 | 222;355 | 2.25 | 152;248 | 3.07 | 13;274 | 2.85 | 210;246 | 2.34 |
| 37;218 | 12.23 | 24;128 | 2.16 | 146;254 | 2.25 | 152;247 | 3.07 | 96;129 | 2.85 | 183;307 | 2.34 |
| 275;318 | 12.23 | 110;147 | 2.16 | 61;254 | 2.25 | 203;252 | 3.07 | 94;134 | 2.85 | 65;327 | 2.34 |
| 269;275 | 12.23 | 110;146 | 2.16 | 73;251 | 2.25 | 247;253 | 3.07 | 19;334 | 2.85 | 254;321 | 2.34 |
| 162;275 | 12.23 | 45;142 | 2.16 | 253;294 | 2.25 | 247;255 | 3.07 | 79;336 | 2.85 | 215;307 | 2.34 |
| 275;316 | 12.23 | 110;142 | 2.16 | 70;351 | 2.25 | 127;239 | 3.07 | 96;111 | 2.85 | 161;327 | 2.34 |
| 176;275 | 12.23 | 45;147 | 2.16 | 223;296 | 2.25 | 111;255 | 3.07 | 79;284 | 2.85 | 66;68 | 2.34 |
| 275;335 | 12.23 | 45;146 | 2.16 | 309;355 | 2.25 | 17;253 | 3.07 | 236;316 | 2.85 | 81;132 | 2.34 |
| 275;315 | 12.23 | 45;143 | 2.16 | 292;353 | 2.25 | 18;195 | 3.07 | 90;272 | 2.85 | 81;143 | 2.34 |
| 37;212 | 12.23 | 99;114 | 2.16 | 292;355 | 2.25 | 15;254 | 3.07 | 80;88 | 2.85 | 121;307 | 2.34 |
| 197;275 | 12.23 | 99;117 | 2.16 | 66;177 | 2.25 | 43;250 | 3.07 | 80;94 | 2.85 | 36;312 | 2.34 |
| 275;324 | 12.23 | 64;112 | 2.16 | 166;215 | 2.25 | 30;94 | 3.07 | 80;90 | 2.85 | 233;326 | 2.34 |
| 187;275 | 12.23 | 110;184 | 2.16 | 111;253 | 2.25 | 228;237 | 3.07 | 5;272 | 2.85 | 31;310 | 2.34 |
| 275;330 | 12.23 | 64;128 | 2.16 | 68;222 | 2.25 | 151;190 | 3.07 | 80;339 | 2.85 | 36;226 | 2.34 |
| 37;201 | 12.23 | 75;119 | 2.16 | 94;209 | 2.25 | 177;202 | 3.07 | 315;334 | 2.85 | 139;327 | 2.34 |
| 102;275 | 12.23 | 57;99 | 2.16 | 292;352 | 2.25 | 203;227 | 3.07 | 274;307 | 2.85 | 36;228 | 2.34 |
| 275;333 | 12.23 | 75;120 | 2.16 | 166;209 | 2.25 | 227;361 | 3.07 | 274;308 | 2.85 | 63;242 | 2.34 |
| 85;275 | 12.23 | 180;182 | 2.16 | 65:68 | 2.25 | 249;302 | 3.07 | 12;316 | 2.85 | 63;295 | 2.34 |
| 237;275 | 12.23 | 180;184 | 2.16 | 166;205 | 2.25 | 151;167 | 3.07 | 12;334 | 2.85 | 63;297 | 2.34 |
| 275;331 | 12.23 | 180;185 | 2.16 | 25;253 | 2.25 | 121;255 | 3.07 | 71;88 | 2.85 | 183;228 | 2.34 |
| 275;321 | 12.23 | 122;128 | 2.16 | 25;254 | 2.25 | 121;253 | 3.07 | 80;364 | 2.85 | 106;327 | 2.34 |
| 275;320 | 12.23 | 57;119 | 2.16 | 66;186 | 2.25 | 248;302 | 3.07 | 268;274 | 2.85 | 122;243 | 2.34 |
| 75;275 | 12.23 | 57;120 | 2.16 | 318;319 | 2.25 | 151;254 | 3.07 | 117;272 | 2.85 | 81;225 | 2.34 |
| 157;275 | 12.23 | 32;184 | 2.16 | 200;351 | 2.25 | 151;247 | 3.07 | 93;334 | 2.85 | 122;253 | 2.34 |
| 127;275 | 12.23 | 9;128 | 2.16 | 127;256 | 2.25 | 151;241 | 3.07 | 12;272 | 2.85 | 106;307 | 2.34 |
| 275;336 | 12.23 | 75;143 | 2.16 | 254;291 | 2.25 | 41;225 | 3.07 | 284;362 | 2.85 | 194;293 | 2.34 |
| 130;275 | 12.23 | 57;143 | 2.16 | 12;66 | 2.25 | 30;198 | 3.07 | 81;88 | 2.85 | 14;256 | 2.34 |
| 275;298 | 12.23 | 7;156 | 2.16 | 200;256 | 2.25 | 30;353 | 3.07 | 236;272 | 2.85 | 134;297 | 2.34 |

| PDE1C_ACSM3 positive | | | | | | | | Retinal progenitors and | | SATB2_LRRC7 positive | |
|---|---|---|---|---|---|---|---|---|---|---|---|
| cells | | Parietal and chief cells | | Photoreceptor cells | | Retinal pigment cells | | Muller glia | | cells | |
| Clusters | Score | Clusters | Score | Clusters | Score | Clusters | Score | Clusters | Score | Clusters | Score |
| 117;201 | 6.19 | 43;323 | 3.30 | 267;321 | 4.13 | 254;310 | 3.36 | 247;326 | 6.40 | 217;266 | 4.39 |
| 24;117 | 6.19 | 133;169 | 2.16 | 14:51 | 2.96 | 49;210 | 3.36 | 247;297 | 6.40 | 95;256 | 4.39 |
| 78;119 | 6.19 | 95;184 | 2.16 | 140;194 | 2.96 | 49;180 | 3.36 | 247;292 | 6.40 | 179;291 | 4.39 |
| 43;117 | 6.19 | 43;316 | 2.16 | 130;267 | 2.96 | 3;49 | 2.50 | 247;318 | 5.19 | 26;168 | 3.31 |
| 43;118 | 5.02 | 81;333 | 2.16 | 99;329 | 2.96 | 196;246 | 2.50 | 247;311 | 5.19 | 96;311 | 3.31 |
| 43;119 | 5.02 | 43;322 | 2.16 | 99;359 | 2.96 | 239;331 | 2.50 | 36;247 | 5.19 | 95;296 | 3.31 |
| 117;340 | 5.02 | 105;133 | 2.16 | 99;354 | 2.96 | 54;324 | 2.50 | 247;325 | 5.19 | 124;244 | 3.31 |
| 41;119 | 5.02 | 133;170 | 2.16 | 144;303 | 2.96 | 53;167 | 2.50 | 56;247 | 5.19 | 26;217 | 3.31 |
| 119;133 | 5.02 | 170;249 | 2.16 | 218;323 | 2.96 | 206;254 | 2.50 | 181;247 | 5.19 | 124;243 | 3.31 |
| 136;150 | 5.02 | 184;191 | 2.16 | 140;267 | 2.96 | 49;196 | 2.50 | 242;247 | 5.19 | 153;295 | 3.31 |
| 117;336 | 5.02 | 133;336 | 2.16 | 140;268 | 2.96 | 7;54 | 2.50 | 56;242 | 5.19 | 95;242 | 3.31 |
| 66;120 | 5.02 | 95;310 | 2.16 | 171;326 | 2.96 | 37;167 | 2.50 | 247;324 | 5.19 | 217;226 | 3.31 |
| 117;204 | 5.02 | 159;191 | 2.16 | 99;311 | 2.96 | 52;254 | 2.50 | 247;315 | 5.19 | 96;243 | 3.31 |
| 43;132 | 5.02 | 43;355 | 2.16 | 140;218 | 2.96 | 245;254 | 2.50 | 183;247 | 5.19 | 95;211 | 3.31 |
| 60;120 | 5.02 | 43;97 | 2.16 | 140;242 | 2.96 | 147;310 | 2.50 | 66;247 | 5.19 | 26;183 | 3.31 |
| 74;113 | 5.02 | 131;307 | 2.16 | 224;359 | 2.96 | 49;147 | 2.50 | 35;247 | 5.19 | 26;182 | 3.31 |
| 18;117 | 5.02 | 43;308 | 2.16 | 267;364 | 2.96 | 49;149 | 2.50 | 247;288 | 5.19 | 26;179 | 3.31 |
| 74;150 | 5.02 | 131;308 | 2.16 | 267;355 | 2.96 | 104;254 | 2.50 | 247;321 | 5.19 | 226;330 | 3.31 |
| 117;131 | 5.02 | 60;131 | 2.16 | 267;326 | 2.96 | 10;331 | 2.50 | 245;247 | 5.19 | 243;344 | 3.31 |
| 43;320 | 5.02 | 53;96 | 2.16 | 322;326 | 2.96 | 49;364 | 2.50 | 243;247 | 5.19 | 56;95 | 3.31 |
| 117;360 | 5.02 | 43;95 | 2.16 | 81;329 | 2.96 | 49;363 | 2.50 | 247;295 | 5.19 | 96;242 | 3.31 |
| 69;120 | 5.02 | 310;322 | 2.16 | 98;267 | 2.96 | 49;171 | 2.50 | 247;296 | 5.19 | 124;281 | 3.31 |
| 113;157 | 5.02 | 310;323 | 2.16 | 36;323 | 2.96 | 49;197 | 2.50 | 237;247 | 4.08 | 34;311 | 3.31 |
| 117;169 | 5.02 | 60;170 | 2.16 | 291;326 | 2.96 | 259;318 | 2.50 | 247;255 | 4.08 | 19;243 | 3.31 |
| 43;85 | 5.02 | 95;105 | 2.16 | 130;194 | 2.96 | 150;254 | 2.50 | 44;226 | 4.08 | 66;243 | 3.31 |
| 117;170 | 5.02 | 97;159 | 2.16 | 182;326 | 2.96 | 254;364 | 2.50 | 247;363 | 4.08 | 26;69 | 3.31 |
| 117;171 | 5.02 | 9;95 | 2.16 | 195;326 | 2.96 | 153;201 | 2.50 | 62;247 | 4.08 | 96;256 | 3.31 |
| 45;117 | 5.02 | 95;364 | 2.16 | 13;140 | 2.96 | 152;364 | 2.50 | 226;228 | 4.08 | 69;243 | 3.31 |
| 117;237 | 5.02 | 301;332 | 1.21 | 113;329 | 2.96 | 92;254 | 2.50 | 247;364 | 4.08 | 91;217 | 3.31 |
| 119;322 | 5.02 | 61;170 | 1.21 | 99;242 | 2.96 | 50;339 | 2.50 | 180;247 | 4.08 | 74;296 | 3.31 |
| 117;186 | 5.02 | 301;330 | 1.21 | 167;326 | 2.96 | 29;259 | 2.50 | 168;247 | 4.08 | 26;309 | 3.31 |
| 117;183 | 5.02 | 43;197 | 1.21 | 113;253 | 2.96 | 152;254 | 2.50 | 244;247 | 4.08 | 243;280 | 3.31 |
| 74;186 | 5.02 | 301;333 | 1.21 | 99;218 | 2.96 | 53;254 | 2.50 | 247;253 | 4.08 | 243;281 | 3.31 |
| 120;270 | 5.02 | 43;248 | 1.21 | 99;267 | 2.96 | 223;259 | 2.50 | 178;247 | 4.08 | 226;281 | 3.31 |
| 117;316 | 5.02 | 303;314 | 1.21 | 140;329 | 2.96 | 29;254 | 2.50 | 173;247 | 4.08 | 69;256 | 3.31 |
| 117;210 | 5.02 | 301;314 | 1.21 | 132;326 | 2.96 | 18;269 | 2.50 | 111;247 | 4.08 | 111;354 | 2.34 |
| 117;216 | 5.02 | 301;312 | 1.21 | 33;253 | 2.96 | 172;364 | 2.50 | 233;242 | 4.08 | 30;96 | 2.34 |
| 117;269 | 5.02 | 301;310 | 1.21 | 140;291 | 2.96 | 23;209 | 2.50 | 222;247 | 4.08 | 143;253 | 2.34 |
| 119;190 | 5.02 | 43;251 | 1.21 | 140;296 | 2.96 | 54;365 | 2.50 | 188;195 | 4.08 | 176;256 | 2.34 |
| 116;248 | 5.02 | 301;328 | 1.21 | 99;253 | 2.96 | 49;215 | 2.50 | 228;247 | 4.08 | 244;280 | 2.34 |
| 117;206 | 5.02 | 43;250 | 1.21 | 96;329 | 1.93 | 49;216 | 2.50 | 111;226 | 4.08 | 111;358 | 2.34 |
| 119;325 | 3.94 | 7;95 | 1.21 | 307;329 | 1.93 | 53;214 | 2.50 | 228;246 | 4.08 | 41;281 | 2.34 |
| 91;120 | 3.94 | 7:96 | 1.21 | 141;329 | 1.93 | 121;201 | 2.50 | 247;256 | 4.08 | 219;243 | 2.34 |
| 9;119 | 3.94 | 131;302 | 1.21 | 121;311 | 1.93 | 49;310 | 2.50 | 30;247 | 4.08 | 143;256 | 2.34 |
| 120;365 | 3.94 | 302;310 | 1.21 | 76;310 | 1.93 | 254;324 | 2.50 | 150;247 | 4.08 | 244;290 | 2.34 |
| 119;189 | 3.94 | 302;335 | 1.21 | 76;307 | 1.93 | 49;240 | 2.50 | 66;246 | 4.08 | 30;57 | 2.34 |
| 119;309 | 3.94 | 302;333 | 1.21 | 122;218 | 1.93 | 231;331 | 2.50 | 172;247 | 4.08 | 30;59 | 2.34 |
| 118;136 | 3.94 | 302;312 | 1.21 | 62;355 | 1.93 | 167;246 | 2.50 | 71;247 | 4.08 | 4;65 | 2.34 |
| 94;120 | 3.94 | 302;330 | 1.21 | 76;311 | 1.93 | 103;254 | 2.50 | 214;233 | 4.08 | 281;344 | 2.34 |
| 94;119 | 3.94 | 302;314 | 1.21 | 97;310 | 1.93 | 42;254 | 2.50 | 36;228 | 4.08 | 30:66 | 2.34 |
| 119;336 | 3.94 | 43;225 | 1.21 | 120;330 | 1.93 | 49;106 | 2.50 | 247;287 | 4.08 | 188;216 | 2.34 |
| 118;146 | 3.94 | 43;224 | 1.21 | 120;329 | 1.93 | 195;254 | 2.50 | 66;233 | 4.08 | 66;355 | 2.34 |
| 119;321 | 3.94 | 302;316 | 1.21 | 120;311 | 1.93 | 201;365 | 2.50 | 30;313 | 4.08 | 177;244 | 2.34 |
| 119;195 | 3.94 | 302;342 | 1.21 | 75;313 | 1.93 | 167;259 | 2.50 | 30;355 | 4.08 | 26:43 | 2.34 |
| 119;320 | 3.94 | 302;364 | 1.21 | 227;303 | 1.93 | 12;254 | 2.50 | 247;294 | 4.08 | 121;281 | 2.34 |
| 9;117 | 3.94 | 43;211 | 1.21 | 216;267 | 1.93 | 103;310 | 2.50 | 213;355 | 4.08 | 247;309 | 2.34 |
| 9;120 | 3.94 | 302;356 | 1.21 | 224;355 | 1.93 | 10;254 | 2.50 | 226;242 | 4.08 | 26:55 | 2.34 |
| 118;144 | 3.94 | 43;212 | 1.21 | 185;303 | 1.93 | 54;154 | 2.50 | 195;213 | 4.08 | 247;311 | 2.34 |
| 53;120 | 3.94 | 43;222 | 1.21 | 185;321 | 1.93 | 9;147 | 2.50 | 103;247 | 4.08 | 26;59 | 2.34 |
| 119;194 | 3.94 | 148;170 | 1.21 | 185;324 | 1.93 | 203;254 | 2.50 | 144;247 | 4.08 | 26;67 | 2.34 |
| 118;129 | 3.94 | 87;170 | 1.21 | 185;326 | 1.93 | 5;331 | 2.50 | 188;241 | 4.08 | 244;355 | 2.34 |
| 118;172 | 3.94 | 298;330 | 1.21 | 195;267 | 1.93 | 9;254 | 1.73 | 217;247 | 4.08 | 213;217 | 2.34 |
| 119;184 | 3.94 | 131;231 | 1.21 | 185;241 | 1.93 | 303;331 | 1.73 | 203;247 | 4.08 | 177;243 | 2.34 |
| 119;361 | 3.94 | 43;147 | 1.21 | 308;329 | 1.93 | 53;201 | 1.73 | 30;96 | 4.08 | 121;296 | 2.34 |
| 119;362 | 3.94 | 81;184 | 1.21 | 97;329 | 1.93 | 62;65 | 1.73 | 172;246 | 4.08 | 143;311 | 2.34 |
| 119;363 | 3.94 | 298;310 | 1.21 | 62;253 | 1.93 | 53;209 | 1.73 | 65;247 | 4.08 | 212;265 | 2.34 |
| 119;364 | 3.94 | 7:326 | 1.21 | 218;340 | 1.93 | 38;329 | 1.73 | 212;247 | 4.08 | 29;256 | 2.34 |
| 15;120 | 3.94 | 60;208 | 1.21 | 97;267 | 1.93 | 151;254 | 1.73 | 247;350 | 4.08 | 108;243 | 2.34 |
| 120;121 | 3.94 | 60;206 | 1.21 | 194;224 | 1.93 | 150;355 | 1.73 | 176;247 | 4.08 | 15;296 | 2.34 |
| 120;122 | 3.94 | 60;201 | 1.21 | 125;303 | 1.93 | 147;229 | 1.73 | 131;247 | 4.08 | 55;96 | 2.34 |
| 86;118 | 3.94 | 60;196 | 1.21 | 218;326 | 1.93 | 53;182 | 1.73 | 220;247 | 4.08 | 189;344 | 2.34 |
| 120;125 | 3.94 | 131;212 | 1.21 | 125;324 | 1.93 | 113;196 | 1.73 | 42;247 | 4.08 | 114;344 | 2.34 |
| 120;126 | 3.94 | 60;224 | 1.21 | 142;218 | 1.93 | 90;269 | 1.73 | 30;310 | 4.08 | 243;312 | 2.34 |
| 120;127 | 3.94 | 148;314 | 1.21 | 97;261 | 1.93 | 50;254 | 1.73 | 239;247 | 4.08 | 59;281 | 2.34 |
| 118;135 | 3.94 | 206;302 | 1.21 | 125;327 | 1.93 | 178;201 | 1.73 | 151;247 | 4.08 | 114;281 | 2.34 |
| 43;157 | 3.94 | 36;326 | 1.21 | 303;307 | 1.93 | 178;180 | 1.73 | 173;246 | 4.08 | 182;291 | 2.34 |
| 119;339 | 3.94 | 131;258 | 1.21 | 303;310 | 1.93 | 11;331 | 1.73 | 187;247 | 4.08 | 171;217 | 2.34 |
| 94;118 | 3.94 | 43;170 | 1.21 | 97;218 | 1.93 | 46;254 | 1.73 | 218;247 | 4.08 | 182;292 | 2.34 |
| 67;120 | 3.94 | 43;167 | 1.21 | 125;140 | 1.93 | 150;331 | 1.73 | 247;310 | 4.08 | 182;294 | 2.34 |
| 67;119 | 3.94 | 131;251 | 1.21 | 143;311 | 1.93 | 113;201 | 1.73 | 247;309 | 4.08 | 124;242 | 2.34 |
| 69;116 | 3.94 | 131;250 | 1.21 | 218;362 | 1.93 | 150;321 | 1.73 | 247;269 | 4.08 | 153;243 | 2.34 |
| 119;186 | 3.94 | 300;312 | 1.21 | 218;360 | 1.93 | 210;254 | 1.73 | 247;308 | 4.08 | 59;312 | 2.34 |
| 118;168 | 3.94 | 300;333 | 1.21 | 218;241 | 1.93 | 29;290 | 1.73 | 154;247 | 4.08 | 153;255 | 2.34 |
| 15;119 | 3.94 | 300;310 | 1.21 | 142;355 | 1.93 | 145;364 | 1.73 | 247;355 | 4.08 | 243;331 | 2.34 |
| 119;185 | 3.94 | 43;175 | 1.21 | 142;354 | 1.93 | 46;201 | 1.73 | 247;351 | 4.08 | 59;332 | 2.34 |
| 69;119 | 3.94 | 43;191 | 1.21 | 218;310 | 1.93 | 29;306 | 1.73 | 58;247 | 4.08 | 206;217 | 2.34 |
| 118;132 | 3.94 | 43;160 | 1.21 | 218;308 | 1.93 | 29;307 | 1.73 | 143;256 | 4.08 | 74;256 | 2.34 |
| 118;131 | 3.94 | 60;335 | 1.21 | 142;310 | 1.93 | 177;254 | 1.73 | 246;247 | 4.08 | 243;308 | 2.34 |
| 85;120 | 3.94 | 60;333 | 1.21 | 142;311 | 1.93 | 195;197 | 1.73 | 231;247 | 4.08 | 59;256 | 2.34 |
| 91;119 | 3.94 | 60;330 | 1.21 | 142;322 | 1.93 | 29;257 | 1.73 | 210;247 | 4.08 | 89;95 | 2.34 |
| 68;119 | 3.94 | 43;156 | 1.21 | 218;314 | 1.93 | 195;201 | 1.73 | 112;247 | 4.08 | 182;266 | 2.34 |
| 106;120 | 3.94 | 60;316 | 1.21 | 303;329 | 1.93 | 241;318 | 1.73 | 211;247 | 4.08 | 43;255 | 2.34 |
| 106;119 | 3.94 | 43;150 | 1.21 | 142;356 | 1.93 | 66;230 | 1.73 | 233;310 | 4.08 | 243;290 | 2.34 |
| 157;269 | 3.94 | 153;170 | 1.21 | 143;330 | 1.93 | 269;365 | 1.73 | 189;247 | 4.08 | 43;244 | 2.34 |
| 119;241 | 3.94 | 43;162 | 1.21 | 307;317 | 1.93 | 177;201 | 1.73 | 70;249 | 4.08 | 43;243 | 2.34 |
| 120;355 | 3.94 | 60;358 | 1.21 | 194;326 | 1.93 | 62;172 | 1.73 | 247;352 | 4.08 | 243;293 | 2.34 |
| 118;158 | 3.94 | 131;249 | 1.21 | 144;355 | 1.93 | 62;103 | 1.73 | 233;247 | 4.08 | 59;226 | 2.34 |
| 118;157 | 3.94 | 60;356 | 1.21 | 144;333 | 1.93 | 29;356 | 1.73 | 63;247 | 4.08 | 135;311 | 2.34 |
| 120;348 | 3.94 | 131;248 | 1.21 | 144;331 | 1.93 | 62;87 | 1.73 | 98;247 | 4.08 | 243;295 | 2.34 |
| 117;119 | 3.94 | 303;328 | 1.21 | 144;330 | 1.93 | 46;223 | 1.73 | 207;247 | 4.08 | 220;344 | 2.34 |

| SKOR2_NPSR1 positive | | STC2_TLX1 positive | | | | | | | | | |
|---|---|---|---|---|---|---|---|---|---|---|---|
| cells | | cells | | Satellite cells | | Schwann cells | | Skeletal muscle cells | | Smooth muscle cells | |
| Clusters | Score | Clusters | Score | Clusters | Score | Clusters | Score | Clusters | Score | Clusters | Score |
| 104;294 | 3.12 | 350;361 | 6.00 | 208;348 | 6.62 | 207;282 | 8.66 | 132;253 | 7.01 | 300;334 | 10.50 |
| 113;310 | 3.12 | 215;358 | 6.00 | 346;348 | 6.62 | 171;348 | 8.66 | 188;253 | 7.01 | 301;349 | 9.30 |
| 113;244 | 3.12 | 358;360 | 6.00 | 212;347 | 5.49 | 282;348 | 8.66 | 131;253 | 7.01 | 300;345 | 9.30 |
| 201;294 | 2.04 | 295;345 | 4.86 | 346;360 | 5.49 | 210;304 | 7.43 | 25;253 | 7.01 | 179;300 | 9.30 |
| 167;294 | 2.04 | 350;358 | 4.86 | 169;345 | 5.49 | 298;348 | 7.43 | 230;254 | 7.01 | 301;345 | 9.30 |
| 104;113 | 2.04 | 295;358 | 4.86 | 185;347 | 5.49 | 192;330 | 7.43 | 184;253 | 5.82 | 299;339 | 9.30 |
| 37;159 | 2.04 | 298;345 | 4.86 | 151;347 | 5.49 | 348;359 | 7.43 | 184;254 | 5.82 | 282;300 | 9.30 |
| 1;312 | 2.04 | 345;353 | 4.86 | 167;345 | 5.49 | 210;358 | 7.43 | 253;309 | 5.82 | 300;340 | 9.30 |
| 10;350 | 2.04 | 150;345 | 4.86 | 346;359 | 5.49 | 9;358 | 7.43 | 206;298 | 5.82 | 300;339 | 8.16 |
| 92;311 | 2.04 | 242;345 | 4.86 | 158;330 | 5.49 | 348;364 | 7.43 | 206;253 | 5.82 | 300;347 | 8.16 |
| 159;294 | 2.04 | 294;345 | 4.86 | 43;347 | 5.49 | 194;348 | 7.43 | 230;253 | 5.82 | 300;348 | 8.16 |
| 92;294 | 2.04 | 184;345 | 4.86 | 194;348 | 5.49 | 210;356 | 7.43 | 147;253 | 5.82 | 300;337 | 8.16 |
| 174;250 | 2.04 | 170;345 | 4.86 | 220;347 | 5.49 | 11;282 | 7.43 | 253;355 | 5.82 | 56;345 | 8.16 |
| 246;350 | 2.04 | 210;358 | 4.86 | 158;347 | 5.49 | 229;348 | 7.43 | 195;253 | 5.82 | 300;361 | 8.16 |
| 225;350 | 2.04 | 302;360 | 4.86 | 165;345 | 5.49 | 360;363 | 7.43 | 253;363 | 5.82 | 281;345 | 8.16 |
| 201;258 | 2.04 | 309;358 | 4.86 | 316;347 | 5.49 | 207;356 | 7.43 | 190;254 | 5.82 | 301;337 | 8.16 |
| 131;291 | 2.04 | 336;344 | 4.86 | 207;347 | 5.49 | 208;348 | 7.43 | 213;298 | 5.82 | 186;300 | 8.16 |
| 97;244 | 2.04 | 336;345 | 4.86 | 170;348 | 5.49 | 4;356 | 7.43 | 20;253 | 5.82 | 322;345 | 8.16 |
| 131;294 | 2.04 | 358;359 | 4.86 | 182;347 | 5.49 | 9;348 | 7.43 | 188;254 | 5.82 | 207;299 | 8.16 |
| 257;311 | 2.04 | 315;358 | 4.86 | 214;360 | 5.49 | 214;348 | 7.43 | 106;254 | 5.82 | 281;344 | 8.16 |
| 131;270 | 2.04 | 360;361 | 4.86 | 175;347 | 5.49 | 171;282 | 7.43 | 208;253 | 5.82 | 346;364 | 8.16 |
| 107;244 | 2.04 | 338;344 | 4.86 | 252;337 | 5.49 | 167;282 | 7.43 | 149;253 | 5.82 | 54;345 | 8.16 |
| 159;245 | 2.04 | 252;345 | 4.86 | 253;347 | 5.49 | 216;282 | 7.43 | 135;253 | 5.82 | 185;300 | 8.16 |
| 230;312 | 2.04 | 353;358 | 4.86 | 336;346 | 5.49 | 11;348 | 7.43 | 202;254 | 5.82 | 52;345 | 8.16 |
| 95;293 | 2.04 | 167;358 | 4.86 | 254;347 | 5.49 | 346;360 | 7.43 | 234;253 | 5.82 | 299;345 | 8.16 |
| 230;311 | 2.04 | 170;344 | 3.81 | 177;347 | 5.49 | 224;336 | 6.28 | 234;254 | 5.82 | 299;347 | 8.16 |
| 106;310 | 2.04 | 151;282 | 3.81 | 42;345 | 5.49 | 224;337 | 6.28 | 18;253 | 5.82 | 299;348 | 8.16 |
| 86;291 | 2.04 | 196;345 | 3.81 | 171;348 | 5.49 | 11;345 | 6.28 | 237;253 | 5.82 | 331;345 | 8.16 |
| 95;256 | 2.04 | 170;347 | 3.81 | 242;348 | 5.49 | 282;355 | 6.28 | 165;254 | 5.82 | 299;360 | 8.16 |
| 16;294 | 2.04 | 278;348 | 3.81 | 178;347 | 5.49 | 198;356 | 6.28 | 60;253 | 5.82 | 116;345 | 8.16 |
| 275;312 | 2.04 | 278;347 | 3.81 | 339;347 | 5.49 | 295;348 | 6.28 | 171;253 | 5.82 | 300;302 | 8.16 |
| 10;250 | 2.04 | 131;345 | 3.81 | 355;360 | 5.49 | 337;358 | 6.28 | 203;254 | 5.82 | 171;300 | 8.16 |
| 131;245 | 2.04 | 331;345 | 3.81 | 62;347 | 5.49 | 14;282 | 6.28 | 157;253 | 5.82 | 344;364 | 8.16 |
| 10;294 | 2.04 | 234;345 | 3.81 | 322;347 | 5.49 | 338;348 | 6.28 | 151;254 | 5.82 | 281;349 | 8.16 |
| 246;262 | 2.04 | 331;348 | 3.81 | 214;347 | 4.43 | 173;282 | 6.28 | 151;253 | 5.82 | 281;348 | 8.16 |
| 10;311 | 2.04 | 196;358 | 3.81 | 128;349 | 4.43 | 14;330 | 6.28 | 146;254 | 5.82 | 346;361 | 8.16 |
| 240;312 | 2.04 | 330;345 | 3.81 | 171;347 | 4.43 | 171;358 | 6.28 | 46;253 | 5.82 | 277;339 | 8.16 |
| 10;312 | 2.04 | 278;358 | 3.81 | 171;346 | 4.43 | 304;336 | 6.28 | 103;298 | 5.82 | 210;300 | 8.16 |
| 99;159 | 2.04 | 337;350 | 3.81 | 171;345 | 4.43 | 188;360 | 6.28 | 25;298 | 5.82 | 280;345 | 8.16 |
| 10;262 | 2.04 | 330;358 | 3.81 | 360;362 | 4.43 | 16;356 | 6.28 | 206;254 | 4.71 | 90;345 | 8.16 |
| 92;262 | 2.04 | 278;345 | 3.81 | 242;347 | 4.43 | 350;359 | 6.28 | 19;253 | 4.71 | 321;344 | 8.16 |
| 107;293 | 2.04 | 331;358 | 3.81 | 345;346 | 4.43 | 171;304 | 6.28 | 254;316 | 4.71 | 64;300 | 8.16 |
| 160;230 | 2.04 | 214;358 | 3.81 | 338;346 | 4.43 | 304;357 | 6.28 | 205;298 | 4.71 | 227;345 | 8.16 |
| 144;294 | 2.04 | 111;345 | 3.81 | 242;345 | 4.43 | 282;340 | 6.28 | 18;254 | 4.71 | 281;350 | 7.07 |
| 21;201 | 2.04 | 19;345 | 3.81 | 360;361 | 4.43 | 228;282 | 6.28 | 254;282 | 4.71 | 344;356 | 7.07 |
| 159;312 | 2.04 | 171;345 | 3.81 | 241;347 | 4.43 | 227;337 | 6.28 | 18;298 | 4.71 | 300;309 | 7.07 |
| 269;294 | 2.04 | 270;348 | 3.81 | 72;345 | 4.43 | 171;350 | 6.28 | 254;309 | 4.71 | 344;347 | 7.07 |
| 291;310 | 2.04 | 171;347 | 3.81 | 87;347 | 4.43 | 209;359 | 6.28 | 202;253 | 4.71 | 198;300 | 7.07 |
| 42;293 | 2.04 | 171;358 | 3.81 | 68;347 | 4.43 | 348;360 | 6.28 | 88;253 | 4.71 | 41;347 | 7.07 |
| 269;312 | 2.04 | 215;345 | 3.81 | 226;345 | 4.43 | 348;357 | 6.28 | 254;302 | 4.71 | 250;349 | 7.07 |
| 185;294 | 2.04 | 299;345 | 3.81 | 338;360 | 4.43 | 348;356 | 6.28 | 298;352 | 4.71 | 31;347 | 7.07 |
| 160;293 | 2.04 | 214;348 | 3.81 | 330;346 | 4.43 | 194;358 | 6.28 | 1;253 | 4.71 | 214;300 | 7.07 |
| 208;294 | 2.04 | 214;347 | 3.81 | 338;361 | 4.43 | 204;358 | 6.28 | 1;254 | 4.71 | 149;345 | 7.07 |
| 144;199 | 2.04 | 135;345 | 3.81 | 296;346 | 4.43 | 209;348 | 6.28 | 1;255 | 4.71 | 89;300 | 7.07 |
| 199;256 | 2.04 | 298;348 | 3.81 | 30;330 | 4.43 | 12;282 | 6.28 | 205;254 | 4.71 | 29;345 | 7.07 |
| 113;159 | 2.04 | 116;345 | 3.81 | 166;347 | 4.43 | 209;356 | 6.28 | 26;165 | 4.71 | 9;345 | 7.07 |
| 209;294 | 2.04 | 214;345 | 3.81 | 347;363 | 4.43 | 282;359 | 6.28 | 26;188 | 4.71 | 320;346 | 7.07 |
| 209;262 | 2.04 | 178;345 | 3.81 | 347;361 | 4.43 | 282;363 | 6.28 | 26;190 | 4.71 | 201;300 | 7.07 |
| 105;258 | 2.04 | 270;345 | 3.81 | 347;360 | 4.43 | 331;337 | 6.28 | 242;253 | 4.71 | 117;345 | 7.07 |
| 141;312 | 2.04 | 321;344 | 3.81 | 347;355 | 4.43 | 146;282 | 6.28 | 25;254 | 4.71 | 120;345 | 7.07 |
| 32;312 | 2.04 | 208;345 | 3.81 | 347;350 | 4.43 | 220;350 | 6.28 | 237;298 | 4.71 | 117;344 | 7.07 |
| 86;294 | 2.04 | 208;358 | 3.81 | 347;349 | 4.43 | 196;348 | 6.28 | 165;255 | 4.71 | 56;281 | 7.07 |
| 104;312 | 2.04 | 321;345 | 3.81 | 347;348 | 4.43 | 167;360 | 6.28 | 237;254 | 4.71 | 283;344 | 7.07 |
| 176;230 | 2.04 | 321;358 | 3.81 | 194;346 | 4.43 | 203;304 | 6.28 | 165;253 | 4.71 | 156;344 | 7.07 |
| 279;312 | 2.04 | 76;360 | 3.81 | 346;364 | 4.43 | 196;360 | 6.28 | 2;165 | 4.71 | 180;344 | 7.07 |
| 225;311 | 2.04 | 50;345 | 3.81 | 295;345 | 4.43 | 291;336 | 6.28 | 157;254 | 4.71 | 281;346 | 7.07 |
| 262;310 | 2.04 | 167;345 | 3.81 | 222;347 | 4.43 | 167;356 | 6.28 | 210;253 | 4.71 | 55;345 | 7.07 |
| 250;312 | 2.04 | 311;345 | 3.81 | 360;364 | 4.43 | 167;350 | 6.28 | 213;253 | 4.71 | 281;347 | 7.07 |
| 250;311 | 2.04 | 205;345 | 3.81 | 346;356 | 4.43 | 178;356 | 6.28 | 253;352 | 4.71 | 281;361 | 7.07 |
| 262;316 | 2.04 | 315;344 | 3.81 | 346;355 | 4.43 | 203;282 | 6.28 | 213;254 | 4.71 | 225;345 | 7.07 |
| 104;311 | 2.04 | 315;345 | 3.81 | 193;348 | 4.43 | 253;348 | 6.28 | 167;254 | 4.71 | 344;361 | 7.07 |
| 225;312 | 2.04 | 146;345 | 3.81 | 193;347 | 4.43 | 214;282 | 6.28 | 167;253 | 4.71 | 22;345 | 7.07 |
| 124;172 | 1.13 | 309;345 | 3.81 | 337;349 | 4.43 | 166;359 | 6.28 | 214;254 | 4.71 | 134;345 | 7.07 |
| 244;326 | 1.13 | 318;345 | 3.81 | 346;349 | 4.43 | 214;360 | 6.28 | 216;253 | 4.71 | 296;345 | 7.07 |
| 113;208 | 1.13 | 13;347 | 3.81 | 346;347 | 4.43 | 215;356 | 6.28 | 1;298 | 4.71 | 345;364 | 7.07 |
| 162;293 | 1.13 | 13;345 | 3.81 | 309;347 | 4.43 | 168;282 | 6.28 | 25;26 | 4.71 | 72;344 | 7.07 |
| 113;209 | 1.13 | 210;348 | 3.81 | 244;345 | 4.43 | 340;345 | 6.28 | 254;330 | 4.71 | 300;321 | 7.07 |
| 113;230 | 1.13 | 210;361 | 3.81 | 329;344 | 4.43 | 195;282 | 6.28 | 222;253 | 4.71 | 346;348 | 7.07 |
| 91;167 | 1.13 | 96;345 | 3.81 | 345;360 | 4.43 | 4;282 | 6.28 | 156;253 | 4.71 | 17;345 | 7.07 |
| 113;172 | 1.13 | 210;347 | 3.81 | 297;345 | 4.43 | 210;347 | 6.28 | 1;196 | 4.71 | 214;344 | 7.07 |
| 185;350 | 1.13 | 210;345 | 3.81 | 339;346 | 4.43 | 278;348 | 6.28 | 129;253 | 4.71 | 278;347 | 7.07 |
| 113;240 | 1.13 | 322;360 | 3.81 | 150;347 | 4.43 | 150;345 | 6.28 | 254;363 | 4.71 | 189;347 | 7.07 |
| 124;239 | 1.13 | 264;345 | 3.81 | 70;347 | 4.43 | 330;336 | 6.28 | 194;253 | 4.71 | 320;344 | 7.07 |
| 244;270 | 1.13 | 51;345 | 3.81 | 185;360 | 4.43 | 210;348 | 6.28 | 195;254 | 4.71 | 207;281 | 7.07 |
| 11;312 | 1.13 | 149;345 | 3.81 | 157;347 | 4.43 | 330;337 | 6.28 | 1;66 | 4.71 | 139;345 | 7.07 |
| 11;311 | 1.13 | 104;345 | 3.81 | 340;347 | 4.43 | 278;336 | 6.28 | 126;253 | 4.71 | 53;345 | 7.07 |
| 67;293 | 1.13 | 345;350 | 3.81 | 213;347 | 4.43 | 210;360 | 6.28 | 106;253 | 4.71 | 315;346 | 7.07 |
| 244;279 | 1.13 | 345;354 | 3.81 | 43;345 | 4.43 | 330;348 | 6.28 | 135;254 | 4.71 | 318;345 | 7.07 |
| 67;294 | 1.13 | 345;359 | 3.81 | 184;347 | 4.43 | 173;358 | 6.28 | 164;254 | 4.71 | 136;345 | 7.07 |
| 113;201 | 1.13 | 345;360 | 3.81 | 67;347 | 4.43 | 202;282 | 6.28 | 11;254 | 4.71 | 315;345 | 7.07 |
| 124;179 | 1.13 | 91;345 | 3.81 | 347;364 | 4.43 | 16;282 | 6.28 | 11;253 | 4.71 | 72;300 | 7.07 |
| 124;296 | 1.13 | 128;345 | 3.81 | 170;346 | 4.43 | 222;336 | 6.28 | 149;254 | 4.71 | 331;348 | 7.07 |
| 124;198 | 1.13 | 282;358 | 3.81 | 213;360 | 4.43 | 168;348 | 6.28 | 131;254 | 4.71 | 105;345 | 7.07 |
| 124;196 | 1.13 | 183;358 | 3.81 | 169;346 | 4.43 | 211;337 | 6.28 | 169;253 | 4.71 | 228;345 | 7.07 |
| 124;218 | 1.13 | 346;360 | 3.81 | 170;345 | 4.43 | 166;282 | 6.28 | 190;253 | 4.71 | 145;345 | 7.07 |
| 124;194 | 1.13 | 282;348 | 3.81 | 70;330 | 4.43 | 221;337 | 6.28 | 147;254 | 4.71 | 171;344 | 7.07 |
| 67;313 | 1.13 | 282;346 | 3.81 | 169;348 | 4.43 | 240;348 | 6.28 | 190;255 | 4.71 | 282;344 | 7.07 |
| 124;201 | 1.13 | 129;282 | 3.81 | 341;347 | 4.43 | 14;347 | 6.28 | 107;253 | 4.71 | 316;345 | 7.07 |
| 186;293 | 1.13 | 185;358 | 3.81 | 43;348 | 4.43 | 13;348 | 6.28 | 174;253 | 4.71 | 74;345 | 7.07 |
| 124;208 | 1.13 | 185;348 | 3.81 | 67;345 | 4.43 | 296;348 | 6.28 | 172;254 | 4.71 | 277;348 | 7.07 |

| Squamous epithelial | | | | | | | | | | | |
|---|---|---|---|---|---|---|---|---|---|---|---|
| cells | | Stellate cells | | Stromal cells | | Sympathoblasts | | Trophoblast giant cells | | Unipolar brush cells | |
| Clusters | Score | Clusters | Score | Clusters | Score | Clusters | Score | Clusters | Score | Clusters | Score |
| 77;273 | 6.03 | 301;339 | 7.22 | 299;345 | 9.99 | 251;260 | 3.60 | 175;273 | 5.79 | 64;249 | 5.18 |
| 161;273 | 6.03 | 144;301 | 7.22 | 152;299 | 9.99 | 193;254 | 3.60 | 60;81 | 5.79 | 27;173 | 5.18 |
| 273;325 | 6.03 | 10;301 | 7.22 | 176;299 | 9.99 | 254;315 | 3.60 | 214;273 | 5.79 | 65;248 | 4.25 |
| 70;273 | 6.03 | 133;301 | 7.22 | 178;299 | 9.99 | 251;297 | 3.60 | 60;79 | 5.79 | 3;292 | 4.25 |
| 221;273 | 6.03 | 263;301 | 7.22 | 72;299 | 9.99 | 169;254 | 3.60 | 152;273 | 5.79 | 3;336 | 4.25 |
| 273;336 | 6.03 | 289;301 | 7.22 | 188;299 | 9.00 | 70;251 | 3.60 | 128;273 | 5.79 | 173;249 | 4.25 |
| 9;273 | 6.03 | 277;286 | 7.22 | 300;315 | 9.00 | 238;254 | 3.60 | 80;156 | 5.79 | 4;247 | 4.25 |
| 71;273 | 6.03 | 126;301 | 7.22 | 299;331 | 9.00 | 84;254 | 3.60 | 76;273 | 5.79 | 5;65 | 4.25 |
| 14;273 | 6.03 | 290;301 | 6.17 | 159;299 | 9.00 | 251;350 | 2.56 | 60;273 | 5.79 | 193;249 | 4.25 |
| 164;273 | 6.03 | 145;301 | 6.17 | 207;299 | 9.00 | 251;356 | 2.56 | 146;273 | 5.79 | 124;219 | 4.25 |
| 183;273 | 6.03 | 24;301 | 6.17 | 299;347 | 9.00 | 151;251 | 2.56 | 273;360 | 5.79 | 4;292 | 4.25 |
| 129;273 | 6.03 | 281;302 | 6.17 | 303;304 | 9.00 | 131;251 | 2.56 | 93;156 | 5.79 | 27;67 | 4.25 |
| 150;273 | 6.03 | 186;287 | 6.17 | 185;299 | 9.00 | 211;251 | 2.56 | 169;273 | 5.79 | 52;248 | 4.25 |
| 80;282 | 6.03 | 120;301 | 6.17 | 153;299 | 9.00 | 251;357 | 2.56 | 11;273 | 5.79 | 27;152 | 3.40 |
| 170;273 | 6.03 | 28;300 | 6.17 | 299;344 | 9.00 | 6;250 | 2.56 | 167;273 | 5.79 | 27;118 | 3.40 |
| 11;273 | 6.03 | 124;301 | 6.17 | 210;299 | 9.00 | 84;351 | 2.56 | 60;340 | 5.79 | 27;169 | 3.40 |
| 219;273 | 6.03 | 25;301 | 6.17 | 225;299 | 9.00 | 152;254 | 2.56 | 156;273 | 5.79 | 27;193 | 3.40 |
| 156;273 | 6.03 | 281;301 | 6.17 | 73;299 | 9.00 | 84;362 | 2.56 | 49;273 | 4.57 | 27;206 | 3.40 |
| 184;273 | 4.75 | 108;301 | 6.17 | 361;363 | 9.00 | 158;260 | 2.56 | 273;363 | 4.57 | 242;250 | 3.40 |
| 98;273 | 4.75 | 177;301 | 6.17 | 300;361 | 9.00 | 240;251 | 2.56 | 186;273 | 4.57 | 27;334 | 3.40 |
| 273;319 | 4.75 | 119;301 | 6.17 | 209;299 | 9.00 | 158;251 | 2.56 | 60;348 | 4.57 | 27;346 | 3.40 |
| 33;273 | 4.75 | 188;301 | 6.17 | 302;348 | 9.00 | 251;360 | 2.56 | 273;307 | 4.57 | 27;53 | 3.40 |
| 64;80 | 4.75 | 300;301 | 6.17 | 72;300 | 8.04 | 84;253 | 2.56 | 60;347 | 4.57 | 64;193 | 3.40 |
| 46;273 | 4.75 | 122;301 | 6.17 | 171;299 | 8.04 | 178;255 | 2.56 | 60;338 | 4.57 | 53;221 | 3.40 |
| 10;283 | 4.75 | 102;301 | 6.17 | 302;345 | 8.04 | 251;275 | 2.56 | 60;335 | 4.57 | 65;161 | 3.40 |
| 215;273 | 4.75 | 218;301 | 6.17 | 179;299 | 8.04 | 251;272 | 2.56 | 80;105 | 4.57 | 65;193 | 3.40 |
| 212;273 | 4.75 | 87;301 | 6.17 | 282;302 | 8.04 | 171;254 | 2.56 | 60;71 | 4.57 | 65;227 | 3.40 |
| 270;273 | 4.75 | 301;361 | 6.17 | 178;300 | 8.04 | 72;84 | 2.56 | 60;78 | 4.57 | 52;64 | 3.40 |
| 124;273 | 4.75 | 277;298 | 6.17 | 230;300 | 8.04 | 171;251 | 2.56 | 60;80 | 4.57 | 65;241 | 3.40 |
| 11;80 | 4.75 | 73;301 | 6.17 | 299;362 | 8.04 | 251;255 | 2.56 | 60;93 | 4.57 | 198;248 | 3.40 |
| 152;273 | 4.75 | 149;301 | 6.17 | 299;361 | 8.04 | 87;255 | 2.56 | 48;76 | 4.57 | 95;251 | 3.40 |
| 64;272 | 4.75 | 131;301 | 6.17 | 299;360 | 8.04 | 251;253 | 2.56 | 60;105 | 4.57 | 96;251 | 3.40 |
| 64;273 | 4.75 | 85;301 | 6.17 | 176;304 | 8.04 | 87;253 | 2.56 | 60;113 | 4.57 | 118;236 | 3.40 |
| 248;273 | 4.75 | 294;301 | 6.17 | 148;299 | 8.04 | 84;286 | 2.56 | 60;147 | 4.57 | 241;249 | 3.40 |
| 22;273 | 4.75 | 302;361 | 6.17 | 299;303 | 8.04 | 178;214 | 2.56 | 221;273 | 4.57 | 193;248 | 3.40 |
| 143;283 | 4.75 | 34;301 | 6.17 | 215;299 | 8.04 | 251;315 | 2.56 | 60;148 | 4.57 | 3;181 | 3.40 |
| 283;338 | 4.75 | 85;298 | 6.17 | 11;300 | 8.04 | 84;308 | 2.56 | 60;156 | 4.57 | 3;247 | 3.40 |
| 10;80 | 4.75 | 26;301 | 6.17 | 303;344 | 8.04 | 251;296 | 2.56 | 80;273 | 4.57 | 3;200 | 3.40 |
| 262;273 | 4.75 | 175;301 | 6.17 | 299;325 | 8.04 | 84;260 | 2.56 | 60;67 | 4.57 | 3;197 | 3.40 |
| 5;273 | 4.75 | 178;287 | 6.17 | 207;300 | 8.04 | 15;84 | 2.56 | 61;359 | 4.57 | 69;251 | 3.40 |
| 63;273 | 4.75 | 280;301 | 6.17 | 132;299 | 8.04 | 210;251 | 2.56 | 172;273 | 4.57 | 3;161 | 3.40 |
| 208;283 | 4.75 | 299;301 | 6.17 | 118;299 | 8.04 | 210;254 | 2.56 | 80;118 | 4.57 | 38;248 | 3.40 |
| 18;273 | 4.75 | 118;301 | 6.17 | 299;315 | 8.04 | 216;254 | 2.56 | 61;360 | 4.57 | 3;64 | 3.40 |
| 168;273 | 4.75 | 48;301 | 6.17 | 76;299 | 8.04 | 64;84 | 2.56 | 177;273 | 4.57 | 38;251 | 3.40 |
| 273;323 | 4.75 | 12;287 | 6.17 | 13;299 | 8.04 | 198;251 | 2.56 | 60;264 | 4.57 | 3;11 | 3.40 |
| 213;283 | 4.75 | 215;277 | 6.17 | 168;299 | 8.04 | 173;254 | 2.56 | 80;165 | 4.57 | 3;353 | 3.40 |
| 273;322 | 4.75 | 25;287 | 6.17 | 104;299 | 8.04 | 198;254 | 2.56 | 80;167 | 4.57 | 3;364 | 3.40 |
| 146;283 | 4.75 | 277;301 | 6.17 | 281;299 | 8.04 | 159;255 | 2.56 | 60;274 | 4.57 | 4;64 | 3.40 |
| 173;273 | 4.75 | 148;301 | 6.17 | 302;315 | 8.04 | 73;84 | 2.56 | 60;270 | 4.57 | 249;269 | 3.40 |
| 4;273 | 4.75 | 104;301 | 6.17 | 64;299 | 8.04 | 12;254 | 2.56 | 61;214 | 4.57 | 145;251 | 3.40 |
| 273;282 | 4.75 | 31;302 | 6.17 | 299;355 | 7.12 | 173;251 | 2.56 | 188;273 | 4.57 | 6;248 | 3.40 |
| 45;273 | 4.75 | 302;363 | 6.17 | 12;299 | 7.12 | 193;251 | 2.56 | 217;273 | 4.57 | 212;250 | 3.40 |
| 154;283 | 4.75 | 246;302 | 6.17 | 303;347 | 7.12 | 12;251 | 2.56 | 198;273 | 4.57 | 227;249 | 3.40 |
| 273;278 | 4.75 | 125;301 | 6.17 | 299;356 | 7.12 | 216;251 | 2.56 | 162;273 | 4.57 | 30;73 | 3.40 |
| 75;273 | 4.75 | 111;301 | 6.17 | 111;301 | 7.12 | 28;251 | 2.56 | 60;358 | 4.57 | 30;200 | 3.40 |
| 194;273 | 4.75 | 106;301 | 6.17 | 227;299 | 7.12 | 255;351 | 2.56 | 9;273 | 4.57 | 248;343 | 3.40 |
| 170;283 | 4.75 | 301;346 | 6.17 | 299;324 | 7.12 | 33;297 | 2.56 | 242;273 | 4.57 | 4;248 | 3.40 |
| 120;283 | 4.75 | 287;301 | 6.17 | 299;358 | 7.12 | 165;251 | 2.56 | 13;60 | 4.57 | 4;212 | 3.40 |
| 66;273 | 4.75 | 179;301 | 6.17 | 304;361 | 7.12 | 255;322 | 2.56 | 60;357 | 4.57 | 73;192 | 3.40 |
| 87;273 | 4.75 | 287;298 | 6.17 | 176;303 | 7.12 | 61;251 | 2.56 | 60;354 | 4.57 | 202;248 | 3.40 |
| 104;273 | 4.75 | 289;302 | 6.17 | 76;361 | 7.12 | 61;254 | 2.56 | 273;291 | 4.57 | 202;227 | 3.40 |
| 263;273 | 4.75 | 239;301 | 6.17 | 137;299 | 7.12 | 41;84 | 2.56 | 60;253 | 3.45 | 90;250 | 3.40 |
| 155;273 | 4.75 | 301;341 | 6.17 | 76;277 | 7.12 | 254;302 | 2.56 | 25;60 | 3.45 | 251;347 | 3.40 |
| 195;273 | 4.75 | 40;301 | 6.17 | 76;348 | 7.12 | 150;255 | 2.56 | 60;252 | 3.45 | 124;236 | 3.40 |
| 12;273 | 4.75 | 143;301 | 6.17 | 94;299 | 7.12 | 79;84 | 2.56 | 60;197 | 3.45 | 92;248 | 3.40 |
| 83;273 | 4.75 | 9;287 | 6.17 | 114;300 | 7.12 | 41;251 | 2.56 | 80;186 | 3.45 | 18;226 | 3.40 |
| 105;273 | 4.75 | 301;333 | 6.17 | 203;299 | 7.12 | 97;251 | 2.56 | 80;190 | 3.45 | 58;251 | 3.40 |
| 169;273 | 4.75 | 264;301 | 6.17 | 269;299 | 7.12 | 11;251 | 2.56 | 60;185 | 3.45 | 162;250 | 3.40 |
| 103;273 | 4.75 | 301;330 | 6.17 | 72;304 | 7.12 | 253;260 | 2.56 | 80;166 | 3.45 | 201;227 | 3.40 |
| 12;80 | 4.75 | 301;326 | 6.17 | 179;304 | 7.12 | 132;251 | 2.56 | 80;169 | 3.45 | 124;357 | 3.40 |
| 179;273 | 4.75 | 301;321 | 6.17 | 196;302 | 7.12 | 152;251 | 2.56 | 60;272 | 3.45 | 251;337 | 3.40 |
| 76;273 | 4.75 | 134;301 | 6.17 | 280;344 | 7.12 | 84;236 | 2.56 | 80;174 | 3.45 | 166;248 | 3.40 |
| 73;273 | 4.75 | 75;301 | 6.17 | 178;304 | 7.12 | 254;296 | 2.56 | 60;271 | 3.45 | 227;262 | 3.40 |
| 264;273 | 4.75 | 301;315 | 6.17 | 185;300 | 7.12 | 85;251 | 2.56 | 138;272 | 3.45 | 5;67 | 2.61 |
| 153;273 | 4.75 | 49;301 | 6.17 | 299;310 | 7.12 | 85;254 | 2.56 | 50;80 | 3.45 | 5;93 | 2.61 |
| 218;273 | 4.75 | 77;299 | 6.17 | 280;303 | 7.12 | 254;260 | 2.56 | 60;267 | 3.45 | 5;92 | 2.61 |
| 106;273 | 4.75 | 286;299 | 6.17 | 203;304 | 7.12 | 55;251 | 2.56 | 44;80 | 3.45 | 5;71 | 2.61 |
| 283;331 | 4.75 | 286;300 | 6.17 | 76;300 | 7.12 | 153;253 | 2.56 | 80;189 | 3.45 | 5:70 | 2.61 |
| 11;283 | 4.75 | 132;301 | 6.17 | 131;299 | 7.12 | 144;251 | 2.56 | 60;247 | 3.45 | 201;248 | 2.61 |
| 207;273 | 4.75 | 86;301 | 6.17 | 277;303 | 7.12 | 149;260 | 2.56 | 60;216 | 3.45 | 248;291 | 2.61 |
| 172;283 | 4.75 | 286;301 | 6.17 | 175;361 | 7.12 | 149;255 | 2.56 | 60;213 | 3.45 | 169;250 | 2.61 |
| 172;273 | 4.75 | 301;304 | 6.17 | 151;299 | 7.12 | 238;358 | 2.56 | 80;221 | 3.45 | 5;38 | 2.61 |
| 273;298 | 4.75 | 137;301 | 6.17 | 298;315 | 7.12 | 224;255 | 2.56 | 60;211 | 3.45 | 5;30 | 2.61 |
| 273;294 | 4.75 | 301;348 | 6.17 | 168;300 | 7.12 | 84;118 | 2.56 | 24;359 | 3.45 | 201;247 | 2.61 |
| 273;292 | 4.75 | 262;287 | 5.18 | 300;325 | 7.12 | 118;253 | 2.56 | 80;222 | 3.45 | 4;336 | 2.61 |
| 193;273 | 4.75 | 218;287 | 5.18 | 190;299 | 7.12 | 95;253 | 2.56 | 80;224 | 3.45 | 225;236 | 2.61 |
| 171;283 | 4.75 | 213;277 | 5.18 | 290;301 | 7.12 | 218;251 | 2.56 | 60;220 | 3.45 | 4;197 | 2.61 |
| 134;273 | 4.75 | 76;301 | 5.18 | 302;347 | 7.12 | 238;251 | 2.56 | 80;226 | 3.45 | 216;248 | 2.61 |
| 171;273 | 4.75 | 299;302 | 5.18 | 56;301 | 7.12 | 250;254 | 2.56 | 80;240 | 3.45 | 249;275 | 2.61 |
| 206;283 | 4.75 | 11;301 | 5.18 | 300;345 | 7.12 | 18;84 | 2.56 | 80;220 | 3.45 | 40;200 | 2.61 |
| 283;336 | 4.75 | 277;322 | 5.18 | 213;302 | 7.12 | 32;84 | 2.56 | 60;214 | 3.45 | 90;124 | 2.61 |
| 283;320 | 4.75 | 15;301 | 5.18 | 208;299 | 7.12 | 84;202 | 2.56 | 80;241 | 3.45 | 40;251 | 2.61 |
| 80;193 | 4.75 | 299;315 | 5.18 | 300;344 | 7.12 | 84;108 | 2.56 | 60;215 | 3.45 | 164;250 | 2.61 |
| 80;280 | 4.75 | 171;301 | 5.18 | 25;301 | 7.12 | 80;251 | 2.56 | 80;248 | 3.45 | 57;250 | 2.61 |
| 229;273 | 4.75 | 293;301 | 5.18 | 298;345 | 7.12 | 5;251 | 2.56 | 80;254 | 3.45 | 57;221 | 2.61 |
| 138;273 | 4.75 | 17;301 | 5.18 | 25;300 | 7.12 | 147;254 | 2.56 | 80;253 | 3.45 | 248;364 | 2.61 |
| 80;164 | 4.75 | 256;301 | 5.18 | 301;361 | 7.12 | 84;205 | 2.56 | 24;360 | 3.45 | 90;248 | 2.61 |
| 211;273 | 4.75 | 78;301 | 5.18 | 25;299 | 7.12 | 224;253 | 2.56 | 60;200 | 3.45 | 248;352 | 2.61 |
| 80;154 | 4.75 | 8;301 | 5.18 | 21;301 | 7.12 | 64;254 | 2.56 | 60;238 | 3.45 | 5;95 | 2.61 |
| 80;150 | 4.75 | 70;301 | 5.18 | 188;304 | 7.12 | 242;251 | 2.56 | 60;201 | 3.45 | 248;250 | 2.61 |

| | | Vascular endothelial | | | |
|---|---|---|---|---|---|
| Ureteric bud cells | | cells | | Visceral neurons | |
| Clusters | Score | Clusters | Score | Clusters | Score |
| 121;271 | 5.38 | 9;305 | 34.04 | 166;202 | 4.57 |
| 67;271 | 5.38 | 73;305 | 32.44 | 184;254 | 4.57 |
| 225;271 | 5.38 | 74;305 | 32.44 | 202;254 | 4.57 |
| 46;271 | 5.38 | 172;305 | 32.44 | 185;254 | 4.57 |
| 37;264 | 5.38 | 118;305 | 32.44 | 207;254 | 3.45 |
| 212;271 | 5.38 | 72;305 | 32.44 | 251;364 | 3.45 |
| 267;272 | 4.23 | 147;305 | 32.44 | 196;202 | 3.45 |
| 264;275 | 4.23 | 305;348 | 32.44 | 67;254 | 3.45 |
| 33;271 | 4.23 | 62;305 | 32.44 | 151;253 | 3.45 |
| 43;284 | 4.23 | 171;305 | 30.87 | 186;254 | 3.45 |
| 267;273 | 4.23 | 169;305 | 30.87 | 206;254 | 3.45 |
| 87;88 | 4.23 | 12;305 | 30.87 | 150;251 | 3.45 |
| 264;284 | 4.23 | 146;305 | 30.87 | 9;252 | 3.45 |
| 47;271 | 4.23 | 213;305 | 30.87 | 9;251 | 3.45 |
| 81;271 | 4.23 | 215;305 | 30.87 | 254;294 | 3.45 |
| 271;353 | 4.23 | 129;305 | 30.87 | 252;253 | 3.45 |
| 184;271 | 4.23 | 305;340 | 30.87 | 88;254 | 3.45 |
| 202;271 | 4.23 | 64;305 | 30.87 | 220;252 | 3.45 |
| 215;271 | 4.23 | 305;338 | 30.87 | 220;251 | 3.45 |
| 20;271 | 4.23 | 174;305 | 30.87 | 213;254 | 3.45 |
| 264;273 | 4.23 | 269;305 | 30.87 | 94;253 | 3.45 |
| 92;264 | 4.23 | 305;346 | 30.87 | 185;202 | 3.45 |
| 201;264 | 4.23 | 42;305 | 30.87 | 22;251 | 3.45 |
| 79;271 | 4.23 | 179;305 | 30.87 | 166;205 | 3.45 |
| 85;271 | 4.23 | 156;305 | 29.33 | 167;178 | 3.45 |
| 273;308 | 4.23 | 210;305 | 29.33 | 166;353 | 3.45 |
| 88;361 | 4.23 | 195;305 | 29.33 | 166;351 | 3.45 |
| 236;271 | 4.23 | 305;349 | 29.33 | 166;262 | 3.45 |
| 86;271 | 4.23 | 305;339 | 29.33 | 166;254 | 3.45 |
| 92;271 | 4.23 | 155;305 | 29.33 | 166;213 | 3.45 |
| 213;271 | 4.23 | 305;364 | 29.33 | 166;210 | 3.45 |
| 46;284 | 4.23 | 305;341 | 29.33 | 166;207 | 3.45 |
| 273;297 | 4.23 | 305;309 | 29.33 | 166;181 | 3.45 |
| 89;271 | 4.23 | 214;305 | 29.33 | 166;167 | 3.45 |
| 214;271 | 4.23 | 178;305 | 29.33 | 165;251 | 3.45 |
| 267;271 | 4.23 | 305;362 | 29.33 | 160;251 | 3.45 |
| 266;271 | 4.23 | 157;305 | 29.33 | 159;254 | 3.45 |
| 39;271 | 4.23 | 71;305 | 29.33 | 159;251 | 3.45 |
| 237;271 | 4.23 | 25;305 | 29.33 | 157;251 | 3.45 |
| 257;271 | 4.23 | 185;305 | 29.33 | 156;294 | 3.45 |
| 39;283 | 4.23 | 305;325 | 29.33 | 23;251 | 3.45 |
| 60;264 | 4.23 | 103;305 | 29.33 | 184;353 | 3.45 |
| 273;275 | 4.23 | 305;324 | 29.33 | 184;251 | 3.45 |
| 275;283 | 4.23 | 105;305 | 29.33 | 152;254 | 3.45 |
| 186;271 | 4.23 | 16;305 | 29.33 | 65;166 | 3.45 |
| 88;266 | 4.23 | 173;305 | 29.33 | 65;152 | 3.45 |
| 93;284 | 4.23 | 67;305 | 29.33 | 181;254 | 3.45 |
| 16;271 | 4.23 | 206;305 | 29.33 | 178;202 | 3.45 |
| 182;271 | 4.23 | 184;305 | 29.33 | 173;254 | 3.45 |
| 153;271 | 4.23 | 170;305 | 29.33 | 63;251 | 3.45 |
| 209;271 | 4.23 | 86;305 | 29.33 | 251;297 | 3.45 |
| 264;265 | 3.19 | 61;305 | 29.33 | 251;293 | 3.45 |
| 51;271 | 3.19 | 168;305 | 29.33 | 251;287 | 3.45 |
| 273;325 | 3.19 | 196;305 | 29.33 | 251;257 | 3.45 |
| 273;326 | 3.19 | 166;305 | 29.33 | 251;288 | 3.45 |
| 23;284 | 3.19 | 164;305 | 29.33 | 251;253 | 3.45 |
| 83;267 | 3.19 | 208;305 | 29.33 | 235;251 | 2.45 |
| 211;264 | 3.19 | 305;347 | 27.82 | 181;251 | 2.45 |
| 271;307 | 3.19 | 305;353 | 27.82 | 65;103 | 2.45 |
| 264;266 | 3.19 | 305;316 | 27.82 | 250;256 | 2.45 |
| 284;306 | 3.19 | 305;350 | 27.82 | 181;353 | 2.45 |
| 35;271 | 3.19 | 209;305 | 27.82 | 177;251 | 2.45 |
| 264;267 | 3.19 | 43;305 | 27.82 | 65;149 | 2.45 |
| 83;264 | 3.19 | 204;305 | 27.82 | 177;253 | 2.45 |
| 183;284 | 3.19 | 212;305 | 27.82 | 65;154 | 2.45 |
| 63;271 | 3.19 | 305;320 | 27.82 | 183;251 | 2.45 |
| 211;257 | 3.19 | 197;305 | 27.82 | 64;167 | 2.45 |
| 268;284 | 3.19 | 70;305 | 27.82 | 183;254 | 2.45 |
| 60;271 | 3.19 | 305;343 | 27.87 | 65;171 | 2.45 |
| 131;271 | 3.19 | 305;321 | 27.82 | 181;250 | 2.45 |
| 258;271 | 3.19 | 305;337 | 27.82 | 178;253 | 2.45 |
| 273;351 | 3.19 | 207;305 | 27.82 | 110;251 | 2.45 |
| 183;271 | 3.19 | 216;305 | 27.82 | 177;254 | 2.45 |
| 60;275 | 3.19 | 228;305 | 27.82 | 181;202 | 2.45 |
| 268;274 | 3.19 | 152;305 | 27.82 | 251;296 | 2.45 |
| 23;271 | 3.19 | 159;305 | 27.82 | 105;253 | 2.45 |
| 23;273 | 3.19 | 98;305 | 27.82 | 184;193 | 2.45 |
| 153;264 | 3.19 | 183;305 | 27.82 | 187;251 | 2.45 |
| 275;343 | 3.19 | 88;305 | 27.82 | 104;251 | 2.45 |
| 200;271 | 3.19 | 130;305 | 27.82 | 103;292 | 2.45 |
| 46;272 | 3.19 | 252;305 | 27.82 | 103;254 | 2.45 |
| 211;272 | 3.19 | 186;305 | 27.82 | 103;253 | 2.45 |
| 124;271 | 3.19 | 167;305 | 27.82 | 103;251 | 2.45 |
| 284;307 | 3.19 | 2;305 | 27.82 | 103;250 | 2.45 |
| 211;271 | 3.19 | 149;305 | 27.82 | 191;251 | 2.45 |
| 164;271 | 3.19 | 161;305 | 27.82 | 192;251 | 2.45 |
| 168;273 | 3.19 | 190;305 | 27.82 | 192;254 | 2.45 |
| 105;275 | 3.19 | 44;305 | 27.82 | 250;343 | 2.45 |
| 271;325 | 3.19 | 154;305 | 27.82 | 65;343 | 2.45 |
| 81;284 | 3.19 | 191;305 | 27.82 | 230;251 | 2.45 |
| 78;264 | 3.19 | 202;305 | 27.82 | 186;253 | 2.45 |
| 180;271 | 3.19 | 305;310 | 27.82 | 13;251 | 2.45 |
| 9;284 | 3.19 | 229;305 | 27.82 | 176;308 | 2.45 |
| 81;272 | 3.19 | 15;305 | 27.82 | 65;186 | 2.45 |
| 188;271 | 3.19 | 194;305 | 27.82 | 232;251 | 2.45 |
| 174;275 | 3.19 | 201;305 | 27.82 | 65;205 | 2.45 |
| 81;275 | 3.19 | 17;305 | 27.82 | 184;233 | 2.45 |
| 273;333 | 3.19 | 305;363 | 27.82 | 5;251 | 2.45 |
| 168;271 | 3.19 | 45;305 | 27.82 | 13;233 | 2.45 |
| 271;323 | 3.19 | 160;305 | 27.82 | 184;292 | 2.45 |

TABLE 19C
Hierarchical clustering of TF ORFs for TF Atlas differentiated cells into 151 clusters.

| | Clus- | | Clus- | | Clus- | | Clus- |
|---|---|---|---|---|---|---|---|
| TF ORF | ter | TF ORF | ter | TF ORF | ter | TF ORF | ter |
| TFORF0483-ZNF223 | 1 | TFORF0306-CREM | 54 | TFORF0048-MAX | 84 | TFORF0998-ZNF302 | 123 |
| TFORF0501-EGR4 | 1 | TFORF0394-ZNF7 | 54 | TFORF0076-KCNIP4 | 84 | TFORF1191-ZNF573 | 123 |
| TFORF0524-PAX4 | 1 | TFORF0533-PAX1 | 54 | TFORF0081-KCNIP2 | 84 | TFORF1724-ZNF691 | 123 |
| TFORF0606-PUF60 | 1 | TFORF0666-TGFB1I1 | 54 | TFORF0128-SP8 | 84 | TFORF1917-RUNX2 | 123 |
| TFORF0974-GFI1B | 1 | TFORF0874-HOXB9 | 54 | TFORF0131-HMGB4 | 84 | TFORF1973-TBX3 | 123 |
| TFORF1157-DMBX1 | 1 | TFORF1044-TSC22D3 | 54 | TFORF0238-MYCL | 84 | TFORF2078-FLI1 | 123 |
| TFORF1412-ZNF562 | 1 | TFORF1366-ISL2 | 54 | TFORF0244-SUB1 | 84 | TFORF2766-ZKSCAN7 | 123 |
| TFORF1479-TP63 | 1 | TFORF1955-ESR2 | 54 | TFORF0252-CAMTA1 | 84 | TFORF0005-HIF3A | 124 |
| TFORF1592-ZNF771 | 1 | TFORF2162-GRHL1 | 54 | TFORF0304-CREM | 84 | TFORF0269-TCF4 | 124 |
| TFORF1923-ZBTB20 | 1 | TFORF2252-ZNF630 | 54 | TFORF0365-TCEB1 | 84 | TFORF0646-NR1I3 | 124 |
| TFORF2132-LCOR | 1 | TFORF2404-NFE2L1 | 54 | TFORF0374-NFYA | 84 | TFORF0768-ZNF551 | 124 |
| TFORF2467-IRF5 | 1 | TFORF2423-RBPJL | 54 | TFORF0399-ZNF2 | 84 | TFORF0961-ERG | 124 |
| TFORF2682-ZMYND11 | 1 | TFORF2631-INSM1 | 54 | TFORF0503-RNF138 | 84 | TFORF1612-TADA2A | 124 |
| TFORF2706-TFCP2L1 | 1 | TFORF2689-TEAD2 | 54 | TFORF0600-MZF1 | 84 | TFORF1757-ZNF189 | 124 |
| TFORF3344-ZNF280A | 1 | TFORF3306-THAP1 | 54 | TFORF0647-NR1I3 | 84 | TFORF1760-ZNF25 | 124 |
| TFORF0292-MEF2B | 2 | TFORF3308-GTF2A1L | 54 | TFORF0741-JDP2 | 84 | TFORF2730-ZNF668 | 124 |
| TFORF0519-PAX5 | 2 | TFORF3364-ZNF232 | 54 | TFORF0771-MSX2 | 84 | TFORF2913-NFIB | 124 |
| TFORF0738-ZNF155 | 2 | TFORF3384-HOXC10 | 54 | TFORF0801-ATF3 | 84 | TFORF3113-RFXANK | 124 |
| TFORF0853-ZIC5 | 2 | TFORF3416-ZNF410 | 54 | TFORF0942-LMO1 | 84 | TFORF3231-ZNF423 | 124 |
| TFORF1030-RARG | 2 | TFORF3433-DEK | 54 | TFORF0992-KLF8 | 84 | TFORF3503-CDK7 | 124 |
| TFORF1165-PRKCD | 2 | TFORF3506-LCOR | 54 | TFORF1022-SCRT2 | 84 | TFORF0045-ZNF671 | 125 |
| TFORF1273-DPF2 | 2 | TFORF0362-TCEB2 | 55 | TFORF1040-TSC22D1 | 84 | TFORF0601-ZNF726 | 125 |
| TFORF1370-ZNF141 | 2 | TFORF1039-TSC22D1 | 55 | TFORF1219-PRRX2 | 84 | TFORF1869-POU2F1 | 125 |
| TFORF2107-ZBTB37 | 2 | TFORF1291-SP140L | 55 | TFORF1494-FOSL1 | 84 | TFORF2235-ZNF880 | 125 |
| TFORF2328-CIZ1 | 2 | TFORF1387-ZNF367 | 55 | TFORF1556-YAF2 | 84 | TFORF2788-OTX2 | 125 |
| TFORF2333-ZNF491 | 2 | TFORF2131-ZGLP1 | 55 | TFORF2114-SIRT6 | 84 | TFORF2801-ETV2 | 125 |
| TFORF2411-KLF3 | 2 | TFORF2354-ZNF12 | 55 | TFORF2121-HOPX | 84 | TFORF3110-TGIF2LY | 125 |
| TFORF2855-MAPK8IP1 | 2 | TFORF2444-SMARCE1 | 55 | TFORF2144-ZNF525 | 84 | TFORF3302-SPIC | 125 |
| TFORF3109-ELF5 | 2 | TFORF2829-IKZF3 | 55 | TFORF2215-CREB3L4 | 84 | TFORF0015-DRAP1 | 126 |
| TFORF3137-HEY1 | 2 | TFORF3016-MLX | 55 | TFORF2250-TCF19 | 84 | TFORF0486-ZFP90 | 126 |
| TFORF0054-ZNF679 | 3 | TFORF3466-SIM2 | 55 | TFORF2253-HMGN3 | 84 | TFORF0640-NHP2 | 126 |
| TFORF0843-ZSCAN10 | 3 | TFORF3489-IKZF1 | 55 | TFORF2294-TAF13 | 84 | TFORF0892-ING4 | 126 |
| TFORF0849-ZIC4 | 3 | TFORF0426-PBX3 | 56 | TFORF2418-ZNF268 | 84 | TFORF1009-ZNF544 | 126 |
| TFORF1362-SP100 | 3 | TFORF0516-PAX5 | 56 | TFORF2516-PDCD2 | 84 | TFORF1128-THAP3 | 126 |
| TFORF1535-ZBTB44 | 3 | TFORF1126-THAP3 | 56 | TFORF2561-ZNF655 | 84 | TFORF1158-EOMES | 126 |
| TFORF0478-ZNF222 | 4 | TFORF1221-HELT | 56 | TFORF2586-CERS4 | 84 | TFORF1363-ELOF1 | 126 |
| TFORF0514-PAX5 | 4 | TFORF2152-BCL11A | 56 | TFORF2857-ID4 | 84 | TFORF1409-ZNF559 | 126 |
| TFORF0515-PAX5 | 4 | TFORF2319-TAF1B | 56 | TFORF3000-E2F6 | 84 | TFORF1515-NANOGNB | 126 |
| TFORF0517-PAX5 | 4 | TFORF2569-TGIF1 | 56 | TFORF3142-CDX4 | 84 | TFORF1714-LDB2 | 126 |
| TFORF0518-PAX5 | 4 | TFORF2654-ARNTL2 | 56 | TFORF3207-HMGN2 | 84 | TFORF1947-MIER1 | 126 |
| TFORF0537-PAX2 | 4 | TFORF1649-REL | 57 | TFORF3274-HMGA1 | 84 | TFORF2311-RXRG | 126 |
| TFORF0538-PAX2 | 4 | TFORF1884-ZIC2 | 57 | TFORF3294-ZNF784 | 84 | TFORF2633-TFDP2 | 126 |
| TFORF0552-ZNF611 | 4 | TFORF2350-ZNF16 | 57 | TFORF3530-SSRP1 | 84 | TFORF2705-ESRRB | 126 |
| TFORF0742-ZNF485 | 4 | TFORF2576-HSF4 | 57 | TFORF3535-MLLT10 | 84 | TFORF2725-ZNF74 | 126 |
| TFORF1277-ZNF587 | 4 | TFORF2800-TAF5 | 57 | TFORF0084-KCNIP2 | 85 | TFORF2803-ETV2 | 126 |
| TFORF1302-ZMIZ2 | 4 | TFORF3141-ALX3 | 57 | TFORF0183-SHOX2 | 85 | TFORF3033-NFKBIA | 126 |
| TFORF1921-ZBTB22 | 4 | TFORF3147-ZBTB43 | 57 | TFORF0291-MEF2C | 85 | TFORF3476-SNAI1 | 126 |
| TFORF1981-TBX4 | 4 | TFORF3266-ZNF213 | 57 | TFORF0332-ZNF333 | 85 | TFORF3512-SOX14 | 126 |
| TFORF2225-ZNF343 | 4 | TFORF3482-SOX2 | 57 | TFORF0349-ZNF48 | 85 | TFORF0007-TULP4 | 127 |
| TFORF2501-PML | 4 | TFORF0826-LHX9 | 58 | TFORF0718-TEF | 85 | TFORF0135-ZNF780A | 127 |
| TFORF2882-XBP1 | 4 | TFORF1099-UBP1 | 58 | TFORF0938-SS18 | 85 | TFORF0812-CDCA7L | 127 |
| TFORF3201-ZNF829 | 4 | TFORF1516-ZNF737 | 58 | TFORF0949-EMX1 | 85 | TFORF0860-NR1H4 | 127 |
| TFORF3418-NFE2L2 | 4 | TFORF1664-ARID5A | 58 | TFORF1255-TP53 | 85 | TFORF1159-EOMES | 127 |
| TFORF3504-ZNF543 | 4 | TFORF1878-CCNT2 | 58 | TFORF1407-ZNF559 | 85 | TFORF1181-TBX21 | 127 |
| TFORF0165-SIX5 | 5 | TFORF2035-OSR2 | 58 | TFORF1454-TFEC | 85 | TFORF1372-ZNF143 | 127 |
| TFORF0336-ZNF91 | 5 | TFORF3259-MEF2D | 58 | TFORF1551-TAZ | 85 | TFORF1376-ZNF146 | 127 |
| TFORF0397-ZNF2 | 5 | TFORF3494-OSR2 | 58 | TFORF1590-ZNF773 | 85 | TFORF1473-LIN54 | 127 |
| TFORF0507-CDK2 | 5 | TFORF0279-ZNF776 | 59 | TFORF1643-ZNF426 | 85 | TFORF1603-HINFP | 127 |
| TFORF0698-BATF2 | 5 | TFORF0985-KLF4 | 59 | TFORF1846-ETS1 | 85 | TFORF1940-JUP | 127 |
| TFORF0837-ZSCAN18 | 5 | TFORF1246-ZNF133 | 59 | TFORF1915-RUNX2 | 85 | TFORF2099-SOHLH2 | 127 |
| TFORF0901-ZNF382 | 5 | TFORF1298-ZFP64 | 59 | TFORF1997-ZNF248 | 85 | TFORF2370-MBD4 | 127 |
| TFORF1325-KLF16 | 5 | TFORF1357-ILF3 | 59 | TFORF2246-TCF12 | 85 | TFORF2405-NFE2L1 | 127 |
| TFORF1421-ZNF211 | 5 | TFORF1725-ZNF691 | 59 | TFORF2254-HMGN3 | 85 | TFORF2515-PDCD2 | 127 |
| TFORF1554-SP110 | 5 | TFORF3154-ZFP2 | 59 | TFORF2288-HES4 | 85 | TFORF2741-ZNF484 | 127 |
| TFORF2181-ZNF417 | 5 | TFORF3411-CRTC2 | 59 | TFORF2974-NR1H2 | 85 | TFORF2885-GLI2 | 127 |
| TFORF2188-ZNF410 | 5 | TFORF0192-RFX4 | 60 | TFORF3321-PA2G4 | 85 | TFORF3007-SMAD1 | 127 |
| TFORF2214-CREB3L4 | 5 | TFORF0325-LCORL | 60 | TFORF0359-TUB | 86 | TFORF3379-ACTL6A | 127 |
| TFORF2584-MIXL1 | 5 | TFORF0589-FOXO1 | 60 | TFORF0428-PBX1 | 86 | TFORF3425-ZNF559 | 127 |
| TFORF2942-ESRRG | 5 | TFORF0868-NR1H3 | 60 | TFORF0648-NR1I3 | 86 | TFORF0182-SHOX2 | 128 |
| TFORF3324-XRCC6 | 5 | TFORF1123-HNRNPAB | 60 | TFORF0756-JUND | 86 | TFORF0591-FOXO4 | 128 |
| TFORF3441-MNAT1 | 5 | TFORF1609-ZZZ3 | 60 | TFORF0800-ATF3 | 86 | TFORF0999-ZNF302 | 128 |
| TFORF0324-LCORL | 6 | TFORF1860-NR4A3 | 60 | TFORF0883-HOXB7 | 86 | TFORF1054-PLAGL1 | 128 |
| TFORF0398-ZNF2 | 6 | TFORF1960-CUX1 | 60 | TFORF2480-MXD4 | 86 | TFORF1141-HMBOX1 | 128 |
| TFORF0464-TRIM22 | 6 | TFORF1962-CUX1 | 60 | TFORF2947-HOXC8 | 86 | TFORF1322-KLF10 | 128 |
| TFORF0523-PAX5 | 6 | TFORF2186-ZNF414 | 60 | TFORF0057-MAF | 87 | TFORF1613-TADA2A | 128 |
| TFORF0588-FOXO3 | 6 | TFORF2466-IRF5 | 60 | TFORF0152-THAP6 | 87 | TFORF1759-ALYREF | 128 |
| TFORF0610-RBPJ | 6 | TFORF2635-TFDP2 | 60 | TFORF0436-ZSCAN31 | 87 | TFORF1816-SATB1 | 128 |
| TFORF1000-ZNF302 | 6 | TFORF2798-TAF6 | 60 | TFORF0696-GTF3A | 87 | TFORF2069-MYC | 128 |
| TFORF1051-HKR1 | 6 | TFORF2915-NFIB | 60 | TFORF0781-ZNF93 | 87 | TFORF2150-ZNF250 | 128 |
| TFORF1081-NOBOX | 6 | TFORF2933-HOXD3 | 60 | TFORF1562-ZNF688 | 87 | TFORF2303-CIITA | 128 |
| TFORF1341-POU5F1 | 6 | TFORF3138-PPARG | 60 | TFORF1934-MEIS2 | 87 | TFORF2784-GLIS3 | 128 |
| TFORF1493-FOSL1 | 6 | TFORF3230-FOXJ1 | 60 | TFORF2446-ZIK1 | 87 | TFORF3029-ATOH1 | 128 |
| TFORF1680-GTF2IRD2B | 6 | TFORF3345-LMO3 | 60 | TFORF2757-BARHL1 | 87 | TFORF3087-MAFF | 128 |
| TFORF1806-TBX15 | 6 | TFORF3386-IRF4 | 60 | TFORF3337-HDAC1 | 87 | TFORF3267-SNAPC2 | 128 |
| TFORF1849-ETS1 | 6 | TFORF3480-ZNF785 | 60 | TFORF0270-TCF7 | 88 | TFORF3283-HOXA5 | 128 |
| TFORF1930-XRCC6 | 6 | TFORF0082-KCNIP2 | 61 | TFORF0367-NFYC | 88 | TFORF3374-VAX2 | 128 |
| TFORF1936-MEIS2 | 6 | TFORF0085-KCNIP2 | 61 | TFORF0894-ING4 | 88 | TFORF3521-THAP8 | 128 |
| TFORF1987-ZNF534 | 6 | TFORF0240-MYCL | 61 | TFORF1393-PMS1 | 88 | TFORF0032-GSC2 | 129 |
| TFORF2124-ZNF747 | 6 | TFORF0267-TCF4 | 61 | TFORF1485-NANOG | 88 | TFORF0230-ZNF595 | 129 |
| TFORF2340-MITF | 6 | TFORF0505-CDK2 | 61 | TFORF2111-NR4A1 | 88 | TFORF0654-NR1I3 | 129 |
| TFORF2372-ZNF468 | 6 | TFORF0546-ZFAT | 61 | TFORF2349-HOXD8 | 88 | TFORF0854-VSX1 | 129 |
| TFORF2513-PDCD2 | 6 | TFORF0611-RBPJ | 61 | TFORF2474-ONECUT3 | 88 | TFORF1182-TBX20 | 129 |
| TFORF2621-ZXDA | 6 | TFORF0618-ZSCAN26 | 61 | TFORF3146-HSF1 | 88 | TFORF1481-TP63 | 129 |
| TFORF2970-RORC | 6 | TFORF0766-ZNF552 | 61 | TFORF3193-DND1 | 88 | TFORF2287-HES4 | 129 |
| TFORF3012-HSF2 | 6 | TFORF0840-HSFY2 | 61 | TFORF3349-ERCC8 | 88 | TFORF2382-MBD1 | 129 |
| TFORF3222-FOXS1 | 6 | TFORF1215-NME2 | 61 | TFORF0017-IRX5 | 89 | TFORF2590-CERS3 | 129 |
| TFORF3385-ZIC3 | 6 | TFORF1382-ZNF789 | 61 | TFORF0109-SMAD6 | 89 | TFORF2859-ID1 | 129 |
| TFORF3464-KLF7 | 6 | TFORF1836-EZH2 | 61 | TFORF0206-ETV3L | 89 | TFORF2870-HMX1 | 129 |
| TFORF3500-BATF3 | 6 | TFORF1850-YWHAE | 61 | TFORF0525-PAX4 | 89 | TFORF3251-PFDN5 | 129 |
| TFORF0046-MAX | 7 | TFORF2142-ZNF525 | 61 | TFORF0570-ZNF502 | 89 | TFORF0467-CARHSP1 | 130 |
| TFORF0630-NR1I2 | 7 | TFORF2204-MYNN | 61 | TFORF0879-HOXB3 | 89 | TFORF1086-GTF2E1 | 130 |
| TFORF0632-VPS72 | 7 | TFORF2239-GATA5 | 61 | TFORF1160-EOMES | 89 | TFORF1094-HSFX2 | 130 |
| TFORF0835-HSFY1 | 7 | TFORF2414-ZNF268 | 61 | TFORF1425-ZNF211 | 89 | TFORF1330-TFAP2C | 130 |
| TFORF1256-TP53 | 7 | TFORF2585-CERS6 | 61 | TFORF2205-POU2F3 | 89 | TFORF1487-NR6A1 | 130 |
| TFORF1299-MAEL | 7 | TFORF2664-ZBED1 | 61 | TFORF2599-RORA | 89 | TFORF1640-PSIP1 | 130 |
| TFORF1880-CREBZF | 7 | TFORF2716-SLC2A4RG | 61 | TFORF2834-IKZF3 | 89 | TFORF1699-E2F5 | 130 |
| TFORF2098-ZKSCAN1 | 7 | TFORF2808-ETV7 | 61 | TFORF2905-DACH2 | 89 | TFORF1863-POU2F2 | 130 |
| TFORF2482-MXD3 | 7 | TFORF3021-DLX4 | 61 | TFORF2988-OTX2 | 89 | TFORF2180-ZNF417 | 130 |
| TFORF2717-TFCP2 | 7 | TFORF3332-PUF60 | 61 | TFORF3136-HEY1 | 89 | TFORF2605-MYRF | 130 |
| TFORF2731-ZNF669 | 7 | TFORF3540-TAL2 | 61 | TFORF0119-ELMSAN1 | 90 | TFORF2715-ZNF713 | 130 |
| TFORF3292-MXD3 | 7 | TFORF0453-THRA | 62 | TFORF0124-OLIG1 | 90 | TFORF2783-GLIS3 | 130 |
| TFORF3403-ZNF488 | 7 | TFORF0488-ZFP90 | 62 | TFORF0437-ZSCAN31 | 90 | TFORF2785-GLIS1 | 130 |
| TFORF3429-ZNF302 | 7 | TFORF0755-ZNF319 | 62 | TFORF0513-PAX5 | 90 | TFORF2786-GLIS1 | 130 |
| TFORF3440-ING1 | 7 | TFORF0857-VSX1 | 62 | TFORF0734-ZNF488 | 90 | TFORF2941-DLX5 | 130 |
| TFORF3483-PBX4 | 7 | TFORF1045-TSC22D2 | 62 | TFORF0893-ING4 | 90 | TFORF3043-ZNF75D | 130 |
| TFORF0127-SP8 | 8 | TFORF1238-HOMEZ | 62 | TFORF1076-NFATC4 | 90 | TFORF3152-ZFP3 | 130 |
| TFORF0154-THAP7 | 8 | TFORF1295-ZFP64 | 62 | TFORF1311-RBMS1 | 90 | TFORF3253-RBPJ | 130 |
| TFORF0156-EWSR1 | 8 | TFORF1458-TFEB | 62 | TFORF1984-ZNF534 | 90 | TFORF3275-HMGA1 | 130 |
| TFORF0547-PAX9 | 8 | TFORF1761-ZNF24 | 62 | TFORF2339-ZNF19 | 90 | TFORF3333-PUF60 | 130 |
| TFORF0851-ZIC4 | 8 | TFORF1881-SOX30 | 62 | TFORF2875-ELF3 | 90 | TFORF3417-TCF7L2 | 130 |
| TFORF1224-AKNA | 8 | TFORF2077-MYB | 62 | TFORF3010-NR1I3 | 90 | TFORF0581-ZNF101 | 131 |
| TFORF2065-NKX2-5 | 8 | TFORF2270-PSAP | 62 | TFORF3078-XRCC4 | 90 | TFORF0671-ZNF821 | 131 |
| TFORF2422-RBPJL | 8 | TFORF2281-MYBBP1A | 62 | TFORF3167-ZNF512B | 90 | TFORF0701-PAXBP1 | 131 |
| TFORF2611-ZNF277 | 8 | TFORF2567-ZNF654 | 62 | TFORF3371-MYBL1 | 90 | TFORF0852-ZIC4 | 131 |
| TFORF2629-INSM2 | 8 | TFORF2656-STAT3 | 62 | TFORF3511-SOX14 | 90 | TFORF1142-HMBOX1 | 131 |
| TFORF2665-ZBED2 | 8 | TFORF3053-ZBTB44 | 62 | TFORF0976-GFI1B | 91 | TFORF1171-MLX | 131 |
| TFORF2990-NFE2L1 | 8 | TFORF0003-HIF3A | 63 | TFORF1053-HKR1 | 91 | TFORF1309-TTF1 | 131 |
| TFORF3187-RAD21 | 8 | TFORF0153-THAP6 | 63 | TFORF1266-ZNF135 | 91 | TFORF1676-RUNX1T1 | 131 |
| TFORF0204-ELK4 | 9 | TFORF0475-SP140 | 63 | TFORF1294-ZFP64 | 91 | TFORF1697-E2F6 | 131 |
| TFORF0414-CTCFL | 9 | TFORF0502-NFE4 | 63 | TFORF1879-CREBZF | 91 | TFORF1775-ZNF500 | 131 |
| TFORF0493-ZSCAN2 | 9 | TFORF1163-NFKBIL1 | 63 | TFORF0023-IRX2 | 92 | TFORF1829-DMRTA2 | 131 |
| TFORF1489-NR6A1 | 9 | TFORF1657-SPIB | 63 | TFORF0053-MAZ | 92 | TFORF1937-MEIS2 | 131 |
| TFORF1573-ZNF684 | 9 | TFORF1743-ZNF764 | 63 | TFORF0058-MAF | 92 | TFORF2174-ZNF419 | 131 |
| TFORF1677-RUNX1T1 | 9 | TFORF2229-ZNF730 | 63 | TFORF0408-CTCFL | 92 | TFORF2241-GATA3 | 131 |
| TFORF2201-POU4F2 | 9 | TFORF2357-ZNF649 | 63 | TFORF0472-ZNF221 | 92 | TFORF2371-ZNF468 | 131 |
| TFORF2756-BARHL2 | 9 | TFORF2361-ZNF641 | 63 | TFORF0878-HOXB2 | 92 | TFORF2810-ETV7 | 131 |
| TFORF2937-FOS | 9 | TFORF2817-FOXD4L3 | 63 | TFORF1343-FEZF1 | 92 | TFORF2852-HMGA2 | 131 |
| TFORF2966-NR0B1 | 9 | TFORF3121-ZNF341 | 63 | TFORF2166-GRHL3 | 92 | TFORF3133-TCF7 | 131 |
| TFORF0126-CXXC1 | 10 | TFORF3299-MEIS2 | 63 | TFORF2975-NAT10 | 92 | TFORF3531-HMGN3 | 131 |
| TFORF0532-PAX1 | 10 | TFORF3330-TBX20 | 63 | TFORF3025-MYF6 | 92 | TFORF0308-CREM | 132 |
| TFORF0981-KLF6 | 10 | TFORF0037-SP5 | 64 | TFORF3108-ASCL2 | 92 | TFORF0380-SMARCA2 | 132 |
| TFORF1105-GTF2IRD2 | 10 | TFORF0358-ZNF33A | 64 | TFORF3129-SMAD7 | 92 | TFORF0925-NR2F2 | 132 |
| TFORF1621-ZNF512 | 10 | TFORF0455-TAF4B | 64 | TFORF3220-ZNF449 | 92 | TFORF1252-TP53 | 132 |
| TFORF1741-ZNF768 | 10 | TFORF0468-KAT7 | 64 | TFORF3280-DDB2 | 92 | TFORF1506-HEY2 | 132 |
| TFORF1967-PPARD | 10 | TFORF0511-TSHZ1 | 64 | TFORF3362-MYOG | 92 | TFORF1588-ZNF773 | 132 |
| TFORF2439-YEATS4 | 10 | TFORF0609-MAFF | 64 | TFORF3509-GATAD2B | 92 | TFORF2511-PDCD2 | 132 |
| TFORF2879-ELF2 | 10 | TFORF0633-VPS72 | 64 | TFORF3541-THAP6 | 92 | TFORF2655-STAT6 | 132 |
| TFORF3347-PITX1 | 10 | TFORF0650-NR1I3 | 64 | TFORF0536-PAX2 | 93 | TFORF1063-NFATC1 | 133 |
| TFORF0543-ZFAT | 11 | TFORF0799-ATF3 | 64 | TFORF0862-NR1H4 | 93 | TFORF1143-HMBOX1 | 133 |
| TFORF0678-PRDM14 | 11 | TFORF0983-KLF5 | 64 | TFORF0941-LMO1 | 93 | TFORF1312-AEBP2 | 133 |
| TFORF1289-GMEB2 | 11 | TFORF0984-KLF5 | 64 | TFORF0955-CDIP1 | 93 | TFORF1716-LDB2 | 133 |
| TFORF1541-ZBTB49 | 11 | TFORF0987-KLF2 | 64 | TFORF1034-WT1 | 93 | TFORF2079-FLI1 | 133 |
| TFORF1727-ZNF692 | 11 | TFORF0988-KLF1 | 64 | TFORF1140-HMBOX1 | 93 | TFORF2582-NR1D1 | 133 |
| TFORF1019-SCRT1 | 12 | TFORF1371-ZNF140 | 64 | TFORF1146-HOXA4 | 93 | TFORF2828-IKZF3 | 133 |
| TFORF1335-POU3F2 | 12 | TFORF1432-NR3C1 | 64 | TFORF2167-GRHL3 | 93 | TFORF3159-SMAD2 | 133 |
| TFORF1941-MIER1 | 12 | TFORF1453-DLX2 | 64 | TFORF2306-ETV1 | 93 | TFORF3312-ELK4 | 133 |
| TFORF2334-CTNNB1 | 12 | TFORF1782-ZNF239 | 64 | TFORF2347-HOXD8 | 93 | TFORF0289-MEF2C | 134 |
| TFORF2360-ZNF641 | 12 | TFORF1893-AHRR | 64 | TFORF2702-ESRRG | 93 | TFORF0438-ZSCAN30 | 134 |
| TFORF2816-FOSB | 12 | TFORF1910-TCF7L2 | 64 | TFORF2726-ZFP1 | 93 | TFORF0571-MEOX1 | 134 |
| TFORF2821-IKZF5 | 12 | TFORF2006-CAPN15 | 64 | TFORF2806-ETV7 | 93 | TFORF0750-ZNF131 | 134 |
| TFORF3002-NFYC | 12 | TFORF2015-HMGXB4 | 64 | TFORF2862-SREBF1 | 93 | TFORF0809-SOHLH1 | 134 |
| TFORF3170-CNOT3 | 12 | TFORF2046-ARID3B | 64 | TFORF3272-PRDM4 | 93 | TFORF2125-ZNF747 | 134 |
| TFORF3395-TBX22 | 12 | TFORF2589-ZNF354A | 64 | TFORF3518-NHLH2 | 93 | TFORF2356-ZNF648 | 134 |
| TFORF3545-PIAS1 | 12 | TFORF2660-STAT1 | 64 | TFORF0401-ZNF2 | 94 | TFORF2387-MBD2 | 134 |
| TFORF0276-TCF3 | 13 | TFORF2719-ZNF79 | 64 | TFORF0406-CTCFL | 94 | TFORF2686-ZMYND11 | 134 |
| TFORF0780-GTF2H1 | 13 | TFORF2868-TADA3 | 64 | TFORF0534-ZNF584 | 94 | TFORF3351-ARNTL | 134 |
| TFORF1025-FOXI2 | 13 | TFORF2871-HMX1 | 64 | TFORF0797-ATF1 | 94 | TFORF0275-TCF3 | 135 |
| TFORF1133-CARF | 13 | TFORF2950-MAFB | 64 | TFORF1919-RUNX1 | 94 | TFORF0580-ZNF107 | 135 |
| TFORF1339-POU3F4 | 13 | TFORF3125-ZNF300 | 64 | TFORF2164-GRHL2 | 94 | TFORF0795-ATF7 | 135 |
| TFORF1416-ZNF215 | 13 | TFORF3130-IRF8 | 64 | TFORF0295-MEF2A | 95 | TFORF1038-WT1 | 135 |
| TFORF1480-TP63 | 13 | TFORF3198-OVOL2 | 64 | TFORF0445-ZNF805 | 95 | TFORF1652-SPI1 | 135 |
| TFORF2292-HES7 | 13 | TFORF3354-MXD1 | 64 | TFORF0789-DBX2 | 95 | TFORF1675-RUNX1T1 | 135 |
| TFORF2315-RXRB | 13 | TFORF3412-EGR1 | 64 | TFORF0991-KLF8 | 95 | TFORF1845-ALX4 | 135 |
| TFORF2365-ZNF398 | 13 | TFORF3444-KCNIP2 | 64 | TFORF1152-MYOCD | 95 | TFORF2779-BATF | 135 |
| TFORF2508-PML | 13 | TFORF3463-ETV7 | 64 | TFORF1179-ZNF799 | 95 | TFORF3101-PES1 | 135 |
| TFORF2574-HSF2 | 13 | TFORF3543-CSDC2 | 64 | TFORF1348-RPA2 | 95 | TFORF3305-ESR1 | 135 |
| TFORF2743-T | 13 | TFORF0208-FOXP2 | 65 | TFORF1854-ZBTB5 | 95 | TFORF0608-MAFA | 136 |
| TFORF2830-IKZF3 | 13 | TFORF0209-FOXP2 | 65 | TFORF1943-MIER1 | 95 | TFORF0721-ZNF727 | 136 |
| TFORF3160-SNAI3 | 13 | TFORF0210-FOXP2 | 65 | TFORF1954-ESR2 | 95 | TFORF1155-RERE | 136 |
| TFORF3405-KCNIP4 | 13 | TFORF0214-FOXP1 | 65 | TFORF1983-TBX5 | 95 | TFORF2901-DACH1 | 136 |
| TFORF0652-NR1I3 | 14 | TFORF0215-FOXP1 | 65 | TFORF2848-TCF21 | 95 | TFORF3157-SMARCD1 | 136 |
| TFORF1080-NOBOX | 14 | TFORF0216-FOXP1 | 65 | TFORF3300-MEIS2 | 95 | TFORF3517-SOX12 | 136 |
| TFORF1536-ZBTB44 | 14 | TFORF0220-FOXP4 | 65 | TFORF3313-ZBTB25 | 95 | TFORF0224-ZNF592 | 137 |
| TFORF1560-IL18 | 14 | TFORF0221-FOXP4 | 65 | TFORF3361-MSC | 95 | TFORF0443-ZFX | 137 |
| TFORF1584-ZNF775 | 14 | TFORF0549-PAX8 | 65 | TFORF0258-TCF4 | 96 | TFORF0457-TRIM24 | 137 |
| TFORF3406-ELOF1 | 14 | TFORF0624-NKRF | 65 | TFORF1078-NFATC4 | 96 | TFORF0803-ATF2 | 137 |
| TFORF3414-NEUROG1 | 14 | TFORF0744-PIAS2 | 65 | TFORF2213-CREB3L1 | 96 | TFORF0806-SMARCC2 | 137 |
| TFORF0599-ZNF891 | 15 | TFORF0997-ZNF302 | 65 | TFORF2275-SLC22A1 | 96 | TFORF0861-NR1H4 | 137 |
| TFORF0923-NR2F2 | 15 | TFORF1093-ZBTB8B | 65 | TFORF2533-SOX1 | 96 | TFORF0986-GZF1 | 137 |
| TFORF2108-L3MBTL4 | 15 | TFORF1365-ISL1 | 65 | TFORF2748-NKX6-3 | 96 | TFORF1064-NFATC1 | 137 |
| TFORF2698-ACTL6A | 15 | TFORF1413-ZNF561 | 65 | TFORF2934-TFEB | 96 | TFORF1095-EN1 | 137 |
| TFORF2955-HMG20B | 15 | TFORF1780-ZNF506 | 65 | TFORF3178-TFDP2 | 96 | TFORF1148-HOXA2 | 137 |
| TFORF3470-ZNF726 | 15 | TFORF2057-ARGFX | 65 | TFORF3388-YEATS4 | 96 | TFORF1321-KLF11 | 137 |
| TFORF1278-ZNF587 | 16 | TFORF2308-ETV1 | 65 | TFORF3443-SP4 | 96 | TFORF1374-ZNF143 | 137 |
| TFORF1876-CCNT1 | 16 | TFORF2309-ETV1 | 65 | TFORF0022-IRX3 | 97 | TFORF1585-ZNF772 | 137 |
| TFORF2019-MYBL2 | 16 | TFORF2310-ETV1 | 65 | TFORF0038-SP7 | 97 | TFORF1661-ARID5B | 137 |
| TFORF2634-TFDP2 | 16 | TFORF2401-NFE2L3 | 65 | TFORF0110-SMAD7 | 97 | TFORF1812-ZNF438 | 137 |
| TFORF2826-IKZF1 | 16 | TFORF3181-PATZ1 | 65 | TFORF0121-BARX2 | 97 | TFORF1873-BBX | 137 |
| TFORF3421-YBX2 | 16 | TFORF3334-SP100 | 65 | TFORF0149-THAP4 | 97 | TFORF1906-TCF7L2 | 137 |
| TFORF0021-IRX1 | 17 | TFORF1631-ZNF226 | 66 | TFORF0249-CAMTA2 | 97 | TFORF1999-TAL1 | 137 |
| TFORF0257-TCF4 | 17 | TFORF1804-ZNF347 | 66 | TFORF0256-TCF4 | 97 | TFORF2003-FOXD3 | 137 |
| TFORF1742-ZNF765 | 17 | TFORF1808-TBX18 | 66 | TFORF0342-ETF1 | 97 | TFORF2031-PRDM1 | 137 |
| TFORF2523-NRF1 | 17 | TFORF1924-ZBTB21 | 66 | TFORF0452-THRA | 97 | TFORF2139-ZNF527 | 137 |
| TFORF2710-DMRTA1 | 17 | TFORF2172-ZNF419 | 66 | TFORF0496-EGR2 | 97 | TFORF2272-PRDM5 | 137 |
| TFORF2809-ETV7 | 17 | TFORF2469-IRF8 | 66 | TFORF0526-PAX7 | 97 | TFORF2316-ETV4 | 137 |
| TFORF0838-ZSCAN18 | 18 | TFORF2495-ZBTB18 | 66 | TFORF0617-ZSCAN26 | 97 | TFORF2420-ZNF705B | 137 |
| TFORF1161-NFKBIL1 | 18 | TFORF2503-PML | 66 | TFORF0921-BSX | 97 | TFORF2445-ZIK1 | 137 |
| TFORF1488-NR6A1 | 18 | TFORF2514-PDCD2 | 66 | TFORF0937-SS18 | 97 | TFORF2536-SOX6 | 137 |
| TFORF1824-ZNF138 | 18 | TFORF2572-ZNF652 | 66 | TFORF0972-ZNF124 | 97 | TFORF2542-SOX5 | 137 |
| TFORF2406-NFE2L1 | 18 | TFORF2636-TFDP2 | 66 | TFORF1342-POU5F2 | 97 | TFORF2598-RORA | 137 |
| TFORF2919-NFIB | 18 | TFORF2649-ZNF586 | 66 | TFORF1466-HOXD12 | 97 | TFORF2609-FOXA2 | 137 |
| TFORF2980-FOXP3 | 18 | TFORF2677-GABPA | 66 | TFORF1542-ZNF286B | 97 | TFORF2744-T | 137 |
| TFORF2999-CDK2 | 18 | TFORF2703-ESRRA | 66 | TFORF1552-SP110 | 97 | TFORF2959-KAT2A | 137 |
| TFORF3169-GTF2I | 18 | TFORF2752-ZNF444 | 66 | TFORF1581-ATMIN | 97 | TFORF3037-IRF2 | 137 |
| TFORF3495-CLOCK | 18 | TFORF2804-ETV2 | 66 | TFORF1586-ZNF772 | 97 | TFORF0077-KCNIP4 | 138 |
| TFORF3510-TCF25 | 18 | TFORF2837-IKZF3 | 66 | TFORF1625-ZNF517 | 97 | TFORF0233-MNX1 | 138 |
| TFORF0898-ING1 | 19 | TFORF2943-ESRRG | 66 | TFORF1801-TBX10 | 97 | TFORF0370-NFYC | 138 |
| TFORF0989-KLF9 | 19 | TFORF2994-SKP2 | 66 | TFORF1819-ZNF138 | 97 | TFORF0595-PLAG1 | 138 |
| TFORF1385-TMF1 | 19 | TFORF3145-ZNF660 | 66 | TFORF1871-POU2F1 | 97 | TFORF0968-HAND1 | 138 |
| TFORF2507-PML | 19 | TFORF3203-ZNF526 | 66 | TFORF2105-ZBTB34 | 97 | TFORF0990-KLF8 | 138 |
| TFORF2613-ZNF276 | 19 | TFORF3419-ZNF562 | 66 | TFORF2146-ZNF529 | 97 | TFORF1067-NFATC2 | 138 |
| TFORF2993-SKP2 | 19 | TFORF3515-HDGF | 66 | TFORF2153-BCL11A | 97 | TFORF1250-ZNF133 | 138 |
| TFORF3298-EZH2 | 19 | TFORF0150-THAP5 | 67 | TFORF2173-ZNF419 | 97 | TFORF1403-ZNF566 | 138 |
| TFORF0188-DMRTC2 | 20 | TFORF0263-TCF4 | 67 | TFORF2184-ZNF415 | 97 | TFORF1484-TP63 | 138 |
| TFORF1329-TFAP2A | 20 | TFORF0312-CREM | 67 | TFORF2556-ADNP2 | 97 | TFORF1740-ZNF768 | 138 |
| TFORF1563-ZNF682 | 20 | TFORF0724-NFKB2 | 67 | TFORF2645-PAX3 | 97 | TFORF1907-TCF7L2 | 138 |
| TFORF1809-TBX19 | 20 | TFORF0959-ERF | 67 | TFORF2691-TEAD2 | 97 | TFORF2449-GBX1 | 138 |
| TFORF1978-TBX1 | 20 | TFORF1678-RUNX1T1 | 67 | TFORF2925-ZFP57 | 97 | TFORF2487-ZBTB10 | 138 |
| TFORF3015-PPARA | 20 | TFORF2910-NFIC | 67 | TFORF3041-SOX15 | 97 | TFORF2612-ZNF276 | 138 |
| TFORF0145-PHOX2B | 21 | TFORF2920-NFIB | 67 | TFORF3132-ESR2 | 97 | TFORF2797-TAF7 | 138 |
| TFORF0236-MYCN | 21 | TFORF2923-NFIA | 67 | TFORF3237-SOX10 | 97 | TFORF2944-SATB2 | 138 |
| TFORF0530-PAX6 | 21 | TFORF0078-KCNIP4 | 68 | TFORF3346-NHP2 | 97 | TFORF3090-ZNF260 | 138 |
| TFORF0673-ZNF827 | 21 | TFORF0080-KCNIP3 | 68 | TFORF3360-HOXB13 | 97 | TFORF3115-GSC | 138 |
| TFORF0739-ZNF155 | 21 | TFORF0271-TCF7 | 68 | TFORF3376-TOX | 97 | TFORF3122-SATB1 | 138 |
| TFORF1027-RARA | 21 | TFORF0379-SMARCA2 | 68 | TFORF3382-ZNF140 | 97 | TFORF3140-ZNF718 | 138 |
| TFORF2827-IKZF1 | 21 | TFORF0636-HOXC5 | 68 | TFORF3431-NR3C2 | 97 | TFORF3188-ZNF394 | 138 |
| TFORF2949-GCM2 | 21 | TFORF0802-ATF2 | 68 | TFORF3484-ZNF398 | 97 | TFORF3202-ZNF816 | 138 |
| TFORF0484-ZFP92 | 22 | TFORF0811-CDCA7L | 68 | TFORF0288-MEF2C | 98 | TFORF3223-ZMIZ2 | 138 |
| TFORF0957-ZNF497 | 22 | TFORF0858-VSX1 | 68 | TFORF0360-TUB | 98 | TFORF3263-ZNF26 | 138 |
| TFORF1314-AEBP2 | 22 | TFORF0931-MECP2 | 68 | TFORF0728-MLXIP | 98 | TFORF3269-EZH1 | 138 |
| TFORF1626-ZNF514 | 22 | TFORF1347-RPA3 | 68 | TFORF0775-ZNF92 | 98 | TFORF3276-ZBTB14 | 138 |
| TFORF1765-ZNF23 | 22 | TFORF1434-NFKBID | 68 | TFORF0814-LHX1 | 98 | TFORF3342-TP53BP2 | 138 |
| TFORF1945-MIER1 | 22 | TFORF1507-HEY1 | 68 | TFORF0815-LHX2 | 98 | TFORF3372-DAXX | 138 |
| TFORF2052-BCL6 | 22 | TFORF1549-TAZ | 68 | TFORF0816-LHX3 | 98 | TFORF3430-FXN | 138 |
| TFORF2060-NKX2-1 | 22 | TFORF1843-ALX1 | 68 | TFORF0818-LHX3 | 98 | TFORF3446-ZNF786 | 138 |
| TFORF2343-MITF | 22 | TFORF2030-TGIF2LX | 68 | TFORF0819-LHX5 | 98 | TFORF3469-ZNF438 | 138 |
| TFORF2383-MBD1 | 22 | TFORF2096-ZKSCAN1 | 68 | TFORF1459-LMX1A | 98 | TFORF0185-SHOX2 | 139 |
| TFORF2854-FEV | 22 | TFORF2120-HOPX | 68 | TFORF1460-LMX1B | 98 | TFORF0212-FOXP3 | 139 |
| TFORF2986-MECP2 | 22 | TFORF2130-PFDN5 | 68 | TFORF1461-LMX1B | 98 | TFORF0357-ZNF33A | 139 |
| TFORF3004-PCGF2 | 22 | TFORF2156-RHOXF2 | 68 | TFORF1462-LMX1B | 98 | TFORF0368-NFYC | 139 |
| TFORF3030-ZNF415 | 22 | TFORF2170-BHLHE22 | 68 | TFORF1471-TOX2 | 98 | TFORF0500-PPARGC1A | 139 |
| TFORF3059-FOSL1 | 22 | TFORF2194-TFAM | 68 | TFORF1670-TP73 | 98 | TFORF0940-ZNF639 | 139 |
| TFORF3060-BACH1 | 22 | TFORF2277-PRDM2 | 68 | TFORF1897-NR2C1 | 98 | TFORF1230-AFF3 | 139 |
| TFORF3189-ZNF558 | 22 | TFORF2413-ZNF268 | 68 | TFORF2367-MBD4 | 98 | TFORF1390-PMS1 | 139 |
| TFORF3318-TFCP2 | 22 | TFORF2939-HOXA6 | 68 | TFORF2386-MBD2 | 98 | TFORF1469-TOX3 | 139 |
| TFORF0201-RFX3 | 23 | TFORF3216-ATF2 | 68 | TFORF2465-IRF6 | 98 | TFORF1685-HNF1B | 139 |
| TFORF0277-TCF3 | 23 | TFORF3422-HES6 | 68 | TFORF2647-PAX3 | 98 | TFORF1720-DMRT2 | 139 |
| TFORF0584-SRF | 23 | TFORF3459-HMGB2 | 68 | TFORF3027-SP6 | 98 | TFORF1833-MTERF1 | 139 |
| TFORF0629-NR1I2 | 23 | TFORF0107-TRERF1 | 69 | TFORF3179-LHX9 | 98 | TFORF1859-NR4A3 | 139 |
| TFORF0913-ZNF835 | 23 | TFORF0300-CREM | 69 | TFORF3212-ZKSCAN1 | 98 | TFORF1972-TBX2 | 139 |
| TFORF1853-ZBTB1 | 23 | TFORF0305-CREM | 69 | TFORF0296-MEF2A | 99 | TFORF2259-SOX13 | 139 |
| TFORF2033-OSR1 | 23 | TFORF0315-CREM | 69 | TFORF0820-LHX6 | 99 | TFORF2638-TFDP1 | 139 |
| TFORF2577-HSF4 | 23 | TFORF0622-ZSCAN23 | 69 | TFORF0821-LHX6 | 99 | TFORF3209-ZBTB9 | 139 |
| TFORF2628-NONO | 23 | TFORF0631-TERF1 | 69 | TFORF0822-LHX6 | 99 | TFORF3217-ZNF227 | 139 |
| TFORF3064-TERF1 | 23 | TFORF1107-ZNF37A | 69 | TFORF0824-LHX8 | 99 | TFORF3268-ZNF34 | 139 |
| TFORF0052-MAZ | 24 | TFORF1430-NFKBIB | 69 | TFORF0825-LHX8 | 99 | TFORF3453-PREB | 139 |
| TFORF0268-TCF4 | 24 | TFORF1472-TOX2 | 69 | TFORF1825-ARNT | 99 | TFORF3524-MAEL | 139 |
| TFORF0688-PRDM10 | 24 | TFORF1520-NR2E1 | 69 | TFORF2058-NKX2-2 | 99 | TFORF0197-RFX1 | 140 |
| TFORF0929-ATOH8 | 24 | TFORF1820-ZNF138 | 69 | TFORF2625-CRTC3 | 99 | TFORF0767-ZNF550 | 140 |
| TFORF1075-NFATC4 | 24 | TFORF1832-MTERF1 | 69 | TFORF2873-ELF1 | 99 | TFORF0846-YBX1 | 140 |
| TFORF1251-ZNF133 | 24 | TFORF1965-PPARD | 69 | TFORF3233-JUNB | 99 | TFORF1116-RCOR1 | 140 |
| TFORF1267-ZNF135 | 24 | TFORF2021-NPAS4 | 69 | TFORF0674-ZNF829 | 100 | TFORF1400-ZNF567 | 140 |
| TFORF1336-POU3F1 | 24 | TFORF2023-NPAS3 | 69 | TFORF1012-ZNF546 | 100 | TFORF1687-HNF1B | 140 |
| TFORF1570-ZNF680 | 24 | TFORF2049-PURA | 69 | TFORF1517-FOXD4L4 | 100 | TFORF1694-E4F1 | 140 |
| TFORF1702-E2F4 | 24 | TFORF2191-RAX2 | 69 | TFORF1641-PSIP1 | 100 | TFORF1732-HDX | 140 |
| TFORF2053-BCL6 | 24 | TFORF2208-CREB3L2 | 69 | TFORF2375-MBD1 | 100 | TFORF1796-WDHD1 | 140 |
| TFORF2643-PAX3 | 24 | TFORF2314-RXRB | 69 | TFORF2381-MBD1 | 100 | TFORF2163-GRHL2 | 140 |
| TFORF2685-ZMYND11 | 24 | TFORF2359-ZNF644 | 69 | TFORF2530-SOX8 | 100 | TFORF2858-ID3 | 140 |
| TFORF3013-MEF2A | 24 | TFORF2384-MBD3 | 69 | TFORF2671-NEUROD4 | 100 | TFORF2926-BCL6B | 140 |
| TFORF3092-NPAS1 | 24 | TFORF2557-ZNF69 | 69 | TFORF2945-NEUROD1 | 100 | TFORF2962-NR2C2 | 140 |
| TFORF3232-JUNB | 24 | TFORF2687-ZMYND11 | 69 | TFORF3260-ZNF524 | 100 | TFORF2979-NR0B2 | 140 |
| TFORF0103-LEUTX | 25 | TFORF2704-ESRRA | 69 | TFORF0010-ZNF879 | 101 | TFORF3088-E4F1 | 140 |
| TFORF0400-ZNF2 | 25 | TFORF2860-ID1 | 69 | TFORF0391-FERD3L | 101 | TFORF3097-ZNF76 | 140 |
| TFORF0899-ING1 | 25 | TFORF2903-DACH1 | 69 | TFORF0577-GTF2A1L | 101 | TFORF3124-SMAD3 | 140 |
| TFORF1240-LBX2 | 25 | TFORF3006-ZBTB12 | 69 | TFORF0616-ZSCAN26 | 101 | TFORF3204-LITAF | 140 |
| TFORF1774-ZNF500 | 25 | TFORF3035-NFKBIB | 69 | TFORF0639-HOXC6 | 101 | TFORF3227-RPA2 | 140 |
| TFORF1946-MIER1 | 25 | TFORF3049-CDK1 | 69 | TFORF1150-CDK7 | 101 | TFORF3286-NR2F6 | 140 |
| TFORF2221-YAP1 | 25 | TFORF3051-CDK1 | 69 | TFORF1223-ZNF483 | 101 | TFORF3516-RNF138 | 140 |
| TFORF2264-ZNF286A | 25 | TFORF3238-GTF2A1 | 69 | TFORF1502-GABPB1 | 101 | TFORF0157-EWSR1 | 141 |
| TFORF2368-MBD4 | 25 | TFORF3244-ZNF483 | 69 | TFORF2322-ZNF736 | 101 | TFORF0175-RELA | 141 |
| TFORF2502-PML | 25 | TFORF3316-MED21 | 69 | TFORF2355-PROP1 | 101 | TFORF0245-CAMTA2 | 141 |
| TFORF2578-MEIS3 | 25 | TFORF3373-ZNF101 | 69 | TFORF2684-ZMYND11 | 101 | TFORF0369-NFYC | 141 |
| TFORF2690-TEAD2 | 25 | TFORF3396-TARBP2 | 69 | TFORF2989-SLC45A2 | 101 | TFORF0412-CTCFL | 141 |
| TFORF3036-ATF4 | 25 | TFORF3410-ZKSCAN4 | 69 | TFORF3079-ZNF846 | 101 | TFORF0554-ZNF610 | 141 |
| TFORF0520-PAX5 | 26 | TFORF0018-IRX4 | 70 | TFORF0164-SIX4 | 102 | TFORF0585-ZNF329 | 141 |
| TFORF0535-ZNF584 | 26 | TFORF0099-HLF | 70 | TFORF0172-ONECUT2 | 102 | TFORF0749-ZNF131 | 141 |
| TFORF1465-VAV1 | 26 | TFORF0111-SMAD7 | 70 | TFORF0686-PRDM10 | 102 | TFORF0786-FOXN1 | 141 |
| TFORF1658-LEF1 | 26 | TFORF0148-THAP4 | 70 | TFORF0745-PIAS2 | 102 | TFORF0884-HOXB4 | 141 |
| TFORF1856-NR4A2 | 26 | TFORF0178-HDGF | 70 | TFORF1334-POU3F3 | 102 | TFORF0902-PTF1A | 141 |
| TFORF2462-IRF7 | 26 | TFORF0205-DBP | 70 | TFORF1659-LEF1 | 102 | TFORF0946-LMO3 | 141 |
| TFORF2822-IKZF4 | 26 | TFORF0211-FOXP3 | 70 | TFORF1799-USF2 | 102 | TFORF1007-ZNF544 | 141 |
| TFORF2911-NFIC | 26 | TFORF0225-ZNF593 | 70 | TFORF2376-MBD1 | 102 | TFORF1011-ZNF546 | 141 |
| TFORF3234-VSX1 | 26 | TFORF0280-IGFBP1 | 70 | TFORF2499-ASCL5 | 102 | TFORF1132-BNC1 | 141 |
| TFORF0151-THAP5 | 27 | TFORF0307-CREM | 70 | TFORF3100-ZNF212 | 102 | TFORF1315-ZNF813 | 141 |
| TFORF1032-RARG | 27 | TFORF0310-CREM | 70 | TFORF3106-CCNH | 102 | TFORF1340-POU5F1 | 141 |
| TFORF1698-E2F6 | 27 | TFORF0314-CREM | 70 | TFORF0895-ING4 | 103 | TFORF1361-SP100 | 141 |
| TFORF2391-ZNF461 | 27 | TFORF0351-FOXL2 | 70 | TFORF1147-HOXA3 | 103 | TFORF1405-ZNF566 | 141 |
| TFORF2736-PLK4 | 27 | TFORF0539-ZNF589 | 70 | TFORF1483-TP63 | 103 | TFORF1523-NFRKB | 141 |
| TFORF3102-ZNF689 | 27 | TFORF0592-FOXO4 | 70 | TFORF1638-BNIP3 | 103 | TFORF1569-ZNF680 | 141 |
| TFORF3338-HDAC1 | 27 | TFORF0615-ZSCAN26 | 70 | TFORF2276-SLC22A1 | 103 | TFORF1579-ZNF778 | 141 |
| TFORF0014-ZNF707 | 28 | TFORF0653-NR1I3 | 70 | TFORF2332-ZNF492 | 103 | TFORF1601-ZNF195 | 141 |
| TFORF0075-KCNIP4 | 28 | TFORF0717-TEF | 70 | TFORF2884-FIGLA | 103 | TFORF1617-NF1 | 141 |
| TFORF0115-SMAD3 | 28 | TFORF0733-PROX2 | 70 | TFORF3083-FOSL2 | 103 | TFORF1647-ZNF358 | 141 |
| TFORF0509-TSHZ2 | 28 | TFORF0792-TARBP2 | 70 | TFORF3548-THAP10 | 103 | TFORF1648-ZNF429 | 141 |
| TFORF0903-SPDEF | 28 | TFORF0875-GLMP | 70 | TFORF0564-ZNF619 | 104 | TFORF1674-RUNX1T1 | 141 |
| TFORF0966-ZNF493 | 28 | TFORF0876-GLMP | 70 | TFORF1216-NHLH1 | 104 | TFORF1755-ZNF182 | 141 |
| TFORF0993-KLF8 | 28 | TFORF0932-ZNF80 | 70 | TFORF1748-ZNF763 | 104 | TFORF1766-ZNF23 | 141 |
| TFORF1018-ZNF548 | 28 | TFORF0960-ERG | 70 | TFORF1870-POU2F1 | 104 | TFORF1793-CNBP | 141 |
| TFORF1074-NFATC4 | 28 | TFORF1052-HKR1 | 70 | TFORF1994-ZHX1 | 104 | TFORF1949-MIER2 | 141 |
| TFORF1275-TPRX1 | 28 | TFORF1091-ZBTB8A | 70 | TFORF2093-ZFP14 | 104 | TFORF1970-ZNF233 | 141 |
| TFORF1360-SP100 | 28 | TFORF1144-HOXA7 | 70 | TFORF2479-MESP2 | 104 | TFORF2040-TP53BP2 | 141 |
| TFORF1373-ZNF143 | 28 | TFORF1200-SETDB1 | 70 | TFORF0035-SP3 | 105 | TFORF2070-MYB | 141 |
| TFORF1380-ZNF787 | 28 | TFORF1214-FOXH1 | 70 | TFORF0338-MECOM | 105 | TFORF2175-ZNF419 | 141 |
| TFORF1422-ZNF211 | 28 | TFORF1222-ZNF483 | 70 | TFORF0881-HOXB3 | 105 | TFORF2209-CREB3L3 | 141 |
| TFORF1518-FOXD4L5 | 28 | TFORF1259-TP53 | 70 | TFORF1058-NFATC1 | 105 | TFORF2302-CIITA | 141 |
| TFORF1989-ZNF530 | 28 | TFORF1383-ZNF788 | 70 | TFORF1124-E2F7 | 105 | TFORF2441-FUS | 141 |
| TFORF2160-TXK | 28 | TFORF1445-GTF2H3 | 70 | TFORF2764-ZKSCAN5 | 105 | TFORF2488-ZBTB10 | 141 |
| TFORF2189-ZNF410 | 28 | TFORF1671-TP73 | 70 | TFORF3401-GTF2B | 105 | TFORF2519-ZFP37 | 141 |
| TFORF2227-ZNF343 | 28 | TFORF1822-ZNF138 | 70 | TFORF3402-HSFY2 | 105 | TFORF2538-SOX4 | 141 |
| TFORF2481-MXD4 | 28 | TFORF1847-ETS1 | 70 | TFORF0130-HMGB3 | 106 | TFORF2627-NONO | 141 |
| TFORF2494-ZBTB18 | 28 | TFORF1851-ZBTB3 | 70 | TFORF0770-MSX2 | 106 | TFORF2644-PAX3 | 141 |
| TFORF2573-HSF2 | 28 | TFORF1861-DRGX | 70 | TFORF1167-EBF3 | 106 | TFORF2768-KDM5D | 141 |
| TFORF2692-TEAD1 | 28 | TFORF1882-SOX30 | 70 | TFORF1168-EBF2 | 106 | TFORF2833-IKZF3 | 141 |
| TFORF2711-ZNF710 | 28 | TFORF1900-PATZ1 | 70 | TFORF1695-ZNF114 | 106 | TFORF2845-TCF24 | 141 |
| TFORF3086-STAT1 | 28 | TFORF1902-TCF7L2 | 70 | TFORF2224-YAP1 | 106 | TFORF2880-ELF2 | 141 |
| TFORF3218-FOXN3 | 28 | TFORF2305-ETV1 | 70 | TFORF2659-STAT2 | 106 | TFORF2888-BRPF1 | 141 |
| TFORF3262-CEBPE | 28 | TFORF2321-TAF1A | 70 | TFORF3022-RXRG | 106 | TFORF2936-FOS | 141 |
| TFORF3285-FEZF1 | 28 | TFORF2337-ZNF18 | 70 | TFORF3058-EBF1 | 106 | TFORF2973-PPARD | 141 |
| TFORF3407-ZNF397 | 28 | TFORF2450-MLLT10 | 70 | TFORF3073-LMO2 | 106 | TFORF3061-SNAPC3 | 141 |
| TFORF3439-FOXI1 | 28 | TFORF2464-IRF6 | 70 | TFORF0088-ZNF408 | 107 | TFORF3081-ELK3 | 141 |
| TFORF3468-PKNOX1 | 28 | TFORF2555-SUZ12 | 70 | TFORF0104-SMAD9 | 107 | TFORF3098-ZNF467 | 141 |
| TFORF0020-IRX6 | 29 | TFORF2646-PAX3 | 70 | TFORF0123-OLIG2 | 107 | TFORF3190-ZNF554 | 141 |
| TFORF0343-ETF1 | 29 | TFORF2663-STOX1 | 70 | TFORF0521-PAX5 | 107 | TFORF3197-STAT5A | 141 |
| TFORF0644-NR1I3 | 29 | TFORF2670-NEUROD2 | 70 | TFORF0576-HOXA10 | 107 | TFORF3295-SPDEF | 141 |
| TFORF0645-NR1I3 | 29 | TFORF2672-CHURC1 | 70 | TFORF1166-EBF4 | 107 | TFORF3369-BLZF1 | 141 |
| TFORF0697-BATF2 | 29 | TFORF2673-CHURC1 | 70 | TFORF1433-NR3C1 | 107 | TFORF3478-FOXD4 | 141 |
| TFORF0810-SOHLH1 | 29 | TFORF2694-ELF5 | 70 | TFORF1522-NR2E3 | 107 | TFORF3507-NOCT | 141 |
| TFORF1037-WT1 | 29 | TFORF2695-ELF5 | 70 | TFORF2938-SOX5 | 107 | TFORF0114-SMAD3 | 142 |
| TFORF1663-ARID5A | 29 | TFORF2701-ESRRG | 70 | TFORF3074-LMO2 | 107 | TFORF0352-FOXL1 | 142 |
| TFORF2236-GATA4 | 29 | TFORF2802-ETV2 | 70 | TFORF3195-ONECUT1 | 107 | TFORF0667-TGFB1I1 | 142 |
| TFORF2267-ARNT2 | 29 | TFORF2844-HNRNPK | 70 | TFORF3475-IL18 | 107 | TFORF0793-ATF5 | 142 |
| TFORF2759-L3MBTL1 | 29 | TFORF2853-HMGA2 | 70 | TFORF0869-NR1H3 | 108 | TFORF1077-NFATC4 | 142 |
| TFORF2867-TADA3 | 29 | TFORF3257-ZNF800 | 70 | TFORF0891-ING4 | 108 | TFORF1098-UBP1 | 142 |
| TFORF2906-DACH2 | 29 | TFORF3258-TAF12 | 70 | TFORF1718-LDB1 | 108 | TFORF1264-ZNF135 | 142 |
| TFORF3024-HEY2 | 29 | TFORF3447-MYCBP | 70 | TFORF1956-ESR2 | 108 | TFORF1567-ZNF683 | 142 |
| TFORF3057-YAF2 | 29 | TFORF3460-PSMB1 | 70 | TFORF2583-MIXL1 | 108 | TFORF1839-EZH2 | 142 |
| TFORF3392-CNBP | 29 | TFORF3513-GLMP | 70 | TFORF3546-TSC22D3 | 108 | TFORF2133-MNAT1 | 142 |
| TFORF3498-APEX1 | 29 | TFORF0189-RFX8 | 71 | TFORF0716-ZNF621 | 109 | TFORF2320-TAF1A | 142 |
| TFORF0170-ZNF587B | 30 | TFORF0203-ELK1 | 71 | TFORF0979-KLF7 | 109 | TFORF2460-IRF7 | 142 |
| TFORF1285-ZNF257 | 30 | TFORF2674-CHURC1 | 71 | TFORF1328-TFAP2A | 109 | TFORF2461-IRF7 | 142 |
| TFORF1908-TCF7L2 | 30 | TFORF3490-TCF23 | 71 | TFORF1331-TFAP2B | 109 | TFORF3139-PPARG | 142 |
| TFORF2369-MBD4 | 30 | TFORF0439-ZSCAN30 | 72 | TFORF1332-TFAP2E | 109 | TFORF0294-MEF2A | 143 |
| TFORF2620-CRX | 30 | TFORF0506-CDK2 | 72 | TFORF1635-HOXC11 | 109 | TFORF0980-KLF7 | 143 |
| TFORF2697-ZFP42 | 30 | TFORF0541-GCFC2 | 72 | TFORF1644-ZNF425 | 109 | TFORF1598-ZNF195 | 143 |
| TFORF3114-BHLHA15 | 30 | TFORF0834-HSFY1 | 72 | TFORF1939-MEIS1 | 109 | TFORF2027-NPAS2 | 143 |
| TFORF3158-SMARCB1 | 30 | TFORF0870-NR1H3 | 72 | TFORF2064-NKX2-5 | 109 | TFORF2051-ATF6B | 143 |
| TFORF3284-PBX3 | 30 | TFORF1029-RARB | 72 | TFORF2161-GRHL1 | 109 | TFORF2751-ZNF444 | 143 |
| TFORF0051-MAZ | 31 | TFORF1194-ZNF575 | 72 | TFORF2165-GRHL3 | 109 | TFORF2898-MTA3 | 143 |
| TFORF0059-CTBP1 | 31 | TFORF1258-TP53 | 72 | TFORF2168-GRHL3 | 109 | TFORF0101-FOXC2 | 144 |
| TFORF0167-SIX1 | 31 | TFORF1449-DLX4 | 72 | TFORF2193-TFAM | 109 | TFORF0105-TRERF1 | 144 |
| TFORF0887-ZNF384 | 31 | TFORF1933-MEIS2 | 72 | TFORF2218-YAP1 | 109 | TFORF0273-TCF3 | 144 |
| TFORF1110-ISX | 31 | TFORF1957-ESR2 | 72 | TFORF2266-ANHX | 109 | TFORF0482-DMRTB1 | 144 |
| TFORF1112-RCOR3 | 31 | TFORF1966-PPARD | 72 | TFORF2700-ESRRG | 109 | TFORF1005-POU1F1 | 144 |
| TFORF1172-ZNF157 | 31 | TFORF2177-ZNF419 | 72 | TFORF2755-ZNF440 | 109 | TFORF1048-PLAGL2 | 144 |
| TFORF1304-ZMIZ2 | 31 | TFORF2286-HES4 | 72 | TFORF2795-ZNF283 | 109 | TFORF1272-DUXA | 144 |
| TFORF1503-GABPB1 | 31 | TFORF2580-MEIS3 | 72 | TFORF2839-IKZF3 | 109 | TFORF1355-ILF3 | 144 |
| TFORF1568-ZNF683 | 31 | TFORF0047-MAX | 73 | TFORF2932-TFAP2A | 109 | TFORF1537-ZBTB45 | 144 |
| TFORF1771-TBP | 31 | TFORF0100-NOV | 73 | TFORF3127-NFIL3 | 109 | TFORF1815-ZNF433 | 144 |
| TFORF2395-ZNF396 | 31 | TFORF0146-THAP1 | 73 | TFORF0008-ZNF709 | 110 | TFORF1931-XRCC6 | 144 |
| TFORF2836-IKZF3 | 31 | TFORF0207-FOXP2 | 73 | TFORF0009-ZNF708 | 110 | TFORF2094-DEK | 144 |
| TFORF3355-FOXN2 | 31 | TFORF0494-ZSCAN2 | 73 | TFORF0030-ZNF43 | 110 | TFORF2199-RXRA | 144 |
| TFORF0116-FOXM1 | 32 | TFORF0642-NR1I3 | 73 | TFORF0106-TRERF1 | 110 | TFORF2723-ZNF76 | 144 |
| TFORF0583-ZNF324 | 32 | TFORF0944-LMO3 | 73 | TFORF0259-TCF4 | 110 | TFORF2777-KDM5C | 144 |
| TFORF1684-HNF1B | 32 | TFORF1028-RARA | 73 | TFORF0544-ZFAT | 110 | TFORF2840-IKZF3 | 144 |
| TFORF1688-HNF1A | 32 | TFORF1149-HOXA1 | 73 | TFORF0725-NFKB2 | 110 | TFORF2951-TWIST2 | 144 |
| TFORF1689-HNF1A | 32 | TFORF1226-DUX4 | 73 | TFORF1301-HMG20A | 110 | TFORF3448-TP63 | 144 |
| TFORF1865-POU2F2 | 32 | TFORF1963-CUX1 | 73 | TFORF1424-ZNF211 | 110 | TFORF0029-ZNF43 | 145 |
| TFORF2110-NR4A1 | 32 | TFORF2485-MXD1 | 73 | TFORF1490-NR6A1 | 110 | TFORF0113-SMAD3 | 145 |
| TFORF0086-LIN28B | 33 | TFORF2552-BID | 73 | TFORF1499-RBL1 | 110 | TFORF0287-MEF2C | 145 |
| TFORF0299-CREM | 33 | TFORF0297-CREM | 74 | TFORF1500-RBL2 | 110 | TFORF0620-ZSCAN21 | 145 |
| TFORF0638-HOXC6 | 33 | TFORF0364-TCEB1 | 74 | TFORF1521-NR2E3 | 110 | TFORF0687-PRDM10 | 145 |
| TFORF0839-HSFY2 | 33 | TFORF0522-PAX5 | 74 | TFORF1580-ZNF778 | 110 | TFORF0758-OVOL3 | 145 |
| TFORF1772-TBP | 33 | TFORF0604-PUF60 | 74 | TFORF1622-ZNF513 | 110 | TFORF0856-VSX1 | 145 |
| TFORF2455-IRF3 | 33 | TFORF0830-SLC45A2 | 74 | TFORF1789-ZNF232 | 110 | TFORF0934-ZNF85 | 145 |
| TFORF3226-FGF3 | 33 | TFORF1170-MLX | 74 | TFORF1971-YY2 | 110 | TFORF1055-PLAGL1 | 145 |
| TFORF0587-NMI | 34 | TFORF1544-ZNF160 | 74 | TFORF2055-CDX1 | 110 | TFORF1066-NFATC2 | 145 |
| TFORF0651-NR1I3 | 34 | TFORF1630-ZNF226 | 74 | TFORF2127-ZNF746 | 110 | TFORF1090-TULP1 | 145 |
| TFORF1096-EN2 | 34 | TFORF1668-TP73 | 74 | TFORF2738-PLK4 | 110 | TFORF1587-ZNF772 | 145 |
| TFORF1519-FOXD4L6 | 34 | TFORF1756-ZNF189 | 74 | TFORF2811-ETV7 | 110 | TFORF1593-ZNF197 | 145 |
| TFORF1557-YAF2 | 35 | TFORF2141-ZNF525 | 74 | TFORF2823-IKZF1 | 110 | TFORF1650-ZSCAN5A | 145 |
| TFORF1717-LDB1 | 35 | TFORF2171-BHLHE23 | 74 | TFORF2838-IKZF3 | 110 | TFORF1667-TP73 | 145 |
| TFORF2231-EHF | 35 | TFORF2216-NOTO | 74 | TFORF2895-MTA1 | 110 | TFORF1705-E2F2 | 145 |
| TFORF3279-LMO1 | 35 | TFORF2291-HES6 | 74 | TFORF2907-DACH2 | 110 | TFORF1726-ZNF692 | 145 |
| TFORF0462-CREB5 | 36 | TFORF2662-STOX1 | 74 | TFORF2963-NR2C2 | 110 | TFORF1763-ZNF26 | 145 |
| TFORF0746-PIAS3 | 36 | TFORF2792-ZNF282 | 74 | TFORF3008-CDX2 | 110 | TFORF1926-ZBTB25 | 145 |
| TFORF1450-DLX6 | 36 | TFORF3063-FOXP1 | 74 | TFORF3291-CDK9 | 110 | TFORF1927-ZNF75D | 145 |
| TFORF1660-LEF1 | 36 | TFORF0133-ZNF780A | 75 | TFORF3320-HDX | 110 | TFORF1982-TBX5 | 145 |
| TFORF2273-PRDM6 | 36 | TFORF0177-HDGF | 75 | TFORF3400-GMEB1 | 110 | TFORF2119-HOPX | 145 |
| TFORF2397-ZNF397 | 36 | TFORF0451-THRA | 75 | TFORF3462-BRPF1 | 110 | TFORF2182-ZNF415 | 145 |
| TFORF3001-DR1 | 36 | TFORF0855-VSX1 | 75 | TFORF3477-POU5F1 | 110 | TFORF2262-ZFP28 | 145 |
| TFORF0235-MYCN | 37 | TFORF0867-NR1H2 | 75 | TFORF0247-CAMTA2 | 111 | TFORF2307-ETV1 | 145 |
| TFORF0597-SMARCB1 | 37 | TFORF0889-ZNF384 | 75 | TFORF0440-ZFY | 111 | TFORF2410-ZNF705G | 145 |
| TFORF0628-NR1I2 | 37 | TFORF0890-ING4 | 75 | TFORF0456-HOXD9 | 111 | TFORF2458-IRF3 | 145 |
| TFORF1042-TSC22D1 | 37 | TFORF0936-SS18 | 75 | TFORF0465-NKX1-1 | 111 | TFORF2648-PAX3 | 145 |
| TFORF1125-ENO1 | 37 | TFORF1218-PRRX1 | 75 | TFORF1060-NFATC1 | 111 | TFORF2667-ZBED4 | 145 |
| TFORF1169-EBF1 | 37 | TFORF1262-TP53 | 75 | TFORF1604-HINFP | 111 | TFORF2727-ZFP1 | 145 |
| TFORF1713-LDB2 | 37 | TFORF1327-KLF14 | 75 | TFORF1785-ZNF235 | 111 | TFORF2761-ZKSCAN3 | 145 |
| TFORF3180-RARG | 37 | TFORF1452-DLX1 | 75 | TFORF3093-ZNF574 | 111 | TFORF2787-DCP1A | 145 |
| TFORF3247-LEF1 | 37 | TFORF1527-MXI1 | 75 | TFORF3290-CTCF | 111 | TFORF2931-LHX4 | 145 |
| TFORF3514-PURB | 37 | TFORF1548-TAZ | 75 | TFORF3427-NFIB | 111 | TFORF3047-ZNF266 | 145 |
| TFORF0495-EGR2 | 38 | TFORF1709-ZFP41 | 75 | TFORF3547-CBFB | 111 | TFORF3103-HOXA1 | 145 |
| TFORF0832-GTF2F1 | 38 | TFORF1762-ZNF24 | 75 | TFORF0405-CTCFL | 112 | TFORF3214-ZNF484 | 145 |
| TFORF0880-HOXB3 | 38 | TFORF1996-ZNF248 | 75 | TFORF0924-NR2F2 | 112 | TFORF0142-FXN | 146 |
| TFORF0927-DDB2 | 38 | TFORF2296-TAF11 | 75 | TFORF1426-FOXK2 | 112 | TFORF0262-TCF4 | 146 |
| TFORF1935-MEIS2 | 38 | TFORF3239-HOXB5 | 75 | TFORF1468-HOXD11 | 112 | TFORF0303-CREM | 146 |
| TFORF2477-OXSR1 | 38 | TFORF3389-ZNF580 | 75 | TFORF1475-LIN54 | 112 | TFORF0550-PAX8 | 146 |
| TFORF2492-ZBTB17 | 38 | TFORF0034-SP2 | 76 | TFORF1505-ZNF696 | 112 | TFORF0783-SEBOX | 146 |
| TFORF0527-PAX7 | 39 | TFORF0060-CTBP2 | 76 | TFORF1758-ZNF189 | 112 | TFORF0828-ZNF585B | 146 |
| TFORF1823-ZNF138 | 39 | TFORF0424-PBX3 | 76 | TFORF1864-POU2F2 | 112 | TFORF1059-NFATC1 | 146 |
| TFORF2050-ATF6B | 39 | TFORF0528-PAX6 | 76 | TFORF1916-RUNX2 | 112 | TFORF1417-ZNF214 | 146 |
| TFORF2683-ZMYND11 | 39 | TFORF0829-SLC45A2 | 76 | TFORF2149-ZNF250 | 112 | TFORF1642-ZNF426 | 146 |
| TFORF0176-RELA | 40 | TFORF1035-WT1 | 76 | TFORF2200-POU4F1 | 112 | TFORF1656-SPIB | 146 |
| TFORF0469-KAT7 | 40 | TFORF1320-KLF11 | 76 | TFORF2274-SLC22A1 | 112 | TFORF2128-ZNF740 | 146 |
| TFORF0714-ZNF620 | 40 | TFORF1591-CTCF | 76 | TFORF2541-SOX5 | 112 | TFORF2610-FOXA2 | 146 |
| TFORF1087-TULP3 | 40 | TFORF1600-ZNF195 | 76 | TFORF3056-THRB | 112 | TFORF2721-ZNF79 | 146 |
| TFORF1196-ZNF577 | 40 | TFORF1929-XRCC4 | 76 | TFORF3210-VSX2 | 112 | TFORF2983-SUZ12 | 146 |
| TFORF1324-KLF17 | 40 | TFORF2176-ZNF419 | 76 | TFORF3236-E2F8 | 112 | TFORF3149-ZNF254 | 146 |
| TFORF1381-ZNF789 | 40 | TFORF2297-TAF10 | 76 | TFORF3493-ZNF791 | 112 | TFORF3297-HIF1A | 146 |
| TFORF1818-UHRF1 | 40 | TFORF2483-CBX2 | 76 | TFORF0002-HIF3A | 113 | TFORF0168-SIX2 | 147 |
| TFORF1842-YWHAZ | 40 | TFORF2835-IKZF3 | 76 | TFORF0190-RFX4 | 113 | TFORF0226-ZNF593 | 147 |
| TFORF1961-CUX1 | 40 | TFORF2935-MAFK | 76 | TFORF0318-ZNF117 | 113 | TFORF0347-FOXB1 | 147 |
| TFORF2261-DMAP1 | 40 | TFORF3050-CDK1 | 76 | TFORF0497-EGR3 | 113 | TFORF0427-PBX1 | 147 |
| TFORF2378-MBD1 | 40 | TFORF3148-NFE2 | 76 | TFORF0684-PRDM13 | 113 | TFORF0572-MEOX1 | 147 |
| TFORF2463-IRF7 | 40 | TFORF3228-MAX | 76 | TFORF0866-GTF2I | 113 | TFORF0573-MEOX2 | 147 |
| TFORF2614-ZNF275 | 40 | TFORF3383-NFKBID | 76 | TFORF0896-ZNF383 | 113 | TFORF0593-UNCX | 147 |
| TFORF2681-ZMYND11 | 40 | TFORF0144-PHOX2A | 77 | TFORF1006-ZNF564 | 113 | TFORF0715-ZNF620 | 147 |
| TFORF2971-NR1H4 | 40 | TFORF0194-RFX6 | 77 | TFORF1062-NFATC1 | 113 | TFORF0778-SHOX | 147 |
| TFORF3264-ARNTL2 | 40 | TFORF0319-MSLN | 77 | TFORF1572-ZNF687 | 113 | TFORF0945-LMO3 | 147 |
| TFORF0061-CTBP2 | 41 | TFORF0723-NFKB1 | 77 | TFORF1737-ZBTB7B | 113 | TFORF1008-ZNF544 | 147 |
| TFORF0097-PSMD14 | 41 | TFORF0747-PIAS1 | 77 | TFORF1768-ZNF28 | 113 | TFORF1220-HELT | 147 |
| TFORF0286-MEF2C | 41 | TFORF0873-HOXB8 | 77 | TFORF2026-NPAS3 | 113 | TFORF1429-NR3C2 | 147 |
| TFORF0422-PBX2 | 41 | TFORF0906-DNAJC2 | 77 | TFORF2117-TBPL2 | 113 | TFORF1830-ZNF717 | 147 |
| TFORF0777-SHOX | 41 | TFORF0954-CDIP1 | 77 | TFORF2282-MYBBP1A | 113 | TFORF1969-ZNF233 | 147 |
| TFORF2054-BCL3 | 41 | TFORF1254-TP53 | 77 | TFORF2364-CREB1 | 113 | TFORF2300-HIC1 | 147 |
| TFORF2129-ZNF749 | 41 | TFORF1274-PKNOX1 | 77 | TFORF2471-HDAC5 | 113 | TFORF2348-HOXD8 | 147 |
| TFORF2210-CREB3L3 | 41 | TFORF1456-TFEC | 77 | TFORF2708-ARX | 113 | TFORF2447-ZIK1 | 147 |
| TFORF2243-LITAF | 41 | TFORF1476-VAX1 | 77 | TFORF2774-KDM5C | 113 | TFORF2484-CBX2 | 147 |
| TFORF2570-TGIF1 | 41 | TFORF1558-YAF2 | 77 | TFORF3166-ZNF512B | 113 | TFORF2496-ASCL3 | 147 |
| TFORF2588-CERS5 | 41 | TFORF1673-TP73 | 77 | TFORF3219-ZNF677 | 113 | TFORF2497-ASCL1 | 147 |
| TFORF2767-ZKSCAN7 | 41 | TFORF1733-ZNF169 | 77 | TFORF3256-ZNF189 | 113 | TFORF2498-ASCL4 | 147 |
| TFORF3042-TAF9 | 41 | TFORF1795-CNBP | 77 | TFORF3340-HDAC3 | 113 | TFORF2534-SOX6 | 147 |
| TFORF3118-ZNF581 | 41 | TFORF1841-HBP1 | 77 | TFORF0193-RFX5 | 114 | TFORF2539-SOX5 | 147 |
| TFORF3537-TSC22D4 | 41 | TFORF2000-MYEF2 | 77 | TFORF0317-MEF2D | 114 | TFORF2596-RORB | 147 |
| TFORF0411-CTCFL | 42 | TFORF2018-PITX3 | 77 | TFORF0498-EGR3 | 114 | TFORF2693-TEAD4 | 147 |
| TFORF1410-RNF2 | 42 | TFORF2642-PAX3 | 77 | TFORF1023-FOXI1 | 114 | TFORF2863-SREBF1 | 147 |
| TFORF1862-OTP | 42 | TFORF2894-MTA1 | 77 | TFORF1399-ZNF568 | 114 | TFORF2958-SP1 | 147 |
| TFORF2020-MYBL2 | 42 | TFORF2972-NR1H4 | 77 | TFORF1524-NFRKB | 114 | TFORF3062-ZNF549 | 147 |
| TFORF2872-HMX3 | 42 | TFORF3105-CCNH | 77 | TFORF1636-HOXC13 | 114 | TFORF3250-ZKSCAN8 | 147 |
| TFORF0129-SP9 | 43 | TFORF3107-RARA | 77 | TFORF1686-HNF1B | 114 | TFORF3367-ZNF281 | 147 |
| TFORF0689-HNF4G | 43 | TFORF3128-IRF5 | 77 | TFORF1704-E2F3 | 114 | TFORF3435-SUPT5H | 147 |
| TFORF0690-HNF4G | 43 | TFORF3191-ZNF436 | 77 | TFORF1848-ETS1 | 114 | TFORF3472-NFATC3 | 147 |
| TFORF0691-HNF4A | 43 | TFORF3370-MYBL1 | 77 | TFORF2043-ARID3A | 114 | TFORF3479-ZNF132 | 147 |
| TFORF0692-HNF4A | 43 | TFORF3375-TGIF2 | 77 | TFORF2071-MYB | 114 | TFORF0049-MAX | 148 |
| TFORF0693-HNF4A | 43 | TFORF3461-ETV1 | 77 | TFORF2074-MYB | 114 | TFORF0063-GTF3C2 | 148 |
| TFORF0694-HNF4A | 43 | TFORF3529-VDR | 77 | TFORF2456-IRF3 | 114 | TFORF0072-CSDE1 | 148 |
| TFORF0695-HNF4A | 43 | TFORF3544-NR2E1 | 77 | TFORF2526-ERCC2 | 114 | TFORF0122-BARX1 | 148 |
| TFORF1115-RCOR2 | 43 | TFORF0454-TAF4B | 78 | TFORF2540-SOX5 | 114 | TFORF0187-DMRTC2 | 148 |
| TFORF1976-TBX1 | 43 | TFORF0607-CREBL2 | 78 | TFORF2581-MEIS3 | 114 | TFORF0274-TCF3 | 148 |
| TFORF2562-ZNF655 | 43 | TFORF0740-JDP2 | 78 | TFORF2653-ARNTL2 | 114 | TFORF0378-SMARCA1 | 148 |
| TFORF2696-ELF5 | 43 | TFORF0964-ERG | 78 | TFORF2750-NKX6-1 | 114 | TFORF0395-ZNF7 | 148 |
| TFORF2954-HNF4G | 43 | TFORF1118-SKP2 | 78 | TFORF2965-NR2C2 | 114 | TFORF0512-TSHZ1 | 148 |
| TFORF2957-HNF4A | 43 | TFORF1431-ZNF219 | 78 | TFORF3046-ZNF418 | 114 | TFORF0833-GTF2F2 | 148 |
| TFORF3005-SMAD4 | 43 | TFORF1734-RUVBL1 | 78 | TFORF3112-RFXANK | 114 | TFORF0859-ZIC3 | 148 |
| TFORF3542-ZNF720 | 43 | TFORF2192-RFXANK | 78 | TFORF3171-PSMB4 | 114 | TFORF0926-ATOH7 | 148 |
| TFORF0083-KCNIP2 | 44 | TFORF2813-FOXD4L1 | 78 | TFORF3177-NR1D2 | 114 | TFORF0947-EMX2 | 148 |
| TFORF0143-FXN | 44 | TFORF2987-RORA | 78 | TFORF3194-TLX3 | 114 | TFORF0977-ZNF121 | 148 |
| TFORF0217-FOXP1 | 44 | TFORF3176-ZNF544 | 78 | TFORF3200-RUNX3 | 114 | TFORF0995-ZNF304 | 148 |
| TFORF0222-FOXP4 | 44 | TFORF3339-HDAC3 | 78 | TFORF3255-ZNF175 | 114 | TFORF1073-NFATC4 | 148 |
| TFORF0311-CREM | 44 | TFORF3348-PITX2 | 78 | TFORF3404-ZNF511 | 114 | TFORF1089-TULP1 | 148 |
| TFORF0655-NR1I3 | 44 | TFORF3368-FOXR1 | 78 | TFORF0355-ZNF33A | 115 | TFORF1203-SETDB2 | 148 |
| TFORF0665-SCX | 44 | TFORF3445-PTTG1 | 78 | TFORF0575-HOXA11 | 115 | TFORF1306-ZSCAN9 | 148 |
| TFORF1016-ZNF549 | 44 | TFORF3522-POU6F1 | 78 | TFORF2491-ZBTB17 | 115 | TFORF1308-JARID2 | 148 |
| TFORF1084-SPZ1 | 44 | TFORF0159-EWSR1 | 79 | TFORF2902-DACH1 | 115 | TFORF1388-PMS1 | 148 |
| TFORF1498-RBL1 | 44 | TFORF0344-ETF1 | 79 | TFORF2996-TGIF1 | 115 | TFORF1550-TAZ | 148 |
| TFORF1632-ZNF227 | 44 | TFORF0371-NFYC | 79 | TFORF3467-SUPT4H1 | 115 | TFORF1679-RUNX1T1 | 148 |
| TFORF1653-SPI1 | 44 | TFORF0383-SMARCA2 | 79 | TFORF3533-CDIP1 | 115 | TFORF1838-EZH2 | 148 |
| TFORF1703-E2F3 | 44 | TFORF0643-NR1I3 | 79 | TFORF0108-TRERF1 | 116 | TFORF1938-MEIS1 | 148 |
| TFORF1744-ZNF764 | 44 | TFORF0817-LHX3 | 79 | TFORF0900-ZNF382 | 116 | TFORF2106-ZBTB37 | 148 |
| TFORF1918-RUNX3 | 44 | TFORF0871-NR1H3 | 79 | TFORF0973-ZNF124 | 116 | TFORF2123-ZNF273 | 148 |
| TFORF1920-RUNX1 | 44 | TFORF1024-FOXJ3 | 79 | TFORF1036-WT1 | 116 | TFORF2219-YAP1 | 148 |
| TFORF2113-SIRT6 | 44 | TFORF1043-TSC22D3 | 79 | TFORF1513-NKX3-1 | 116 | TFORF2237-GATA4 | 148 |
| TFORF2330-CIZ1 | 44 | TFORF1050-HKR1 | 79 | TFORF2151-FOXG1 | 116 | TFORF2244-TCF15 | 148 |
| TFORF2389-ZNF391 | 44 | TFORF1389-PMS1 | 79 | TFORF2490-ZBTB17 | 116 | TFORF2293-HES7 | 148 |
| TFORF2505-PML | 44 | TFORF1655-SPIB | 79 | TFORF2607-DMTF1 | 116 | TFORF2295-TAF11 | 148 |
| TFORF2563-ZNF655 | 44 | TFORF1700-E2F5 | 79 | TFORF2666-ZBED3 | 116 | TFORF2301-HIC2 | 148 |
| TFORF3271-EBF3 | 44 | TFORF1712-DPRX | 79 | TFORF2729-ZNF668 | 116 | TFORF2344-MITF | 148 |
| TFORF3391-CNBP | 44 | TFORF1747-ZNF761 | 79 | TFORF0431-AIRE | 117 | TFORF2451-MLLT10 | 148 |
| TFORF3502-VENTX | 44 | TFORF1979-TBX6 | 79 | TFORF0458-TRIM24 | 117 | TFORF2518-ZFP37 | 148 |
| TFORF0709-ZNF629 | 45 | TFORF1985-ZNF534 | 79 | TFORF0561-ZNF616 | 117 | TFORF2537-SOX7 | 148 |
| TFORF1242-LBX1 | 45 | TFORF2007-PREB | 79 | TFORF0842-ZSCAN10 | 117 | TFORF2946-MYOD1 | 148 |
| TFORF1681-SIM2 | 45 | TFORF2016-PITX2 | 79 | TFORF0922-NR2F1 | 117 | TFORF2956-HNF4A | 148 |
| TFORF1773-ZNF501 | 45 | TFORF2045-ARID3B | 79 | TFORF1265-ZNF135 | 117 | TFORF2960-PGR | 148 |
| TFORF1837-EZH2 | 45 | TFORF2082-IGHMBP2 | 79 | TFORF1319-KLF13 | 117 | TFORF3067-ZNF8 | 148 |
| TFORF1883-SOX30 | 45 | TFORF2118-TBPL1 | 79 | TFORF1337-ZBTB7A | 117 | TFORF3077-AP2B1 | 148 |
| TFORF1968-YY1 | 45 | TFORF2212-CREB3L3 | 79 | TFORF1538-ZBTB46 | 117 | TFORF3091-ZNF260 | 148 |
| TFORF2112-SIRT6 | 45 | TFORF2217-YAP1 | 79 | TFORF1964-CUX1 | 117 | TFORF3120-ZNF341 | 148 |
| TFORF2565-ZNF655 | 45 | TFORF2393-ZNF394 | 79 | TFORF2289-HES5 | 117 | TFORF3155-HLX | 148 |
| TFORF2592-ZNF354B | 45 | TFORF2470-PDX1 | 79 | TFORF2380-MBD1 | 117 | TFORF3161-ZNF433 | 148 |
| TFORF3034-OTX1 | 45 | TFORF2564-ZNF655 | 79 | TFORF2527-ERCC3 | 117 | TFORF3162-ZNF253 | 148 |
| TFORF3186-GTF2H3 | 45 | TFORF2593-BHLHE40 | 79 | TFORF2553-AR | 117 | TFORF3163-PPP1R13B | 148 |
| TFORF0711-ZNF625 | 46 | TFORF2637-TFDP2 | 79 | TFORF3538-HOXD10 | 117 | TFORF3206-TBR1 | 148 |
| TFORF1049-HKR1 | 46 | TFORF2807-ETV7 | 79 | TFORF0024-FOXQ1 | 118 | TFORF3213-ZNF572 | 148 |
| TFORF1282-SALL4 | 46 | TFORF3076-GTF2A2 | 79 | TFORF0039-SP7 | 118 | TFORF3229-MAX | 148 |
| TFORF1447-NR5A2 | 46 | TFORF3261-OVOL1 | 79 | TFORF0136-ZNF780B | 118 | TFORF3248-ZNF311 | 148 |
| TFORF1448-NR5A2 | 46 | TFORF0141-POU5F1B | 80 | TFORF0166-SIX6 | 118 | TFORF3277-ZNF518A | 148 |
| TFORF2641-PAX3 | 46 | TFORF0229-ZNF595 | 80 | TFORF0173-RELB | 118 | TFORF3296-HIF1A | 148 |
| TFORF2922-NFIA | 46 | TFORF0356-ZNF33A | 80 | TFORF0232-ZNF599 | 118 | TFORF3307-ZNF563 | 148 |
| TFORF3040-ZIM3 | 46 | TFORF0510-TSHZ3 | 80 | TFORF0459-CREB5 | 118 | TFORF3310-ZNF561 | 148 |
| TFORF3131-NR5A2 | 46 | TFORF0731-PROX1 | 80 | TFORF0489-ZFP91 | 118 | TFORF3359-ZNF263 | 148 |
| TFORF3363-NR5A1 | 46 | TFORF0737-ZNF480 | 80 | TFORF0568-ZNF618 | 118 | TFORF3365-FOXA1 | 148 |
| TFORF0184-SHOX2 | 47 | TFORF0827-LHX9 | 80 | TFORF0590-FOXO6 | 118 | TFORF3409-ZNF621 | 148 |
| TFORF0255-TCF4 | 47 | TFORF1666-TP73 | 80 | TFORF0598-SMARCB1 | 118 | TFORF3413-ZFP82 | 148 |
| TFORF0548-PAX8 | 47 | TFORF1701-E2F5 | 80 | TFORF0649-NR1I3 | 118 | TFORF3415-NKRF | 148 |
| TFORF0787-REPIN1 | 47 | TFORF1875-CCNT1 | 80 | TFORF0885-PPARG | 118 | TFORF3432-NR3C1 | 148 |
| TFORF0888-ZNF384 | 47 | TFORF1925-ZBTB21 | 80 | TFORF1174-NRL | 118 | TFORF3451-ZNF366 | 148 |
| TFORF0958-ZNF496 | 47 | TFORF2024-NPAS3 | 80 | TFORF1189-ZNF571 | 118 | TFORF3473-RUNX1 | 148 |
| TFORF1056-NFATC1 | 47 | TFORF2206-POU2F3 | 80 | TFORF1338-ZBTB7C | 118 | TFORF3487-NFATC1 | 148 |
| TFORF1185-MAP3K7 | 47 | TFORF2257-ARNTL | 80 | TFORF1394-ZNF569 | 118 | TFORF3508-ZNF134 | 148 |
| TFORF1706-E2F1 | 47 | TFORF2417-ZNF268 | 80 | TFORF1420-ZNF211 | 118 | TFORF3519-TCF4 | 148 |
| TFORF1791-FOXE3 | 47 | TFORF2506-PML | 80 | TFORF1435-NFKBIE | 118 | TFORF3526-THAP12 | 148 |
| TFORF2312-ETV3 | 47 | TFORF2547-CEBPD | 80 | TFORF1868-MMP3 | 118 | TFORF3536-HOXD4 | 148 |
| TFORF2424-RBPJL | 47 | TFORF2688-TEAD3 | 80 | TFORF1942-MIER1 | 118 | TFORF3549-GFP | 148 |
| TFORF2504-PML | 47 | TFORF2889-BRPF1 | 80 | TFORF2056-NKX2-8 | 118 | TFORF3550-mCherry | 148 |
| TFORF3164-RUVBL1 | 47 | TFORF3243-ZNF267 | 80 | TFORF2097-ZKSCAN1 | 118 | TFORF0050-MAZ | 149 |
| TFORF3196-ZIC1 | 47 | TFORF0162-PES1 | 81 | TFORF2103-ZBTB32 | 118 | TFORF0254-CAMTA1 | 149 |
| TFORF3211-TADA2B | 47 | TFORF0293-MEF2A | 81 | TFORF2457-IRF3 | 118 | TFORF0302-CREM | 149 |
| TFORF3436-TOX4 | 47 | TFORF0366-NFYC | 81 | TFORF2549-SKI | 118 | TFORF0313-CREM | 149 |
| TFORF0491-ZSCAN1 | 48 | TFORF0435-ZSCAN32 | 81 | TFORF3054-SALL4 | 118 | TFORF0416-ZNF559-ZNF177 | 149 |
| TFORF0948-EMX2 | 48 | TFORF0463-HOXD1 | 81 | TFORF3317-ZNF75A | 118 | TFORF0531-PAX6 | 149 |
| TFORF1014-ZNF540 | 48 | TFORF0586-SRY | 81 | TFORF3398-HLF | 118 | TFORF0735-ZNF480 | 149 |
| TFORF2366-MBD4 | 48 | TFORF0699-BATF2 | 81 | TFORF3491-NR1I3 | 118 | TFORF0850-ZIC4 | 149 |
| TFORF3457-IRF9 | 48 | TFORF0710-ZNF624 | 81 | TFORF0186-DMRTC1 | 119 | TFORF0882-HOXB1 | 149 |
| TFORF3534-BORCS8-MEF2B | 48 | TFORF1401-ZNF567 | 81 | TFORF0251-VEZF1 | 119 | TFORF0904-DNAJC1 | 149 |
| TFORF0044-ZNF672 | 49 | TFORF1628-FOXJ3 | 81 | TFORF0320-MSLN | 119 | TFORF1004-POU1F1 | 149 |
| TFORF0316-MEF2D | 49 | TFORF1794-CNBP | 81 | TFORF0864-GTF21 | 119 | TFORF1047-SNAI2 | 149 |
| TFORF0423-PBX3 | 49 | TFORF1998-ZNF248 | 81 | TFORF0956-MYF5 | 119 | TFORF1068-NFATC2 | 149 |
| TFORF1303-ZMIZ2 | 49 | TFORF2147-ZNF528 | 81 | TFORF1114-RCOR3 | 119 | TFORF1162-NFKBIL1 | 149 |
| TFORF2190-ZNF410 | 49 | TFORF2434-ZNF280D | 81 | TFORF1199-ZNF579 | 119 | TFORF1241-LBX2 | 149 |
| TFORF2198-MLXIPL | 49 | TFORF2918-NFIB | 81 | TFORF1234-AFF2 | 119 | TFORF1263-TP53 | 149 |
| TFORF2622-CRTC1 | 49 | TFORF2948-HOXB6 | 81 | TFORF1261-TP53 | 119 | TFORF1384-ZNF788 | 149 |
| TFORF2799-TAF6 | 49 | TFORF2968-NR0B1 | 81 | TFORF1492-FOSL1 | 119 | TFORF1496-HHEX | 149 |
| TFORF2896-MTA2 | 49 | TFORF2995-SKP2 | 81 | TFORF1615-GSX1 | 119 | TFORF1545-ZNF160 | 149 |
| TFORF2908-NFIC | 49 | TFORF3215-ZNF248 | 81 | TFORF1637-HOXC12 | 119 | TFORF1646-ZNF423 | 149 |
| TFORF3031-STRAP | 49 | TFORF3387-ZNF586 | 81 | TFORF2062-NKX2-6 | 119 | TFORF1710-CBFB | 149 |
| TFORF3246-HOXC9 | 49 | TFORF3485-ATF2 | 81 | TFORF2068-FLII | 119 | TFORF1800-USF2 | 149 |
| TFORF3336-ZBTB37 | 49 | TFORF0071-CSDE1 | 82 | TFORF2104-ZBTB34 | 119 | TFORF1811-ZNF438 | 149 |
| TFORF3356-NRF1 | 49 | TFORF0239-MYCL | 82 | TFORF2154-BCL11A | 119 | TFORF1867-POU2F2 | 149 |
| TFORF0001-HIF3A | 50 | TFORF0363-TCEB2 | 82 | TFORF2169-BLZF1 | 119 | TFORF2044-ARID3C | 149 |
| TFORF0265-TCF4 | 50 | TFORF0372-NFYB | 82 | TFORF2290-HES6 | 119 | TFORF2126-ZNF746 | 149 |
| TFORF0334-ZNF331 | 50 | TFORF0402-ZNF3 | 82 | TFORF2728-ZFP1 | 119 | TFORF2220-YAP1 | 149 |
| TFORF0841-ZSCAN10 | 50 | TFORF0425-PBX3 | 82 | TFORF2780-ZNF30 | 119 | TFORF2415-ZNF268 | 149 |
| TFORF1057-NFATC1 | 50 | TFORF0529-PAX6 | 82 | TFORF2982-ZNF420 | 119 | TFORF2600-POU6F2 | 149 |
| TFORF1101-GTF2IRD1 | 50 | TFORF0877-GLMP | 82 | TFORF3011-ZNF10 | 119 | TFORF2619-ZXDB | 149 |
| TFORF1122-HNRNPAB | 50 | TFORF0933-ZNF85 | 82 | TFORF3104-NKX2-5 | 119 | TFORF2850-HMGA2 | 149 |
| TFORF1257-TP53 | 50 | TFORF1026-RARA | 82 | TFORF3242-ZNF136 | 119 | TFORF2897-MTA2 | 149 |
| TFORF1817-UHRF1 | 50 | TFORF1195-ZNF576 | 82 | TFORF3323-ZNF626 | 119 | TFORF2978-NR0B2 | 149 |
| TFORF1898-PATZ1 | 50 | TFORF1792-CNBP | 82 | TFORF3497-ZNF280C | 119 | TFORF3017-ETV4 | 149 |
| TFORF1904-TCF7L2 | 50 | TFORF2017-PITX2 | 82 | TFORF3539-ZNF747 | 119 | TFORF3039-NR1H3 | 149 |
| TFORF2143-ZNF525 | 50 | TFORF2100-SOHLH2 | 82 | TFORF0421-SKIL | 120 | TFORF3184-HSBP1 | 149 |
| TFORF2230-EHF | 50 | TFORF2248-TCF12 | 82 | TFORF0637-HOXC4 | 120 | TFORF3241-ZNF490 | 149 |
| TFORF2335-CTNNB1 | 50 | TFORF2304-CIITA | 82 | TFORF1508-MTF1 | 120 | TFORF3288-HOXA9 | 149 |
| TFORF2351-ZNF17 | 50 | TFORF2313-ETV3 | 82 | TFORF1708-PPP1R13L | 120 | TFORF3408-ZNF286A | 149 |
| TFORF2558-TLX1 | 50 | TFORF2362-ZNF641 | 82 | TFORF1803-USF1 | 120 | TFORF3434-ZNF37A | 149 |
| TFORF2568-TGIF1 | 50 | TFORF2454-IRF3 | 82 | TFORF2159-BCL11B | 120 | TFORF3438-GCM1 | 149 |
| TFORF2650-ZNF586 | 50 | TFORF2550-BID | 82 | TFORF2222-YAP1 | 120 | TFORF3449-DMRT1 | 149 |
| TFORF2724-ZNF74 | 50 | TFORF2849-HMGA2 | 82 | TFORF2396-ZNF396 | 120 | TFORF0309-CREM | 150 |
| TFORF2930-NFIX | 50 | TFORF2969-PAX8 | 82 | TFORF2559-TLX1 | 120 | TFORF0407-CTCFL | 150 |
| TFORF2984-MAP3K7 | 50 | TFORF3014-CEBPG | 82 | TFORF3116-HEYL | 120 | TFORF0410-CTCFL | 150 |
| TFORF3084-ZFP36L1 | 50 | TFORF3240-POU2AF1 | 82 | TFORF0112-SMAD2 | 121 | TFORF0429-PBX1 | 150 |
| TFORF3352-HESX1 | 50 | TFORF3319-ZSCAN5A | 82 | TFORF0790-DBX1 | 121 | TFORF0492-ZSCAN2 | 150 |
| TFORF3455-ZNF513 | 50 | TFORF3532-LIN28B | 82 | TFORF0943-LMO2 | 121 | TFORF0623-DDIT3 | 150 |
| TFORF0213-FOXP1 | 51 | TFORF0079-KCNIP3 | 83 | TFORF1180-ZNF799 | 121 | TFORF0760-OVOL1 | 150 |
| TFORF0420-SKIL | 51 | TFORF0087-LIN28A | 83 | TFORF1300-MAEL | 121 | TFORF0823-LHX6 | 150 |
| TFORF0844-ZSCAN12 | 51 | TFORF0234-MNX1 | 83 | TFORF1464-VAV1 | 121 | TFORF0847-YBX3 | 150 |
| TFORF0982-KLF6 | 51 | TFORF0261-TCF4 | 83 | TFORF1602-ZNF256 | 121 | TFORF1127-THAP3 | 150 |
| TFORF1088-TULP3 | 51 | TFORF0272-TCF7 | 83 | TFORF1903-TCF7L2 | 121 | TFORF1198-ZNF578 | 150 |
| TFORF1627-FOXJ3 | 51 | TFORF0284-MEF2C | 83 | TFORF2066-FLII | 121 | TFORF1318-MKX | 150 |
| TFORF1721-DMRT2 | 51 | TFORF0298-CREM | 83 | TFORF2245-TCF12 | 121 | TFORF1333-TFAP2D | 150 |
| TFORF2233-SMARCD1 | 51 | TFORF0373-NFYA | 83 | TFORF2472-HDAC5 | 121 | TFORF1451-DLX1 | 150 |
| TFORF2408-FOXF1 | 51 | TFORF0417-SULT2A1 | 83 | TFORF2762-ZKSCAN3 | 121 | TFORF1455-TFEC | 150 |
| TFORF2524-ERCC8 | 51 | TFORF0669-ZNF821 | 83 | TFORF2883-BHLHA9 | 121 | TFORF1467-HOXD13 | 150 |
| TFORF2997-GATA2 | 51 | TFORF0798-ATF3 | 83 | TFORF2914-NFIB | 121 | TFORF1497-LYL1 | 150 |
| TFORF3428-TRIM27 | 51 | TFORF0848-YBX3 | 83 | TFORF3018-NEUROG3 | 121 | TFORF1514-NKX3-1 | 150 |
| TFORF1097-HSFX1 | 52 | TFORF0872-HOXB8 | 83 | TFORF3397-ZIK1 | 121 | TFORF1559-YAF2 | 150 |
| TFORF1344-FEZF2 | 52 | TFORF0978-KLF7 | 83 | TFORF3456-ZNF426 | 121 | TFORF1722-DMRT3 | 150 |
| TFORF1386-ZNF362 | 52 | TFORF1145-CDK1 | 83 | TFORF3501-CERS6 | 121 | TFORF1723-ZNF691 | 150 |
| TFORF1526-MXI1 | 52 | TFORF1177-ZNF793 | 83 | TFORF0098-MSGN1 | 122 | TFORF1821-ZNF138 | 150 |
| TFORF1715-LDB2 | 52 | TFORF1364-ELOF1 | 83 | TFORF0163-PES1 | 122 | TFORF1866-POU2F2 | 150 |
| TFORF1781-ZNF506 | 52 | TFORF1446-GTF2H3 | 83 | TFORF0174-RELA | 122 | TFORF2001-MYEF2 | 150 |
| TFORF2195-MLXIPL | 52 | TFORF1486-NANOG | 83 | TFORF0409-CTCFL | 122 | TFORF2028-NPAS1 | 150 |
| TFORF2232-EHF | 52 | TFORF1574-ZNF174 | 83 | TFORF0794-ATF7 | 122 | TFORF2122-ZNF563 | 150 |
| TFORF2843-RHOXF2B | 52 | TFORF1589-ZNF773 | 83 | TFORF0813-CDCA7L | 122 | TFORF2242-GATA1 | 150 |
| TFORF2881-XBP1 | 52 | TFORF1611-GSX2 | 83 | TFORF0970-ZNF124 | 122 | TFORF2385-MBD3 | 150 |
| TFORF2916-NFIB | 52 | TFORF1683-TWIST1 | 83 | TFORF1139-LRRFIP1 | 122 | TFORF2394-ZNF396 | 150 |
| TFORF2991-ID2 | 52 | TFORF1691-PGR | 83 | TFORF1239-ZNF431 | 122 | TFORF2512-PDCD2 | 150 |
| TFORF3134-TFE3 | 52 | TFORF1728-ZNF695 | 83 | TFORF1245-PKNOX2 | 122 | TFORF2517-PDCD2 | 150 |
| TFORF3144-MIER2 | 52 | TFORF1767-ZNF22 | 83 | TFORF1310-TTF1 | 122 | TFORF2551-BID | 150 |
| TFORF3172-STAT6 | 52 | TFORF1840-GTF2A1 | 83 | TFORF1624-ZNF516 | 122 | TFORF2749-NKX6-3 | 150 |
| TFORF3174-ARID5A | 52 | TFORF2183-ZNF415 | 83 | TFORF1894-AHRR | 122 | TFORF2815-FOSB | 150 |
| TFORF3311-CREB3 | 52 | TFORF2211-CREB3L3 | 83 | TFORF1896-NR2C1 | 122 | TFORF2851-HMGA2 | 150 |
| TFORF3314-SMAD9 | 52 | TFORF2223-YAP1 | 83 | TFORF1932-JUN | 122 | TFORF2874-ELF1 | 150 |
| TFORF0605-PUF60 | 53 | TFORF2285-HES3 | 83 | TFORF2022-NPAS4 | 122 | TFORF3301-OLIG3 | 150 |
| TFORF0897-ING1 | 53 | TFORF2419-ZNF268 | 83 | TFORF2089-ZNF442 | 122 | TFORF3304-MITF | 150 |
| TFORF1010-ZNF547 | 53 | TFORF2448-GBX2 | 83 | TFORF2092-ZBTB2 | 122 | TFORF1457-TFEB | 151 |
| TFORF1217-PRRX1 | 53 | TFORF2525-ERCC2 | 83 | TFORF2284-HES2 | 122 | TFORF2341-MITF | 151 |
| TFORF1260-TP53 | 53 | TFORF2579-MEIS3 | 83 | TFORF2318-ZNF732 | 122 | TFORF2342-MITF | 151 |
| TFORF1511-STAT5A | 53 | TFORF2597-RORA | 83 | TFORF2412-ZNF705D | 122 | TFORF2345-MITF | 151 |
| TFORF1561-ZNF688 | 53 | TFORF2632-TFDP3 | 83 | TFORF2478-MESP1 | 122 | TFORF2346-MITF | 151 |
| TFORF1977-TBX1 | 53 | TFORF2812-ETV7 | 83 | TFORF2531-SOX9 | 122 | TFORF3303-MITF | 151 |
| TFORF2005-ZNF664 | 53 | TFORF2814-FOSB | 83 | TFORF2754-ZNF446 | 122 | TFORF3327-LHX6 | 151 |
| TFORF2317-ETV4 | 53 | TFORF2825-IKZF1 | 83 | TFORF3119-DDIT3 | 122 | | |
| TFORF3032-SIRT6 | 53 | TFORF3089-ZSCAN9 | 83 | TFORF3224-HMGB1 | 122 | | |
| TFORF3528-NME2 | 53 | TFORF3150-ZNF254 | 83 | TFORF3249-ZNF181 | 122 | | |
| | | TFORF3173-STAT6 | 83 | TFORF3252-ZNF77 | 122 | | |
| | | TFORF3245-MAFG | 83 | TFORF3399-POU2F2 | 122 | | |
| | | TFORF3278-MEOX1 | 83 | | | | |
| | | TFORF3328-ZSCAN16 | 83 | | | | |

TABLE 19D
Predicted triple TF combinations for reference cell types from the human fetal cell atlas (42). Combinations were ranked based on the cell
type-specific gene signature score. Only the top 100 ranked combinations are shown. Combinations are presented as clusters from (C).

| | | Antigen presenting | | | | | | Bronchiolar and | | CCL19_CCL21 | |
|---|---|---|---|---|---|---|---|---|---|---|---|
| Amacrine cells | | cells | | Astrocytes | | Bipolar cells | | alveolar epithelial cells | | positive cells | |
| Clusters | Score | Clusters | Score | Clusters | Score | Clusters | Score | Clusters | Score | Clusters | Score |
| 23; 89; 118 | 5.96 | 29; 31; 80 | 3.46 | 24; 135; 136 | 7.96 | 11; 42; 81 | 6.19 | 3; 64; 105 | 2.81 | 77; 114; 121 | 9.48 |
| 7; 23; 102 | 5.96 | 22; 31; 53 | 3.46 | 26; 39; 136 | 7.96 | 11; 42; 78 | 6.19 | 18; 105; 130 | 2.81 | 71; 86; 114 | 9.48 |
| 26; 87; 97 | 4.93 | 24; 31; 40 | 3.46 | 24; 79; 136 | 7.96 | 11; 42; 134 | 6.19 | 32; 105; 132 | 2.81 | 71; 84; 114 | 9.48 |
| 23; 76; 102 | 4.93 | 31; 41; 53 | 3.46 | 24; 67; 136 | 7.96 | 11; 42; 119 | 6.19 | 64; 105; 132 | 2.81 | 71; 79; 114 | 9.48 |
| 25; 54; 102 | 4.93 | 31; 41; 86 | 3.46 | 23; 39; 136 | 7.96 | 11; 42; 149 | 6.19 | 18; 41; 105 | 2.81 | 71; 114; 150 | 9.48 |
| 29; 93; 118 | 4.93 | 31; 41; 88 | 3.46 | 39; 136; 150 | 7.96 | 11; 42; 126 | 6.19 | 29; 39; 105 | 2.81 | 86; 114; 120 | 9.48 |
| 21; 30; 102 | 4.93 | 62; 63; 108 | 3.46 | 39; 67; 136 | 7.96 | 11; 42; 74 | 6.19 | 60; 105; 150 | 2.81 | 94; 114; 121 | 9.48 |
| 94; 118; 126 | 4.93 | 25; 31; 126 | 3.46 | 39; 136; 148 | 7.96 | 11; 37; 97 | 6.19 | 52; 53; 105 | 2.81 | 63; 71; 114 | 9.48 |
| 26; 38; 97 | 4.93 | 18; 41; 74 | 3.46 | 39; 136; 147 | 7.96 | 11; 42; 93 | 6.19 | 39; 70; 105 | 2.81 | 71; 82; 114 | 9.48 |
| 99; 102; 116 | 4.93 | 31; 39; 41 | 3.46 | 39; 131; 136 | 7.96 | 11; 28; 42 | 5.02 | 29; 96; 105 | 2.81 | 7; 114; 121 | 9.48 |
| 7; 25; 118 | 4.93 | 24; 31; 41 | 2.58 | 24; 77; 136 | 7.96 | 13; 44; 101 | 5.02 | 41; 105; 148 | 2.81 | 71; 74; 114 | 9.48 |
| 2; 23; 102 | 4.93 | 30; 41; 66 | 2.58 | 24; 39; 136 | 7.96 | 11; 42; 77 | 5.02 | 40; 105; 148 | 2.81 | 71; 75; 114 | 9.48 |
| 23; 97; 118 | 4.93 | 14; 28; 31 | 2.58 | 39; 135; 136 | 7.96 | 13; 42; 101 | 5.02 | 32; 105; 134 | 2.81 | 86; 114; 121 | 8.32 |
| 26; 89; 118 | 4.93 | 5; 31; 86 | 2.58 | 24; 65; 136 | 7.96 | 13; 72; 78 | 5.02 | 41; 105; 138 | 2.81 | 80; 114; 121 | 8.32 |
| 18; 93; 118 | 4.93 | 30; 41; 63 | 2.58 | 4; 39; 136 | 7.96 | 13; 70; 133 | 5.02 | 40; 105; 147 | 2.81 | 114; 121; 142 | 8.32 |
| 53; 63; 118 | 4.93 | 30; 41; 62 | 2.58 | 24; 120; 136 | 7.96 | 11; 13; 44 | 5.02 | 41; 105; 134 | 2.81 | 114; 121; 143 | 8.32 |
| 23; 25; 102 | 4.93 | 62; 91; 114 | 2.58 | 39; 83; 136 | 7.96 | 11; 13; 42 | 5.02 | 41; 105; 133 | 2.81 | 63; 77; 121 | 8.32 |
| 29; 30; 102 | 4.93 | 31; 39; 135 | 2.58 | 24; 109; 136 | 7.96 | 13; 21; 101 | 5.02 | 41; 105; 132 | 2.81 | 7; 114; 120 | 8.32 |
| 23; 30; 102 | 4.93 | 31; 39; 134 | 2.58 | 39; 106; 136 | 7.96 | 11; 37; 96 | 5.02 | 37; 53; 105 | 2.81 | 71; 114; 126 | 8.32 |
| 25; 30; 102 | 4.93 | 24; 31; 80 | 2.58 | 39; 61; 136 | 7.96 | 11; 42; 147 | 5.02 | 60; 105; 134 | 2.81 | 71; 81; 113 | 8.32 |
| 29; 98; 126 | 4.93 | 41; 68; 86 | 2.58 | 39; 84; 136 | 7.96 | 11; 42; 148 | 5.02 | 60; 105; 133 | 2.81 | 113; 121; 141 | 8.32 |
| 53; 90; 118 | 4.93 | 30; 41; 68 | 2.58 | 1; 39; 136 | 7.96 | 11; 33; 97 | 5.02 | 37; 54; 105 | 2.81 | 33; 121; 141 | 8.32 |
| 23; 33; 89 | 4.93 | 74; 85; 133 | 2.58 | 24; 69; 136 | 7.96 | 13; 37; 101 | 5.02 | 35; 41; 105 | 2.81 | 57; 114; 121 | 8.32 |
| 23; 52; 102 | 4.93 | 24; 31; 77 | 2.58 | 39; 78; 136 | 7.96 | 11; 42; 70 | 5.02 | 39; 83; 105 | 2.81 | 114; 121; 149 | 8.32 |
| 33; 60; 102 | 4.93 | 74; 90; 108 | 2.58 | 29; 79; 136 | 6.62 | 13; 72; 81 | 5.02 | 59; 105; 133 | 2.81 | 79; 113; 120 | 8.32 |
| 23; 33; 102 | 4.93 | 31; 53; 77 | 2.58 | 26; 118; 136 | 6.62 | 13; 33; 101 | 5.02 | 17; 67; 105 | 2.81 | 63; 114; 121 | 8.32 |
| 21; 60; 102 | 4.93 | 31; 66; 77 | 2.58 | 72; 77; 136 | 6.62 | 11; 29; 97 | 5.02 | 60; 69; 105 | 2.81 | 32; 114; 121 | 8.32 |
| 23; 88; 97 | 4.93 | 77; 123; 151 | 2.58 | 76; 79; 136 | 6.62 | 13; 35; 101 | 5.02 | 66; 73; 105 | 2.81 | 71; 113; 146 | 8.32 |
| 25; 47; 102 | 4.93 | 8; 40; 114 | 2.58 | 64; 73; 136 | 6.62 | 11; 42; 96 | 5.02 | 53; 64; 105 | 2.81 | 68; 71; 114 | 8.32 |
| 14; 74; 94 | 4.93 | 14; 30; 41 | 2.58 | 74; 120; 136 | 6.62 | 11; 42; 97 | 5.02 | 35; 40; 105 | 2.81 | 29; 71; 114 | 8.32 |
| 53; 86; 118 | 4.93 | 19; 24; 31 | 2.58 | 26; 74; 136 | 6.62 | 11; 39; 42 | 5.02 | 26; 54; 105 | 2.81 | 81; 113; 120 | 8.32 |
| 23; 62; 102 | 4.93 | 14; 29; 31 | 2.58 | 4; 135; 136 | 6.62 | 11; 42; 98 | 5.02 | 5; 39; 105 | 2.81 | 26; 114; 121 | 8.32 |
| 18; 28; 118 | 4.93 | 18; 41; 61 | 2.58 | 6; 28; 136 | 6.62 | 21; 42; 77 | 5.02 | 39; 129; 137 | 2.81 | 72; 114; 121 | 8.32 |
| 24; 98; 116 | 4.93 | 31; 70; 77 | 2.58 | 26; 75; 136 | 6.62 | 13; 72; 83 | 5.02 | 29; 37; 105 | 2.81 | 113; 120; 150 | 8.32 |
| 8; 16; 23 | 4.93 | 62; 91; 134 | 2.58 | 64; 67; 136 | 6.62 | 11; 78; 81 | 5.02 | 62; 105; 130 | 2.81 | 38; 121; 149 | 8.32 |
| 18; 23; 102 | 4.93 | 74; 84; 108 | 2.58 | 69; 87; 136 | 6.62 | 11; 42; 90 | 5.02 | 29; 105; 132 | 2.81 | 38; 121; 150 | 8.32 |
| 24; 65; 98 | 4.93 | 41; 68; 135 | 2.58 | 6; 29; 136 | 6.62 | 11; 12; 42 | 5.02 | 96; 105; 132 | 2.81 | 29; 114; 121 | 8.32 |
| 24; 88; 98 | 4.93 | 5; 31; 58 | 2.58 | 93; 107; 136 | 6.62 | 11; 81; 93 | 5.02 | 29; 76; 105 | 2.81 | 29; 113; 120 | 8.32 |
| 23; 54; 102 | 4.93 | 31; 53; 140 | 2.58 | 73; 74; 136 | 6.62 | 11; 42; 107 | 5.02 | 15; 105; 132 | 2.81 | 29; 114; 120 | 8.32 |
| 23; 89; 119 | 4.93 | 31; 40; 93 | 2.58 | 52; 135; 136 | 6.62 | 13; 53; 101 | 5.02 | 8; 105; 132 | 2.81 | 33; 71; 114 | 8.32 |
| 99; 101; 116 | 4.93 | 17; 41; 66 | 2.58 | 13; 66; 136 | 6.62 | 12; 13; 36 | 5.02 | 29; 67; 105 | 2.81 | 114; 121; 134 | 8.32 |
| 7; 26; 97 | 4.93 | 20; 41; 114 | 2.58 | 93; 106; 136 | 6.62 | 11; 15; 42 | 5.02 | 54; 66; 105 | 2.81 | 61; 114; 121 | 8.32 |
| 23; 84; 119 | 4.93 | 31; 40; 87 | 2.58 | 61; 98; 136 | 6.62 | 11; 42; 84 | 5.02 | 39; 69; 105 | 2.81 | 1; 114; 121 | 8.32 |
| 33; 102; 135 | 4.93 | 62; 90; 108 | 2.58 | 76; 77; 136 | 6.62 | 21; 39; 42 | 5.02 | 60; 68; 105 | 2.81 | 39; 114; 121 | 8.32 |
| 23; 42; 118 | 4.93 | 24; 53; 114 | 2.58 | 38; 120; 136 | 6.62 | 11; 64; 93 | 5.02 | 3; 67; 105 | 2.81 | 75; 113; 120 | 8.32 |
| 29; 82; 98 | 4.93 | 24; 53; 112 | 2.58 | 68; 70; 136 | 6.62 | 11; 42; 79 | 5.02 | 26; 53; 105 | 2.81 | 33; 114; 120 | 8.32 |
| 85; 86; 118 | 4.93 | 31; 40; 81 | 2.58 | 1; 75; 136 | 6.62 | 11; 75; 97 | 5.02 | 60; 105; 126 | 2.81 | 53; 113; 120 | 8.32 |
| 7; 85; 118 | 4.93 | 31; 40; 80 | 2.58 | 73; 120; 136 | 6.62 | 11; 42; 85 | 5.02 | 40; 105; 138 | 2.81 | 114; 121; 126 | 8.32 |
| 23; 78; 118 | 4.93 | 31; 40; 77 | 2.58 | 29; 38; 136 | 6.62 | 11; 37; 78 | 5.02 | 4; 53; 105 | 2.81 | 8; 114; 121 | 8.32 |
| 7; 84; 118 | 3.96 | 31; 40; 75 | 2.58 | 24; 113; 136 | 6.62 | 11; 43; 97 | 5.02 | 3; 41; 105 | 2.81 | 65; 100; 113 | 8.32 |
| 28; 75; 118 | 3.96 | 26; 31; 41 | 2.58 | 13; 70; 136 | 6.62 | 11; 38; 134 | 5.02 | 21; 59; 105 | 2.81 | 81; 114; 121 | 8.32 |
| 18; 24; 118 | 3.96 | 31; 40; 94 | 2.58 | 8; 127; 136 | 6.62 | 11; 64; 97 | 5.02 | 8; 29; 105 | 2.81 | 34; 114; 121 | 8.32 |
| 51; 99; 102 | 3.96 | 29; 30; 41 | 2.58 | 92; 136; 141 | 6.62 | 13; 63; 81 | 5.02 | 39; 105; 147 | 2.81 | 63; 121; 129 | 8.32 |
| 23; 86; 102 | 3.96 | 1; 31; 66 | 2.58 | 64; 120; 136 | 6.62 | 11; 42; 86 | 5.02 | 39; 105; 148 | 2.81 | 53; 114; 121 | 7.22 |
| 24; 75; 102 | 3.96 | 31; 69; 73 | 2.58 | 92; 136; 146 | 6.62 | 11; 42; 120 | 5.02 | 39; 105; 149 | 2.81 | 53; 114; 120 | 7.22 |
| 24; 102; 118 | 3.96 | 20; 41; 84 | 2.58 | 92; 136; 150 | 6.62 | 11; 42; 87 | 5.02 | 76; 105; 132 | 2.81 | 71; 74; 113 | 7.22 |
| 29; 83; 118 | 3.96 | 22; 31; 34 | 2.58 | 65; 72; 136 | 6.62 | 11; 38; 78 | 5.02 | 2; 105; 134 | 2.81 | 113; 120; 146 | 7.22 |
| 56; 102; 135 | 3.96 | 31; 69; 77 | 2.58 | 65; 107; 136 | 6.62 | 13; 63; 133 | 5.02 | 39; 105; 138 | 2.81 | 70; 71; 113 | 7.22 |
| 7; 26; 118 | 3.96 | 34; 57; 74 | 2.58 | 26; 73; 136 | 6.62 | 1; 77; 93 | 3.94 | 54; 98; 105 | 2.81 | 81; 113; 121 | 7.22 |
| 26; 83; 97 | 3.96 | 41; 66; 123 | 2.58 | 93; 96; 136 | 6.62 | 11; 76; 78 | 3.94 | 54; 67; 105 | 2.81 | 63; 121; 138 | 7.22 |
| 23; 87; 97 | 3.96 | 17; 41; 135 | 2.58 | 92; 131; 136 | 6.62 | 12; 36; 81 | 3.94 | 2; 105; 133 | 2.81 | 113; 120; 147 | 7.22 |
| 7; 25; 119 | 3.96 | 31; 69; 88 | 2.58 | 1; 79; 136 | 6.62 | 11; 86; 97 | 3.94 | 2; 105; 132 | 2.81 | 86; 121; 142 | 7.22 |
| 38; 47; 102 | 3.96 | 28; 29; 31 | 2.58 | 131; 135; 136 | 6.62 | 29; 37; 107 | 3.94 | 54; 76; 105 | 2.81 | 100; 114; 123 | 7.22 |
| 18; 24; 97 | 3.96 | 7; 31; 77 | 2.58 | 26; 44; 136 | 6.62 | 7; 13; 81 | 3.94 | 53; 96; 105 | 2.81 | 86; 121; 141 | 7.22 |
| 54; 102; 133 | 3.96 | 31; 40; 100 | 2.58 | 92; 135; 136 | 6.62 | 11; 79; 81 | 3.94 | 10; 41; 105 | 2.81 | 7; 121; 141 | 7.22 |
| 8; 26; 97 | 3.96 | 62; 73; 108 | 2.58 | 67; 74; 136 | 6.62 | 11; 13; 62 | 3.94 | 39; 61; 105 | 2.81 | 7; 121; 143 | 7.22 |
| 29; 84; 98 | 3.96 | 28; 74; 108 | 2.58 | 54; 96; 136 | 6.62 | 13; 50; 95 | 3.94 | 53; 54; 105 | 2.81 | 113; 120; 126 | 7.22 |
| 54; 102; 132 | 3.96 | 1; 47; 114 | 2.58 | 8; 126; 136 | 6.62 | 11; 13; 81 | 3.94 | 17; 59; 105 | 2.81 | 5; 114; 121 | 7.22 |
| 7; 25; 97 | 3.96 | 4; 31; 66 | 2.58 | 67; 109; 136 | 6.62 | 11; 13; 66 | 3.94 | 35; 105; 130 | 2.81 | 114; 120; 121 | 7.22 |
| 30; 51; 102 | 3.96 | 30; 41; 74 | 2.58 | 13; 68; 136 | 6.62 | 12; 25; 44 | 3.94 | 27; 60; 105 | 2.81 | 7; 100; 113 | 7.22 |
| 26; 84; 97 | 3.96 | 31; 66; 86 | 2.58 | 109; 135; 136 | 6.62 | 12; 36; 39 | 3.94 | 3; 54; 105 | 2.81 | 25; 113; 120 | 7.22 |
| 85; 88; 118 | 3.96 | 18; 41; 135 | 2.58 | 74; 118; 136 | 6.62 | 13; 72; 101 | 3.94 | 67; 105; 132 | 2.81 | 44; 114; 121 | 7.22 |
| 47; 88; 102 | 3.96 | 5; 31; 40 | 2.58 | 8; 120; 136 | 6.62 | 13; 42; 87 | 3.94 | 29; 54; 105 | 2.81 | 21; 114; 121 | 7.22 |
| 29; 85; 98 | 3.96 | 5; 31; 42 | 2.58 | 29; 67; 136 | 6.62 | 14; 95; 132 | 3.94 | 39; 62; 105 | 2.81 | 63; 114; 129 | 7.22 |
| 26; 86; 97 | 3.96 | 74; 82; 108 | 2.58 | 22; 24; 136 | 6.62 | 15; 95; 106 | 3.94 | 54; 96; 105 | 2.81 | 33; 114; 121 | 7.22 |
| 78; 88; 118 | 3.96 | 25; 28; 31 | 2.58 | 66; 96; 136 | 6.62 | 11; 19; 95 | 3.94 | 40; 127; 139 | 2.81 | 22; 114; 121 | 7.22 |
| 24; 64; 118 | 3.96 | 31; 39; 146 | 2.58 | 61; 96; 136 | 6.62 | 11; 13; 63 | 3.94 | 21; 41; 105 | 2.81 | 38; 84; 121 | 7.22 |
| 96; 116; 118 | 3.96 | 30; 41; 73 | 2.58 | 38; 135; 136 | 6.62 | 13; 29; 101 | 3.94 | 17; 54; 105 | 2.81 | 71; 86; 113 | 7.22 |
| 24; 30; 102 | 3.96 | 24; 30; 41 | 2.58 | 6; 39; 136 | 6.62 | 13; 72; 93 | 3.94 | 54; 105; 130 | 2.81 | 114; 116; 121 | 7.22 |
| 25; 33; 118 | 3.96 | 31; 87; 135 | 2.58 | 72; 135; 136 | 6.62 | 11; 26; 97 | 3.94 | 8; 53; 105 | 2.81 | 96; 121; 145 | 7.22 |
| 27; 59; 102 | 3.96 | 5; 31; 53 | 2.58 | 39; 110; 136 | 6.62 | 11; 13; 78 | 3.94 | 39; 105; 120 | 2.81 | 100; 114; 150 | 7.22 |
| 29; 88; 98 | 3.96 | 30; 41; 82 | 2.58 | 14; 45; 136 | 6.62 | 50; 84; 95 | 3.94 | 54; 105; 132 | 2.81 | 81; 114; 120 | 7.22 |
| 23; 85; 102 | 3.96 | 30; 41; 85 | 2.58 | 13; 69; 136 | 6.62 | 16; 29; 66 | 3.94 | 39; 53; 105 | 2.81 | 100; 114; 148 | 7.22 |
| 29; 88; 118 | 3.96 | 25; 29; 31 | 2.58 | 13; 65; 136 | 6.62 | 13; 72; 84 | 3.94 | 54; 105; 135 | 2.81 | 100; 114; 145 | 7.22 |
| 23; 63; 102 | 3.96 | 20; 41; 150 | 2.58 | 60; 97; 136 | 6.62 | 13; 97; 132 | 3.94 | 39; 105; 133 | 2.81 | 8; 121; 145 | 7.22 |
| 25; 72; 118 | 3.96 | 31; 39; 150 | 2.58 | 82; 106; 136 | 6.62 | 11; 67; 89 | 3.94 | 3; 60; 105 | 2.81 | 12; 114; 121 | 7.22 |
| 7; 23; 101 | 3.96 | 30; 41; 79 | 2.58 | 72; 83; 136 | 6.62 | 11; 86; 96 | 3.94 | 59; 86; 105 | 2.81 | 71; 95; 113 | 7.22 |
| 7; 23; 89 | 3.96 | 14; 25; 31 | 2.58 | 44; 120; 136 | 6.62 | 13; 25; 101 | 3.94 | 3; 66; 105 | 2.81 | 70; 71; 114 | 7.22 |
| 47; 82; 102 | 3.96 | 30; 41; 77 | 2.58 | 87; 136; 147 | 6.62 | 11; 13; 28 | 3.94 | 59; 105; 134 | 2.81 | 71; 95; 114 | 7.22 |
| 25; 76; 97 | 3.96 | 31; 40; 44 | 2.58 | 14; 65; 136 | 6.62 | 11; 67; 97 | 3.94 | 8; 54; 105 | 2.81 | 38; 113; 121 | 7.22 |
| 29; 89; 118 | 3.96 | 31; 40; 41 | 2.58 | 101; 135; 136 | 6.62 | 13; 42; 110 | 3.94 | 41; 86; 105 | 2.81 | 63; 114; 120 | 7.22 |
| 7; 57; 102 | 3.96 | 31; 39; 151 | 2.58 | 73; 79; 136 | 6.62 | 12; 35; 64 | 3.94 | 29; 64; 105 | 2.81 | 26; 121; 141 | 7.22 |
| 23; 85; 97 | 3.96 | 31; 60; 87 | 2.58 | 14; 66; 136 | 6.62 | 13; 45; 72 | 3.94 | 41; 44; 105 | 2.81 | 28; 113; 120 | 7.22 |
| 30; 55; 102 | 3.96 | 8; 31; 57 | 2.58 | 59; 130; 131 | 6.62 | 13; 81; 83 | 3.94 | 60; 85; 105 | 2.81 | 90; 114; 121 | 7.22 |
| 23; 78; 89 | 3.96 | 29; 31; 41 | 2.58 | 39; 124; 136 | 6.62 | 35; 53; 101 | 3.94 | 105; 130; 147 | 2.81 | 86; 113; 120 | 7.22 |
| 7; 56; 102 | 3.96 | 29; 31; 45 | 2.58 | 73; 78; 136 | 6.62 | 11; 53; 101 | 3.94 | 3; 39; 105 | 2.81 | 25; 71; 113 | 7.22 |
| 68; 88; 118 | 3.96 | 24; 41; 108 | 2.58 | 93; 120; 136 | 6.62 | 13; 81; 93 | 3.94 | 105; 130; 148 | 2.81 | 37; 113; 121 | 7.22 |
| 26; 62; 97 | 3.96 | 20; 84; 150 | 2.58 | 1; 65; 136 | 6.62 | 11; 53; 97 | 3.94 | 4; 54; 105 | 2.81 | 17; 114; 121 | 7.22 |
| 25; 74; 118 | 3.96 | 8; 31; 48 | 2.58 | 66; 93; 136 | 6.62 | 15; 53; 95 | 3.94 | 41; 62; 105 | 2.81 | 81; 121; 132 | 7.22 |
| 21; 56; 102 | 3.96 | 18; 31; 57 | 2.58 | 7; 67; 136 | 6.62 | 11; 53; 96 | 3.94 | 53; 105; 132 | 2.81 | 38; 85; 121 | 7.22 |

| | | | | | | | | | | Corneal and | |
|---|---|---|---|---|---|---|---|---|---|---|---|
| CLC_IL5RA | | CSH1_CSH2 | | | | | | Ciliated | | conjunctival | |
| positive cells | | positive cells | | Cardiomyocytes | | Chromaffin cells | | epithelial cells | | epithelial cells | |
| Clusters | Score | Clusters | Score | Clusters | Score | Clusters | Score | Clusters | Score | Clusters | Score |
| 63; 74; 138 | 11.31 | 10; 25; 109 | 9.92 | 1; 62; 113 | 12.22 | 19; 75; 101 | 5.19 | 72; 103; 143 | 25.41 | 6; 14; 109 | 7.41 |
| 36; 113; 131 | 11.31 | 74; 94; 147 | 8.53 | 53; 113; 126 | 12.22 | 7; 101; 129 | 5.19 | 57; 62; 103 | 25.41 | 6; 84; 109 | 7.41 |
| 63; 113; 131 | 11.31 | 63; 79; 109 | 8.53 | 62; 113; 126 | 12.22 | 26; 101; 129 | 5.19 | 39; 103; 143 | 25.41 | 6; 7; 109 | 7.41 |
| 53; 71; 138 | 11.31 | 62; 71; 109 | 8.53 | 63; 114; 120 | 12.22 | 29; 37; 101 | 5.19 | 35; 62; 103 | 25.41 | 6; 26; 109 | 7.41 |
| 6; 71; 138 | 11.31 | 10; 63; 109 | 8.53 | 63; 113; 131 | 12.22 | 29; 101; 129 | 5.19 | 10; 103; 129 | 25.41 | 10; 31; 114 | 7.41 |
| 29; 71; 138 | 11.31 | 8; 63; 109 | 8.53 | 1; 113; 131 | 12.22 | 29; 81; 101 | 5.19 | 45; 103; 143 | 25.41 | 31; 70; 77 | 6.03 |
| 1; 113; 131 | 11.31 | 25; 82; 109 | 8.53 | 62; 113; 150 | 12.22 | 19; 101; 129 | 5.19 | 37; 93; 103 | 25.41 | 73; 108; 109 | 6.03 |
| 7; 71; 138 | 11.31 | 8; 38; 109 | 8.53 | 63; 113; 126 | 12.22 | 63; 101; 129 | 5.19 | 37; 62; 103 | 25.41 | 6; 82; 109 | 6.03 |
| 71; 86; 138 | 11.31 | 38; 74; 94 | 8.53 | 62; 113; 147 | 12.22 | 14; 44; 97 | 3.93 | 103; 143; 150 | 25.41 | 73; 109; 126 | 6.03 |
| 36; 113; 138 | 11.31 | 63; 68; 109 | 8.53 | 37; 62; 113 | 12.22 | 29; 72; 101 | 3.93 | 103; 143; 149 | 25.41 | 6; 70; 109 | 6.03 |
| 70; 71; 138 | 11.31 | 74; 84; 94 | 8.53 | 29; 71; 138 | 10.75 | 61; 79; 101 | 3.93 | 103; 143; 148 | 25.41 | 69; 73; 109 | 6.03 |
| 71; 72; 138 | 11.31 | 38; 64; 109 | 7.22 | 62; 113; 129 | 10.75 | 29; 70; 101 | 3.93 | 103; 143; 147 | 25.41 | 31; 63; 114 | 6.03 |
| 29; 113; 131 | 11.31 | 64; 71; 109 | 7.22 | 1; 83; 113 | 10.75 | 26; 35; 101 | 3.93 | 96; 103; 143 | 25.41 | 73; 109; 150 | 6.03 |
| 10; 113; 134 | 11.31 | 64; 94; 109 | 7.22 | 62; 113; 131 | 10.75 | 25; 101; 129 | 3.93 | 82; 103; 143 | 25.41 | 73; 109; 149 | 6.03 |
| 33; 71; 138 | 9.95 | 8; 61; 109 | 7.22 | 62; 75; 113 | 10.75 | 92; 101; 129 | 3.93 | 83; 103; 143 | 25.41 | 7; 109; 148 | 6.03 |
| 65; 113; 131 | 9.95 | 10; 84; 109 | 7.22 | 62; 113; 138 | 10.75 | 14; 44; 119 | 3.93 | 37; 82; 103 | 25.41 | 25; 29; 109 | 6.03 |
| 83; 113; 131 | 9.95 | 37; 94; 109 | 7.22 | 62; 108; 113 | 10.75 | 7; 19; 118 | 3.93 | 75; 103; 129 | 25.41 | 66; 73; 109 | 6.03 |
| 8; 71; 138 | 9.95 | 70; 94; 109 | 7.22 | 53; 101; 113 | 10.75 | 7; 101; 126 | 3.93 | 8; 64; 103 | 25.41 | 73; 79; 109 | 6.03 |
| 61; 71; 138 | 9.95 | 10; 33; 109 | 7.22 | 63; 64; 113 | 10.75 | 86; 101; 129 | 3.93 | 68; 103; 143 | 25.41 | 7; 83; 109 | 6.03 |
| 28; 113; 131 | 9.95 | 8; 64; 109 | 7.22 | 63; 65; 113 | 10.75 | 44; 101; 147 | 3.93 | 89; 103; 143 | 25.41 | 25; 75; 109 | 6.03 |
| 63; 88; 138 | 9.95 | 61; 63; 109 | 7.22 | 63; 66; 113 | 10.75 | 70; 101; 129 | 3.93 | 37; 103; 147 | 25.41 | 73; 75; 109 | 6.03 |
| 45; 113; 131 | 9.95 | 54; 98; 109 | 7.22 | 67; 113; 131 | 10.75 | 7; 101; 108 | 3.93 | 89; 103; 135 | 25.41 | 73; 83; 109 | 6.03 |
| 71; 114; 131 | 9.95 | 10; 57; 109 | 7.22 | 62; 96; 113 | 10.75 | 44; 101; 133 | 3.93 | 37; 103; 149 | 25.41 | 7; 82; 109 | 6.03 |
| 36; 113; 126 | 9.95 | 7; 10; 109 | 7.22 | 36; 101; 113 | 10.75 | 44; 101; 129 | 3.93 | 103; 126; 143 | 25.41 | 10; 31; 141 | 6.03 |
| 71; 84; 138 | 9.95 | 25; 109; 120 | 7.22 | 62; 101; 113 | 10.75 | 44; 101; 107 | 3.93 | 78; 103; 143 | 25.41 | 6; 37; 109 | 6.03 |
| 63; 113; 126 | 9.95 | 71; 109; 142 | 7.22 | 37; 63; 113 | 10.75 | 101; 108; 129 | 3.93 | 44; 103; 143 | 25.41 | 73; 82; 109 | 6.03 |
| 10; 113; 131 | 9.95 | 8; 82; 109 | 7.22 | 71; 113; 134 | 10.75 | 7; 101; 150 | 3.93 | 37; 68; 103 | 25.41 | 6; 41; 109 | 6.03 |
| 64; 72; 113 | 9.95 | 91; 109; 132 | 7.22 | 114; 120; 131 | 10.75 | 29; 68; 101 | 3.93 | 73; 103; 143 | 25.41 | 4; 31; 114 | 6.03 |
| 67; 113; 131 | 9.95 | 63; 109; 132 | 7.22 | 62; 94; 113 | 10.75 | 53; 94; 101 | 3.93 | 57; 103; 129 | 25.41 | 78; 109; 114 | 6.03 |
| 96; 113; 131 | 9.95 | 63; 109; 134 | 7.22 | 62; 93; 113 | 10.75 | 19; 84; 101 | 3.93 | 62; 72; 103 | 25.41 | 7; 84; 109 | 6.03 |
| 71; 73; 138 | 9.95 | 31; 81; 120 | 7.22 | 29; 65; 113 | 10.75 | 34; 92; 101 | 3.93 | 6; 103; 143 | 25.41 | 26; 62; 109 | 6.03 |
| 62; 113; 138 | 9.95 | 8; 25; 109 | 7.22 | 62; 84; 113 | 10.75 | 63; 82; 101 | 3.93 | 84; 103; 143 | 25.41 | 64; 73; 109 | 6.03 |
| 62; 113; 150 | 9.95 | 68; 94; 109 | 7.22 | 62; 83; 113 | 10.75 | 73; 101; 129 | 3.93 | 37; 103; 120 | 25.41 | 6; 68; 109 | 6.03 |
| 113; 120; 131 | 9.95 | 14; 63; 109 | 7.22 | 68; 75; 113 | 10.75 | 70; 102; 129 | 3.93 | 70; 103; 143 | 25.41 | 31; 70; 114 | 6.03 |
| 113; 131; 150 | 9.95 | 71; 79; 109 | 7.22 | 62; 81; 113 | 10.75 | 34; 101; 129 | 3.93 | 76; 103; 129 | 25.41 | 26; 64; 109 | 6.03 |
| 113; 131; 151 | 9.95 | 57; 71; 109 | 7.22 | 53; 113; 150 | 10.75 | 42; 101; 129 | 3.93 | 54; 103; 129 | 25.41 | 25; 73; 109 | 6.03 |
| 64; 113; 131 | 9.95 | 44; 94; 109 | 7.22 | 62; 79; 113 | 10.75 | 28; 101; 129 | 3.93 | 37; 103; 119 | 25.41 | 7; 70; 109 | 6.03 |
| 44; 113; 131 | 9.95 | 31; 71; 94 | 7.22 | 71; 113; 126 | 10.75 | 77; 101; 129 | 3.93 | 37; 70; 103 | 25.41 | 4; 109; 114 | 6.03 |
| 72; 113; 134 | 9.95 | 81; 109; 132 | 7.22 | 71; 114; 131 | 10.75 | 85; 101; 129 | 3.93 | 93; 103; 143 | 25.41 | 6; 73; 109 | 6.03 |
| 79; 113; 131 | 9.95 | 62; 98; 109 | 7.22 | 63; 73; 113 | 10.75 | 36; 81; 101 | 3.93 | 49; 68; 103 | 25.41 | 9; 109; 114 | 6.03 |
| 66; 113; 131 | 9.95 | 57; 90; 109 | 7.22 | 63; 68; 113 | 10.75 | 36; 81; 102 | 3.93 | 5; 57; 103 | 25.41 | 29; 73; 109 | 6.03 |
| 62; 113; 131 | 9.95 | 62; 94; 109 | 7.22 | 63; 88; 138 | 10.75 | 63; 75; 101 | 3.93 | 10; 62; 103 | 25.41 | 31; 68; 114 | 6.03 |
| 71; 75; 138 | 9.95 | 8; 74; 109 | 7.22 | 63; 113; 133 | 10.75 | 18; 92; 101 | 3.93 | 103; 120; 143 | 25.41 | 7; 64; 109 | 6.03 |
| 78; 113; 131 | 9.95 | 25; 81; 94 | 7.22 | 66; 72; 113 | 10.75 | 10; 101; 129 | 3.93 | 79; 103; 143 | 25.41 | 61; 109; 114 | 6.03 |
| 22; 113; 134 | 9.95 | 70; 89; 109 | 7.22 | 63; 113; 132 | 10.75 | 63; 72; 101 | 3.93 | 37; 103; 134 | 25.41 | 29; 66; 109 | 6.03 |
| 18; 113; 131 | 9.95 | 8; 65; 109 | 7.22 | 66; 74; 113 | 10.75 | 70; 81; 102 | 3.93 | 54; 97; 103 | 25.41 | 6; 10; 109 | 6.03 |
| 71; 120; 138 | 9.95 | 20; 25; 148 | 7.22 | 53; 65; 113 | 10.75 | 70; 81; 101 | 3.93 | 96; 103; 129 | 25.41 | 29; 62; 109 | 6.03 |
| 114; 120; 131 | 9.95 | 10; 98; 109 | 7.22 | 1; 65; 113 | 10.75 | 29; 35; 101 | 3.93 | 69; 103; 143 | 25.41 | 68; 73; 109 | 6.03 |
| 25; 113; 131 | 9.95 | 71; 81; 109 | 7.22 | 53; 68; 113 | 10.75 | 53; 101; 129 | 3.93 | 63; 103; 143 | 25.41 | 4; 109; 119 | 6.03 |
| 63; 71; 138 | 9.95 | 25; 83; 109 | 7.22 | 44; 113; 131 | 10.75 | 26; 37; 101 | 3.93 | 66; 103; 129 | 25.41 | 10; 73; 109 | 6.03 |
| 10; 36; 113 | 9.95 | 63; 94; 109 | 7.22 | 79; 113; 131 | 10.75 | 29; 36; 101 | 3.93 | 64; 97; 103 | 25.41 | 4; 109; 148 | 6.03 |
| 47; 113; 131 | 9.95 | 8; 84; 109 | 7.22 | 63; 101; 113 | 10.75 | 29; 38; 101 | 3.93 | 37; 78; 103 | 25.41 | 2; 64; 109 | 6.03 |
| 108; 113; 131 | 9.95 | 68; 89; 109 | 7.22 | 63; 100; 113 | 10.75 | 92; 99; 107 | 3.93 | 88; 103; 143 | 25.41 | 29; 55; 109 | 6.03 |
| 71; 74; 138 | 9.95 | 68; 71; 109 | 7.22 | 53; 71; 138 | 10.75 | 29; 73; 101 | 3.93 | 57; 64; 103 | 25.41 | 4; 26; 109 | 6.03 |
| 51; 113; 134 | 9.95 | 10; 82; 109 | 7.22 | 63; 93; 113 | 10.75 | 11; 44; 68 | 3.93 | 37; 89; 103 | 25.41 | 77; 109; 114 | 6.03 |
| 7; 63; 138 | 9.95 | 38; 109; 132 | 7.22 | 1; 34; 113 | 10.75 | 74; 81; 101 | 3.93 | 66; 86; 103 | 23.3 | 25; 66; 109 | 6.03 |
| 62; 113; 126 | 9.95 | 57; 94; 109 | 7.22 | 53; 81; 113 | 10.75 | 29; 93; 101 | 3.93 | 69; 103; 133 | 23.38 | 69; 109; 114 | 6.03 |
| 44; 71; 138 | 9.95 | 8; 71; 109 | 7.22 | 63; 70; 113 | 10.75 | 76; 101; 129 | 3.93 | 69; 86; 103 | 23.38 | 7; 68; 109 | 6.03 |
| 22; 113; 131 | 9.95 | 25; 74; 109 | 7.22 | 63; 87; 113 | 10.75 | 36; 101; 129 | 3.93 | 7; 66; 103 | 23.38 | 64; 99; 109 | 6.03 |
| 72; 113; 131 | 9.95 | 63; 82; 109 | 7.22 | 66; 113; 131 | 10.75 | 44; 88; 101 | 3.93 | 68; 72; 103 | 23.38 | 4; 14; 109 | 6.03 |
| 53; 113; 126 | 9.95 | 25; 109; 134 | 7.22 | 53; 83; 113 | 10.75 | 7; 75; 101 | 3.93 | 57; 103; 114 | 23.38 | 31; 82; 114 | 6.03 |
| 101; 113; 131 | 9.95 | 25; 84; 109 | 7.22 | 63; 85; 113 | 10.75 | 44; 87; 101 | 3.93 | 42; 61; 103 | 23.38 | 35; 73; 109 | 6.03 |
| 55; 113; 134 | 9.95 | 63; 83; 109 | 7.22 | 63; 84; 113 | 10.75 | 7; 74; 101 | 3.93 | 64; 77; 103 | 23.38 | 64; 109; 114 | 6.03 |
| 71; 113; 134 | 9.95 | 8; 75; 109 | 7.22 | 63; 83; 113 | 10.75 | 29; 101; 108 | 3.93 | 63; 67; 103 | 23.38 | 60; 109; 114 | 6.03 |
| 71; 87; 113 | 9.95 | 10; 38; 109 | 7.22 | 63; 81; 113 | 10.75 | 29; 101; 126 | 3.93 | 54; 96; 103 | 23.38 | 29; 75; 109 | 6.03 |
| 74; 113; 131 | 9.95 | 10; 83; 109 | 7.22 | 1; 72; 113 | 10.75 | 29; 101; 146 | 3.93 | 66; 103; 125 | 23.38 | 109; 114; 140 | 6.03 |
| 71; 133; 148 | 9.95 | 8; 37; 109 | 7.22 | 63; 79; 113 | 10.75 | 29; 101; 147 | 3.93 | 57; 103; 118 | 23.38 | 73; 84; 109 | 6.03 |
| 71; 83; 138 | 9.95 | 109; 120; 132 | 7.22 | 63; 75; 113 | 10.75 | 29; 101; 150 | 3.93 | 35; 82; 103 | 23.38 | 6; 109; 148 | 6.03 |
| 63; 113; 138 | 9.95 | 10; 86; 109 | 7.22 | 63; 74; 138 | 10.75 | 7; 72; 101 | 3.93 | 29; 38; 103 | 23.38 | 14; 66; 109 | 6.03 |
| 71; 79; 138 | 9.95 | 25; 38; 148 | 7.22 | 63; 74; 113 | 10.75 | 75; 81; 101 | 3.93 | 38; 103; 129 | 23.38 | 10; 109; 114 | 6.03 |
| 23; 113; 131 | 9.95 | 25; 38; 149 | 7.22 | 62; 73; 113 | 10.75 | 7; 70; 101 | 3.93 | 38; 45; 103 | 23.38 | 6; 33; 109 | 6.03 |
| 53; 113; 131 | 9.95 | 25; 91; 109 | 7.22 | 63; 72; 113 | 10.75 | 94; 101; 129 | 3.93 | 39; 54; 103 | 23.38 | 70; 73; 109 | 6.03 |
| 49; 113; 131 | 9.95 | 63; 89; 109 | 7.22 | 62; 74; 113 | 10.75 | 60; 81; 101 | 3.93 | 73; 103; 129 | 23.38 | 4; 70; 109 | 6.03 |
| 71; 88; 138 | 9.95 | 65; 94; 109 | 7.22 | 62; 72; 113 | 10.75 | 22; 77; 101 | 3.93 | 79; 103; 129 | 23.38 | 7; 41; 109 | 6.03 |
| 25; 70; 113 | 8.66 | 6; 25; 109 | 7.22 | 63; 113; 135 | 10.75 | 61; 75; 101 | 3.93 | 79; 103; 132 | 23.38 | 29; 109; 150 | 6.03 |
| 113; 126; 131 | 8.66 | 8; 83; 109 | 7.22 | 71; 87; 113 | 10.75 | 7; 63; 101 | 3.93 | 66; 88; 103 | 23.38 | 6; 63; 109 | 6.03 |
| 29; 64; 113 | 8.66 | 8; 109; 132 | 7.22 | 35; 101; 113 | 10.75 | 29; 94; 101 | 3.93 | 101; 103; 143 | 23.38 | 2; 109; 114 | 6.03 |
| 84; 113; 131 | 8.66 | 28; 94; 109 | 7.22 | 42; 113; 120 | 10.75 | 7; 79; 101 | 3.93 | 79; 103; 142 | 23.38 | 31; 36; 114 | 6.03 |
| 6; 53; 113 | 8.66 | 38; 101; 109 | 7.22 | 71; 86; 138 | 10.75 | 18; 77; 101 | 3.93 | 97; 103; 135 | 23.38 | 25; 109; 150 | 6.03 |
| 10; 86; 113 | 8.66 | 5; 94; 109 | 7.22 | 56; 113; 126 | 10.75 | 7; 26; 101 | 3.93 | 68; 73; 103 | 23.38 | 72; 73; 109 | 6.03 |
| 29; 83; 113 | 8.66 | 81; 94; 109 | 7.22 | 1; 113; 150 | 10.75 | 101; 107; 129 | 3.93 | 66; 84; 103 | 23.38 | 45; 109; 114 | 6.03 |
| 64; 84; 113 | 8.66 | 20; 62; 109 | 7.22 | 22; 71; 113 | 10.75 | 29; 74; 101 | 3.93 | 48; 76; 103 | 23.38 | 55; 78; 109 | 6.03 |
| 62; 79; 113 | 8.66 | 64; 89; 109 | 7.22 | 56; 113; 150 | 10.75 | 7; 93; 101 | 3.93 | 66; 83; 103 | 23.38 | 14; 64; 109 | 6.03 |
| 53; 74; 113 | 8.66 | 8; 67; 109 | 7.22 | 10; 71; 113 | 10.75 | 29; 75; 101 | 3.93 | 57; 103; 120 | 23.38 | 41; 73; 109 | 6.03 |
| 33; 113; 131 | 8.66 | 25; 94; 149 | 7.22 | 56; 114; 120 | 10.75 | 62; 102; 129 | 3.93 | 67; 103; 143 | 23.38 | 6; 94; 109 | 6.03 |
| 53; 73; 113 | 8.66 | 25; 94; 148 | 7.22 | 75; 113; 150 | 10.75 | 29; 77; 101 | 3.93 | 42; 66; 103 | 23.38 | 44; 109; 114 | 6.03 |
| 63; 65; 113 | 8.66 | 8; 18; 109 | 7.22 | 70; 83; 113 | 10.75 | 62; 101; 129 | 3.93 | 73; 83; 103 | 23.38 | 70; 99; 109 | 6.03 |
| 64; 86; 113 | 8.66 | 25; 38; 94 | 7.22 | 1; 113; 135 | 10.75 | 29; 79; 101 | 3.93 | 66; 103; 132 | 23.38 | 6; 109; 114 | 6.03 |
| 29; 114; 120 | 8.66 | 25; 94; 134 | 7.22 | 7; 63; 113 | 10.75 | 88; 101; 129 | 3.93 | 66; 103; 133 | 23.38 | 7; 73; 109 | 6.03 |
| 63; 64; 113 | 8.66 | 25; 68; 109 | 7.22 | 70; 75; 113 | 10.75 | 7; 88; 101 | 3.93 | 66; 103; 134 | 23.38 | 70; 84; 109 | 6.03 |
| 18; 62; 113 | 8.66 | 63; 71; 109 | 7.22 | 70; 113; 150 | 10.75 | 44; 93; 101 | 3.93 | 54; 89; 103 | 23.38 | 26; 109; 114 | 6.03 |
| 62; 68; 113 | 8.66 | 101; 109; 132 | 7.22 | 38; 62; 113 | 10.75 | 29; 82; 101 | 3.93 | 10; 29; 103 | 23.38 | 63; 73; 109 | 6.03 |
| 88; 113; 131 | 8.66 | 63; 85; 109 | 7.22 | 10; 113; 120 | 10.75 | 7; 86; 101 | 3.93 | 63; 83; 103 | 23.38 | 6; 108; 109 | 6.03 |
| 70; 113; 131 | 8.66 | 63; 74; 109 | 7.22 | 56; 70; 113 | 10.75 | 44; 92; 101 | 3.93 | 21; 103; 129 | 23.38 | 70; 72; 109 | 6.03 |
| 22; 113; 120 | 8.66 | 8; 109; 120 | 7.22 | 22; 62; 113 | 10.75 | 29; 83; 101 | 3.93 | 72; 73; 103 | 23.38 | 14; 70; 109 | 6.03 |
| 69; 113; 131 | 8.66 | 18; 109; 132 | 7.22 | 101; 113; 131 | 10.75 | 7; 25; 101 | 3.93 | 66; 103; 142 | 23.38 | 14; 69; 109 | 6.03 |
| 4; 113; 131 | 8.66 | 25; 94; 147 | 7.22 | 101; 113; 132 | 10.75 | 29; 84; 101 | 3.93 | 57; 85; 103 | 23.38 | 6; 36; 109 | 6.03 |
| 62; 83; 113 | 8.66 | 10; 20; 109 | 7.22 | 6; 63; 113 | 10.75 | 29; 85; 101 | 3.93 | 29; 45; 103 | 23.38 | 55; 109; 150 | 6.03 |
| 21; 113; 134 | 8.66 | 25; 94; 119 | 7.22 | 101; 113; 134 | 10.75 | 7; 84; 101 | 3.93 | 10; 68; 103 | 23.38 | 26; 70; 109 | 6.03 |
| 1; 113; 126 | 8.66 | 89; 109; 129 | 7.22 | 56; 63; 113 | 10.75 | 7; 83; 101 | 3.93 | 33; 38; 103 | 23.38 | 26; 69; 109 | 6.03 |

| ELF3_AGBL2 positive cells | | ENS glia | | ENS neurons | | Endocardial cells | | Epicardial fat cells | | Erythroblasts | |
|---|---|---|---|---|---|---|---|---|---|---|---|
| Clusters | Score | Clusters | Score | Clusters | Score | Clusters | Score | Clusters | Score | Clusters | Score |
| 53; 113; 126 | 12.22 | 36; 77; 148 | 3.19 | 62; 100; 119 | 6.00 | 21; 121; 124 | 11.88 | 39; 49; 115 | 3.30 | 25; 28; 134 | 3.31 |
| 62; 113; 150 | 12.22 | 65; 93; 100 | 3.19 | 35; 87; 100 | 4.86 | 9; 113; 124 | 10.54 | 39; 50; 115 | 3.30 | 25; 53; 138 | 3.31 |
| 29; 71; 138 | 10.75 | 36; 77; 85 | 3.19 | 64; 89; 100 | 4.86 | 44; 121; 124 | 10.54 | 36; 39; 115 | 3.30 | 32; 130; 151 | 3.31 |
| 1; 83; 113 | 10.75 | 26; 38; 141 | 3.19 | 64; 90; 100 | 4.86 | 54; 113; 124 | 10.54 | 39; 62; 115 | 3.30 | 11; 28; 66 | 3.31 |
| 62; 75; 113 | 10.75 | 85; 100; 101 | 3.19 | 35; 68; 100 | 4.86 | 7; 124; 133 | 10.54 | 39; 115; 137 | 3.30 | 25; 83; 134 | 3.31 |
| 62; 113; 138 | 10.75 | 26; 66; 77 | 3.19 | 62; 85; 100 | 4.86 | 109; 123; 124 | 10.54 | 39; 64; 115 | 3.30 | 64; 67; 88 | 3.31 |
| 53; 101; 113 | 10.75 | 67; 96; 120 | 3.19 | 87; 100; 147 | 4.86 | 91; 121; 124 | 10.54 | 19; 39; 113 | 3.30 | 11; 62; 66 | 3.31 |
| 63; 65; 113 | 10.75 | 26; 77; 120 | 3.19 | 64; 97; 100 | 4.86 | 1; 121; 124 | 10.54 | 9; 19; 113 | 3.30 | 11; 64; 66 | 3.31 |
| 36; 101; 113 | 10.75 | 19; 76; 141 | 3.19 | 5; 35; 100 | 4.86 | 22; 123; 124 | 10.54 | 39; 107; 115 | 3.30 | 25; 27; 134 | 3.31 |
| 62; 93; 113 | 10.75 | 45; 98; 146 | 3.19 | 43; 87; 100 | 4.86 | 90; 120; 124 | 10.54 | 50; 105; 115 | 3.30 | 25; 69; 134 | 3.31 |
| 29; 65; 113 | 10.75 | 28; 67; 100 | 3.19 | 6; 100; 147 | 4.86 | 82; 88; 124 | 10.54 | 49; 115; 125 | 2.16 | 11; 28; 62 | 3.31 |
| 62; 84; 113 | 10.75 | 19; 77; 141 | 3.19 | 5; 97; 100 | 4.86 | 35; 81; 124 | 10.54 | 19; 92; 142 | 2.16 | 24; 96; 134 | 3.31 |
| 62; 83; 113 | 10.75 | 1; 26; 119 | 3.19 | 62; 87; 100 | 4.86 | 7; 121; 124 | 10.54 | 56; 105; 115 | 2.16 | 64; 67; 93 | 3.31 |
| 68; 75; 113 | 10.75 | 26; 66; 148 | 3.19 | 35; 70; 100 | 4.86 | 45; 121; 124 | 10.54 | 49; 115; 123 | 2.16 | 32; 64; 87 | 3.31 |
| 62; 81; 113 | 10.75 | 26; 71; 100 | 3.19 | 42; 97; 100 | 4.86 | 82; 124; 133 | 10.54 | 6; 50; 115 | 2.16 | 25; 78; 134 | 3.31 |
| 53; 113; 150 | 10.75 | 49; 79; 141 | 3.19 | 52; 81; 100 | 4.86 | 8; 121; 124 | 10.54 | 17; 19; 113 | 2.16 | 7; 135; 137 | 2.34 |
| 62; 79; 113 | 10.75 | 49; 81; 141 | 3.19 | 62; 83; 100 | 4.86 | 4; 121; 124 | 10.54 | 83; 139; 141 | 2.16 | 21; 135; 137 | 2.34 |
| 63; 73; 113 | 10.75 | 36; 101; 149 | 3.19 | 5; 100; 119 | 4.86 | 67; 124; 132 | 9.27 | 34; 50; 115 | 2.16 | 45; 64; 132 | 2.34 |
| 63; 68; 113 | 10.75 | 26; 72; 148 | 3.19 | 62; 82; 100 | 4.86 | 88; 124; 129 | 9.27 | 19; 92; 138 | 2.16 | 5; 96; 132 | 2.34 |
| 63; 88; 138 | 10.75 | 26; 72; 149 | 3.19 | 52; 100; 147 | 4.86 | 35; 124; 138 | 9.27 | 76; 120; 137 | 2.16 | 7; 64; 67 | 2.34 |
| 66; 74; 113 | 10.75 | 49; 119; 141 | 3.19 | 35; 82; 100 | 4.86 | 35; 124; 133 | 9.27 | 113; 115; 123 | 2.16 | 45; 64; 130 | 2.34 |
| 53; 65; 113 | 10.75 | 73; 84; 150 | 3.19 | 62; 100; 126 | 4.86 | 75; 124; 138 | 9.27 | 49; 113; 143 | 2.16 | 57; 66; 138 | 2.34 |
| 1; 65; 113 | 10.75 | 19; 126; 141 | 3.19 | 65; 100; 147 | 4.86 | 7; 67; 124 | 9.27 | 9; 87; 143 | 2.16 | 44; 66; 132 | 2.34 |
| 53; 68; 113 | 10.75 | 28; 36; 101 | 3.19 | 62; 100; 147 | 4.86 | 65; 113; 124 | 9.27 | 63; 88; 115 | 2.16 | 38; 57; 138 | 2.34 |
| 44; 113; 131 | 10.75 | 36; 83; 148 | 3.19 | 26; 68; 82 | 4.86 | 10; 121; 124 | 9.27 | 76; 120; 139 | 2.16 | 77; 95; 136 | 2.34 |
| 79; 113; 131 | 10.75 | 26; 67; 89 | 3.19 | 38; 62; 100 | 4.86 | 67; 124; 138 | 9.27 | 76; 121; 137 | 2.16 | 28; 49; 134 | 2.34 |
| 63; 100; 113 | 10.75 | 36; 120; 141 | 3.19 | 62; 84; 100 | 4.86 | 19; 121; 124 | 9.27 | 9; 92; 125 | 2.16 | 57; 66; 139 | 2.34 |
| 53; 71; 138 | 10.75 | 84; 100; 101 | 3.19 | 6; 35; 100 | 4.86 | 22; 124; 131 | 9.27 | 45; 50; 115 | 2.16 | 25; 44; 66 | 2.34 |
| 63; 93; 113 | 10.75 | 7; 36; 141 | 3.19 | 26; 68; 75 | 4.86 | 84; 88; 124 | 9.27 | 9; 88; 119 | 2.16 | 28; 49; 101 | 2.34 |
| 53; 81; 113 | 10.75 | 22; 64; 141 | 3.19 | 6; 51; 100 | 4.86 | 22; 124; 138 | 9.27 | 105; 113; 137 | 2.16 | 9; 32; 119 | 2.34 |
| 63; 70; 113 | 10.75 | 26; 94; 150 | 3.19 | 26; 68; 83 | 4.86 | 88; 124; 133 | 9.27 | 39; 56; 115 | 2.16 | 10; 76; 134 | 2.34 |
| 63; 87; 113 | 10.75 | 26; 94; 149 | 3.19 | 51; 87; 100 | 4.86 | 53; 93; 124 | 9.27 | 92; 129; 143 | 2.16 | 53; 62; 138 | 2.34 |
| 53; 83; 113 | 10.75 | 26; 94; 148 | 3.19 | 25; 87; 100 | 4.86 | 82; 84; 124 | 9.27 | 56; 121; 129 | 2.16 | 24; 132; 135 | 2.34 |
| 63; 85; 113 | 10.75 | 64; 98; 120 | 3.19 | 42; 100; 118 | 4.86 | 81; 121; 124 | 9.27 | 9; 92; 129 | 2.16 | 46; 96; 130 | 2.34 |
| 63; 84; 113 | 10.75 | 19; 84; 141 | 3.19 | 68; 87; 100 | 4.86 | 35; 124; 148 | 9.27 | 77; 86; 143 | 2.16 | 11; 28; 64 | 2.34 |
| 63; 83; 113 | 10.75 | 26; 93; 149 | 3.19 | 62; 64; 100 | 4.86 | 35; 124; 149 | 9.27 | 9; 96; 114 | 2.16 | 57; 64; 139 | 2.34 |
| 63; 81; 113 | 10.75 | 45; 67; 120 | 3.19 | 52; 62; 100 | 4.86 | 103; 121; 124 | 9.27 | 92; 143; 150 | 2.16 | 11; 61; 64 | 2.34 |
| 63; 79; 113 | 10.75 | 62; 67; 100 | 3.19 | 84; 87; 100 | 4.86 | 88; 124; 148 | 9.27 | 92; 143; 148 | 2.16 | 11; 61; 66 | 2.34 |
| 63; 75; 113 | 10.75 | 92; 100; 120 | 3.19 | 35; 65; 100 | 4.86 | 114; 116; 124 | 9.27 | 23; 121; 141 | 2.16 | 57; 64; 130 | 2.34 |
| 63; 74; 138 | 10.75 | 27; 83; 100 | 3.19 | 64; 100; 147 | 4.86 | 86; 124; 138 | 9.27 | 77; 92; 143 | 2.16 | 82; 96; 135 | 2.34 |
| 63; 74; 113 | 10.75 | 26; 88; 100 | 3.19 | 62; 97; 100 | 4.86 | 89; 124; 138 | 9.27 | 86; 139; 141 | 2.16 | 53; 57; 138 | 2.34 |
| 62; 73; 113 | 10.75 | 45; 67; 146 | 3.19 | 41; 62; 100 | 4.86 | 85; 121; 124 | 9.27 | 39; 61; 115 | 2.16 | 6; 11; 64 | 2.34 |
| 62; 74; 113 | 10.75 | 64; 92; 149 | 3.19 | 51; 81; 100 | 4.86 | 10; 124; 133 | 9.27 | 9; 97; 114 | 2.16 | 6; 135; 137 | 2.34 |
| 63; 113; 135 | 10.75 | 26; 89; 100 | 3.19 | 5; 100; 112 | 4.86 | 89; 124; 133 | 9.27 | 77; 86; 114 | 2.16 | 42; 61; 67 | 2.34 |
| 71; 87; 113 | 10.75 | 77; 100; 101 | 3.19 | 62; 89; 100 | 4.86 | 79; 121; 124 | 9.27 | 29; 71; 116 | 2.16 | 96; 126; 132 | 2.34 |
| 42; 113; 120 | 10.75 | 98; 126; 142 | 3.19 | 62; 90; 100 | 4.86 | 89; 123; 124 | 9.27 | 39; 61; 137 | 2.16 | 25; 83; 84 | 2.34 |
| 1; 113; 150 | 10.75 | 7; 26; 148 | 3.19 | 62; 70; 100 | 4.86 | 123; 124; 147 | 9.27 | 17; 49; 113 | 2.16 | 33; 66; 88 | 2.34 |
| 56; 113; 150 | 10.75 | 64; 88; 141 | 3.19 | 6; 62; 100 | 4.86 | 70; 121; 124 | 9.27 | 19; 29; 121 | 2.16 | 32; 135; 151 | 2.34 |
| 75; 113; 150 | 10.75 | 26; 84; 149 | 3.19 | 51; 62; 100 | 4.86 | 49; 124; 138 | 9.27 | 19; 29; 123 | 2.16 | 30; 90; 137 | 2.34 |
| 70; 83; 113 | 10.75 | 19; 82; 141 | 3.19 | 62; 68; 100 | 4.86 | 43; 121; 124 | 9.27 | 9; 92; 150 | 2.16 | 28; 49; 80 | 2.34 |
| 1; 113; 135 | 10.75 | 26; 82; 149 | 3.19 | 62; 98; 100 | 4.86 | 123; 124; 131 | 9.27 | 17; 19; 123 | 2.16 | 37; 44; 66 | 2.34 |
| 70; 75; 113 | 10.75 | 87; 100; 120 | 3.19 | 42; 69; 100 | 3.81 | 85; 120; 124 | 9.27 | 29; 72; 138 | 2.16 | 7; 137; 151 | 2.34 |
| 70; 113; 150 | 10.75 | 65; 107; 141 | 3.19 | 100; 118; 142 | 3.81 | 65; 121; 124 | 9.27 | 63; 71; 116 | 2.16 | 29; 57; 138 | 2.34 |
| 56; 70; 113 | 10.75 | 26; 79; 120 | 3.19 | 6; 68; 100 | 3.81 | 7; 69; 124 | 9.27 | 72; 75; 138 | 2.16 | 25; 82; 134 | 2.34 |
| 101; 113; 138 | 10.75 | 26; 79; 149 | 3.19 | 28; 81; 100 | 3.81 | 88; 124; 138 | 9.27 | 105; 113; 115 | 2.16 | 8; 25; 69 | 2.34 |
| 25; 63; 113 | 10.75 | 26; 100; 120 | 3.19 | 65; 100; 149 | 3.81 | 7; 70; 124 | 9.27 | 56; 115; 123 | 2.16 | 62; 69; 88 | 2.34 |
| 75; 79; 113 | 10.75 | 36; 67; 100 | 3.19 | 6; 73; 100 | 3.81 | 88; 124; 149 | 9.27 | 84; 92; 143 | 2.16 | 44; 135; 137 | 2.34 |
| 75; 83; 113 | 10.75 | 4; 67; 114 | 3.19 | 43; 84; 100 | 3.81 | 99; 124; 131 | 9.27 | 9; 79; 92 | 2.16 | 25; 74; 134 | 2.34 |
| 56; 79; 113 | 10.75 | 4; 67; 120 | 3.19 | 70; 100; 150 | 3.81 | 74; 82; 124 | 9.27 | 6; 39; 115 | 2.16 | 64; 132; 150 | 2.34 |
| 70; 71; 138 | 10.75 | 64; 108; 141 | 3.19 | 62; 100; 116 | 3.81 | 86; 124; 133 | 9.27 | 86; 115; 123 | 2.16 | 57; 91; 132 | 2.34 |
| 62; 70; 113 | 10.75 | 26; 81; 88 | 3.19 | 81; 100; 150 | 3.81 | 75; 121; 124 | 9.27 | 113; 120; 142 | 2.16 | 6; 124; 132 | 2.34 |
| 113; 131; 150 | 10.75 | 100; 101; 148 | 3.19 | 70; 100; 147 | 3.81 | 67; 88; 124 | 9.27 | 63; 105; 115 | 2.16 | 34; 64; 96 | 2.34 |
| 1; 44; 113 | 10.75 | 100; 101; 146 | 3.19 | 70; 100; 146 | 3.81 | 90; 121; 124 | 9.27 | 49; 97; 123 | 2.16 | 28; 95; 136 | 2.34 |
| 49; 114; 120 | 10.75 | 100; 101; 119 | 3.19 | 62; 100; 118 | 3.81 | 67; 111; 124 | 9.27 | 63; 107; 123 | 2.16 | 26; 57; 138 | 2.34 |
| 54; 101; 113 | 10.75 | 38; 70; 141 | 3.19 | 38; 70; 100 | 3.81 | 7; 124; 138 | 9.27 | 92; 115; 139 | 2.16 | 35; 64; 67 | 2.34 |
| 25; 101; 113 | 10.75 | 26; 82; 148 | 3.19 | 74; 100; 147 | 3.81 | 48; 124; 138 | 9.27 | 10; 115; 116 | 2.16 | 34; 64; 66 | 2.34 |
| 83; 113; 131 | 10.75 | 26; 120; 149 | 3.19 | 28; 82; 100 | 3.81 | 60; 113; 124 | 9.27 | 10; 115; 123 | 2.16 | 25; 49; 67 | 2.34 |
| 55; 70; 113 | 10.75 | 19; 119; 141 | 3.19 | 6; 72; 100 | 3.81 | 17; 67; 124 | 9.27 | 76; 86; 138 | 2.16 | 24; 32; 67 | 2.34 |
| 1; 25; 113 | 10.75 | 64; 71; 98 | 3.19 | 38; 72; 100 | 3.81 | 26; 121; 124 | 9.27 | 113; 122; 140 | 2.16 | 5; 57; 138 | 2.34 |
| 62; 65; 113 | 10.75 | 82; 83; 150 | 3.19 | 28; 87; 100 | 3.81 | 72; 121; 124 | 9.27 | 113; 122; 141 | 2.16 | 66; 76; 131 | 2.34 |
| 62; 68; 113 | 10.75 | 26; 69; 94 | 3.19 | 100; 118; 133 | 3.81 | 9; 121; 124 | 9.27 | 49; 89; 113 | 2.16 | 18; 25; 67 | 2.34 |
| 7; 113; 150 | 10.75 | 17; 36; 141 | 3.19 | 38; 68; 100 | 3.81 | 84; 113; 124 | 9.27 | 10; 116; 123 | 2.16 | 19; 32; 137 | 2.34 |
| 36; 62; 113 | 10.75 | 36; 141; 142 | 3.19 | 100; 118; 150 | 3.81 | 121; 124; 129 | 9.27 | 10; 116; 133 | 2.16 | 78; 124; 132 | 2.34 |
| 10; 113; 148 | 10.75 | 26; 68; 149 | 3.19 | 6; 70; 100 | 3.81 | 9; 123; 124 | 9.27 | 113; 121; 141 | 2.16 | 19; 42; 137 | 2.34 |
| 10; 36; 113 | 10.75 | 68; 74; 77 | 2.25 | 100; 119; 123 | 3.81 | 85; 88; 124 | 9.27 | 14; 105; 115 | 2.16 | 57; 69; 138 | 2.34 |
| 36; 113; 126 | 10.75 | 5; 44; 141 | 2.25 | 38; 73; 100 | 3.81 | 7; 124; 148 | 9.27 | 23; 137; 141 | 2.16 | 25; 120; 134 | 2.34 |
| 36; 113; 151 | 10.75 | 64; 81; 107 | 2.25 | 43; 83; 100 | 3.81 | 60; 121; 124 | 9.27 | 10; 105; 115 | 2.16 | 8; 27; 96 | 2.34 |
| 36; 113; 138 | 10.75 | 26; 81; 100 | 2.25 | 100; 118; 126 | 3.81 | 48; 123; 124 | 9.27 | 49; 107; 123 | 2.16 | 29; 76; 134 | 2.34 |
| 36; 113; 134 | 10.75 | 38; 69; 84 | 2.25 | 74; 100; 118 | 3.81 | 29; 121; 124 | 9.27 | 121; 137; 141 | 2.16 | 64; 66; 92 | 2.34 |
| 36; 113; 131 | 10.75 | 53; 83; 150 | 2.25 | 100; 118; 123 | 3.81 | 120; 124; 149 | 9.27 | 105; 107; 115 | 2.16 | 55; 65; 131 | 2.34 |
| 29; 101; 113 | 10.75 | 4; 10; 141 | 2.25 | 6; 74; 100 | 3.81 | 70; 88; 124 | 9.27 | 121; 135; 137 | 2.16 | 57; 131; 133 | 2.34 |
| 53; 63; 113 | 10.75 | 68; 72; 141 | 2.25 | 38; 74; 100 | 3.81 | 88; 93; 124 | 9.27 | 9; 85; 92 | 2.16 | 57; 68; 138 | 2.34 |
| 65; 113; 131 | 10.75 | 62; 100; 101 | 2.25 | 74; 100; 119 | 3.81 | 34; 121; 124 | 9.27 | 113; 115; 141 | 2.16 | 25; 77; 134 | 2.34 |
| 63; 113; 150 | 10.75 | 27; 100; 150 | 2.25 | 38; 69; 100 | 3.81 | 67; 92; 124 | 9.27 | 17; 50; 123 | 2.16 | 84; 135; 137 | 2.34 |
| 44; 63; 113 | 10.75 | 36; 65; 71 | 2.25 | 100; 118; 149 | 3.81 | 44; 113; 124 | 9.27 | 76; 115; 123 | 2.16 | 34; 62; 96 | 2.34 |
| 64; 113; 150 | 10.75 | 29; 92; 141 | 2.25 | 81; 100; 133 | 3.81 | 13; 124; 129 | 9.27 | 49; 105; 115 | 2.16 | 32; 87; 130 | 2.34 |
| 29; 113; 131 | 10.75 | 64; 81; 101 | 2.25 | 6; 75; 100 | 3.81 | 121; 124; 140 | 9.27 | 121; 129; 150 | 2.16 | 64; 107; 134 | 2.34 |
| 29; 114; 120 | 10.75 | 26; 64; 95 | 2.25 | 62; 100; 102 | 3.81 | 121; 124; 141 | 9.27 | 9; 82; 138 | 2.16 | 32; 44; 137 | 2.34 |
| 44; 62; 113 | 10.75 | 36; 120; 134 | 2.25 | 6; 69; 100 | 3.81 | 121; 124; 142 | 9.27 | 39; 129; 137 | 2.16 | 64; 65; 131 | 2.34 |
| 28; 63; 113 | 10.75 | 62; 98; 148 | 2.25 | 62; 100; 123 | 3.81 | 121; 124; 143 | 9.27 | 50; 89; 115 | 2.16 | 55; 83; 134 | 2.34 |
| 43; 100; 113 | 10.75 | 68; 78; 80 | 2.25 | 5; 87; 100 | 3.81 | 98; 121; 124 | 9.27 | 36; 116; 123 | 2.16 | 57; 67; 130 | 2.34 |
| 63; 113; 138 | 10.75 | 68; 77; 150 | 2.25 | 74; 82; 100 | 3.81 | 114; 124; 131 | 9.27 | 50; 94; 115 | 2.16 | 90; 134; 137 | 2.34 |
| 1; 55; 113 | 10.75 | 26; 81; 129 | 2.25 | 28; 51; 100 | 3.81 | 90; 124; 138 | 9.27 | 50; 93; 115 | 2.16 | 44; 49; 67 | 2.34 |
| 1; 53; 113 | 10.75 | 26; 81; 120 | 2.25 | 82; 84; 100 | 3.81 | 67; 123; 124 | 9.27 | 50; 92; 123 | 2.16 | 66; 69; 132 | 2.34 |
| 72; 83; 113 | 10.75 | 45; 87; 100 | 2.25 | 82; 83; 100 | 3.81 | 99; 121; 124 | 9.27 | 50; 92; 115 | 2.16 | 84; 96; 132 | 2.34 |
| 34; 75; 113 | 9.37 | 36; 64; 120 | 2.25 | 100; 126; 147 | 3.81 | 82; 120; 124 | 9.27 | 50; 85; 115 | 2.16 | 64; 72; 134 | 2.34 |
| 1; 28; 113 | 9.37 | 26; 64; 89 | 2.25 | 65; 84; 100 | 3.81 | 35; 69; 124 | 9.27 | 6; 61; 121 | 2.16 | 64; 134; 135 | 2.34 |
| 25; 70; 113 | 9.37 | 62; 100; 119 | 2.25 | 5; 86; 100 | 3.81 | 90; 123; 124 | 9.27 | 19; 116; 121 | 2.16 | 6; 30; 137 | 2.34 |
| 10; 113; 150 | 9.37 | 36; 64; 140 | 2.25 | 65; 87; 100 | 3.81 | 21; 67; 124 | 9.27 | 50; 88; 115 | 2.16 | 45; 64; 93 | 2.34 |
| 71; 93; 114 | 9.37 | 36; 64; 141 | 2.25 | 43; 81; 100 | 3.81 | 82; 121; 124 | 9.27 | 83; 105; 115 | 2.16 | 6; 66; 132 | 2.34 |

| Excitatory neurons | | Extravillous trophoblasts | | Ganglion cells | | Goblet cells | | Granule neurons | | Hematopoietic stem cells | |
|---|---|---|---|---|---|---|---|---|---|---|---|
| Clusters | Score | Clusters | Score | Clusters | Score | Clusters | Score | Clusters | Score | Clusters | Score |
| 27; 57; 97 | 4.60 | 84; 94; 114 | 5.73 | 43; 59; 127 | 3.57 | 68; 71; 99 | 3.45 | 26; 84; 102 | 3.60 | 17; 80; 132 | 8.90 |
| 40; 98; 138 | 4.60 | 81; 94; 114 | 5.73 | 26; 59; 127 | 3.57 | 34; 55; 77 | 3.45 | 27; 62; 135 | 3.60 | 17; 76; 129 | 7.41 |
| 27; 74; 97 | 4.60 | 37; 94; 114 | 4.35 | 59; 92; 127 | 3.57 | 19; 59; 104 | 2.45 | 28; 49; 102 | 3.60 | 49; 70; 147 | 7.41 |
| 27; 75; 147 | 3.30 | 37; 94; 148 | 4.35 | 95; 124; 128 | 3.57 | 9; 34; 112 | 2.45 | 69; 90; 103 | 3.60 | 13; 66; 85 | 7.41 |
| 39; 73; 97 | 3.30 | 36; 38; 81 | 4.35 | 8; 59; 127 | 3.57 | 20; 85; 103 | 2.45 | 29; 63; 77 | 3.60 | 49; 76; 80 | 7.41 |
| 27; 75; 103 | 3.30 | 14; 98; 114 | 3.12 | 32; 59; 128 | 3.57 | 71; 85; 99 | 2.45 | 26; 29; 102 | 3.60 | 13; 66; 87 | 7.41 |
| 27; 75; 97 | 3.30 | 53; 94; 114 | 3.12 | 59; 94; 127 | 3.57 | 85; 103; 108 | 2.45 | 27; 35; 135 | 3.60 | 17; 62; 80 | 7.41 |
| 40; 89; 98 | 3.30 | 76; 81; 108 | 3.12 | 59; 125; 127 | 3.57 | 19; 122; 125 | 2.45 | 13; 28; 102 | 3.60 | 49; 79; 148 | 7.41 |
| 40; 89; 97 | 3.30 | 84; 94; 149 | 3.12 | 9; 122; 128 | 3.57 | 9; 99; 147 | 2.45 | 19; 27; 135 | 3.60 | 49; 78; 149 | 7.41 |
| 24; 83; 97 | 3.30 | 26; 114; 149 | 3.12 | 59; 127; 146 | 3.57 | 62; 74; 100 | 2.45 | 8; 98; 102 | 3.60 | 49; 129; 148 | 7.41 |
| 39; 74; 98 | 3.30 | 38; 81; 85 | 3.12 | 128; 136; 143 | 3.57 | 8; 32; 109 | 2.45 | 28; 102; 141 | 3.60 | 49; 78; 147 | 7.41 |
| 39; 74; 97 | 3.30 | 38; 81; 92 | 3.12 | 12; 59; 128 | 3.57 | 34; 57; 83 | 2.45 | 67; 90; 103 | 3.60 | 17; 66; 80 | 7.41 |
| 24; 84; 97 | 3.30 | 52; 86; 114 | 3.12 | 59; 127; 148 | 3.57 | 62; 72; 100 | 2.45 | 26; 90; 102 | 3.60 | 49; 147; 149 | 7.41 |
| 26; 55; 97 | 3.30 | 1; 97; 114 | 3.12 | 59; 80; 127 | 3.57 | 18; 84; 133 | 2.45 | 27; 44; 131 | 3.60 | 13; 66; 78 | 7.41 |
| 27; 73; 103 | 3.30 | 72; 81; 84 | 3.12 | 43; 56; 118 | 3.57 | 36; 120; 133 | 2.45 | 81; 90; 103 | 3.60 | 17; 75; 80 | 7.41 |
| 39; 70; 98 | 3.30 | 94; 109; 114 | 3.12 | 20; 59; 127 | 3.57 | 18; 69; 108 | 2.45 | 21; 34; 141 | 3.60 | 13; 69; 150 | 7.41 |
| 39; 70; 97 | 3.30 | 16; 36; 81 | 3.12 | 25; 26; 97 | 3.57 | 34; 55; 147 | 2.45 | 26; 81; 102 | 3.60 | 49; 66; 77 | 7.41 |
| 28; 47; 98 | 3.30 | 37; 52; 114 | 3.12 | 1; 59; 127 | 3.57 | 32; 122; 134 | 2.45 | 26; 28; 102 | 3.60 | 13; 49; 148 | 7.41 |
| 27; 74; 147 | 3.30 | 52; 73; 114 | 3.12 | 28; 51; 97 | 3.57 | 31; 62; 81 | 2.45 | 27; 102; 131 | 3.60 | 49; 77; 148 | 7.41 |
| 27; 74; 103 | 3.30 | 14; 92; 114 | 3.12 | 59; 126; 127 | 3.57 | 32; 99; 122 | 2.45 | 24; 99; 102 | 3.60 | 17; 75; 147 | 7.41 |
| 27; 74; 98 | 3.30 | 16; 81; 149 | 3.12 | 43; 100; 127 | 3.57 | 55; 126; 147 | 2.45 | 24; 50; 102 | 3.60 | 13; 64; 80 | 7.41 |
| 27; 73; 147 | 3.30 | 33; 52; 114 | 3.12 | 32; 40; 128 | 3.57 | 34; 55; 149 | 2.45 | 27; 40; 135 | 3.60 | 49; 69; 77 | 7.41 |
| 40; 89; 138 | 3.30 | 37; 81; 92 | 3.12 | 59; 65; 127 | 3.57 | 31; 34; 105 | 2.45 | 12; 27; 102 | 3.60 | 13; 66; 77 | 6.03 |
| 37; 39; 98 | 3.30 | 85; 94; 114 | 3.12 | 9; 100; 128 | 3.57 | 31; 62; 83 | 2.45 | 28; 99; 102 | 3.60 | 13; 49; 69 | 6.03 |
| 24; 79; 97 | 3.30 | 14; 56; 114 | 3.12 | 84; 127; 135 | 3.57 | 31; 34; 103 | 2.45 | 29; 34; 149 | 3.60 | 49; 79; 147 | 6.03 |
| 10; 27; 102 | 3.30 | 52; 72; 114 | 3.12 | 59; 119; 127 | 3.57 | 55; 77; 147 | 2.45 | 27; 37; 78 | 3.60 | 49; 129; 147 | 6.03 |
| 27; 79; 147 | 3.30 | 36; 96; 114 | 3.12 | 59; 127; 134 | 3.57 | 55; 79; 147 | 2.45 | 8; 78; 102 | 3.60 | 17; 56; 69 | 6.03 |
| 27; 79; 107 | 3.30 | 97; 108; 114 | 3.12 | 59; 127; 136 | 3.57 | 36; 120; 125 | 2.45 | 8; 26; 102 | 3.60 | 49; 80; 81 | 6.03 |
| 27; 79; 103 | 3.30 | 48; 81; 148 | 3.12 | 25; 102; 127 | 3.57 | 31; 62; 84 | 2.45 | 26; 61; 102 | 3.60 | 49; 72; 80 | 6.03 |
| 27; 79; 102 | 3.30 | 36; 81; 150 | 3.12 | 89; 127; 135 | 3.57 | 24; 62; 122 | 2.45 | 27; 40; 102 | 3.60 | 17; 80; 147 | 6.03 |
| 27; 79; 97 | 3.30 | 52; 75; 114 | 3.12 | 17; 59; 127 | 3.57 | 23; 122; 135 | 2.45 | 26; 69; 102 | 3.60 | 17; 80; 150 | 6.03 |
| 28; 39; 89 | 3.30 | 52; 74; 114 | 3.12 | 59; 99; 127 | 3.57 | 24; 62; 121 | 2.45 | 7; 26; 102 | 3.60 | 17; 80; 129 | 6.03 |
| 24; 81; 97 | 3.30 | 14; 52; 114 | 3.12 | 51; 59; 127 | 3.57 | 31; 62; 74 | 2.45 | 84; 90; 103 | 3.60 | 49; 76; 119 | 6.03 |
| 40; 90; 98 | 3.30 | 38; 81; 149 | 3.12 | 40; 128; 136 | 3.57 | 34; 57; 84 | 2.45 | 26; 74; 102 | 3.60 | 13; 66; 84 | 6.03 |
| 40; 90; 97 | 3.30 | 52; 114; 129 | 3.12 | 59; 82; 127 | 3.57 | 71; 74; 100 | 2.45 | 27; 77; 131 | 3.60 | 49; 95; 145 | 6.03 |
| 39; 69; 97 | 3.30 | 36; 79; 81 | 3.12 | 59; 95; 128 | 3.57 | 19; 99; 125 | 2.45 | 6; 26; 102 | 3.60 | 13; 66; 80 | 6.03 |
| 39; 75; 97 | 3.30 | 14; 37; 114 | 3.12 | 12; 51; 128 | 3.57 | 84; 120; 125 | 2.45 | 21; 43; 78 | 3.60 | 14; 66; 77 | 6.03 |
| 28; 39; 97 | 3.30 | 37; 114; 129 | 3.12 | 59; 77; 127 | 3.57 | 32; 63; 121 | 2.45 | 21; 43; 69 | 3.60 | 49; 80; 82 | 6.03 |
| 39; 75; 98 | 3.30 | 70; 94; 114 | 3.12 | 61; 127; 135 | 3.57 | 43; 122; 124 | 2.45 | 23; 102; 141 | 3.60 | 66; 72; 92 | 6.03 |
| 12; 97; 113 | 3.30 | 37; 114; 143 | 3.12 | 44; 59; 127 | 3.57 | 75; 99; 129 | 2.45 | 28; 29; 134 | 3.60 | 17; 80; 135 | 6.03 |
| 39; 69; 98 | 3.30 | 81; 92; 109 | 3.12 | 5; 59; 127 | 3.57 | 18; 34; 68 | 2.45 | 53; 81; 98 | 3.60 | 77; 87; 135 | 6.03 |
| 24; 89; 147 | 3.30 | 101; 108; 114 | 3.12 | 28; 102; 127 | 3.57 | 18; 88; 133 | 2.45 | 18; 26; 102 | 3.60 | 49; 95; 148 | 6.03 |
| 24; 118; 127 | 3.30 | 26; 36; 114 | 3.12 | 97; 101; 118 | 3.57 | 62; 71; 100 | 2.45 | 26; 83; 102 | 3.60 | 49; 65; 80 | 6.03 |
| 24; 118; 137 | 3.30 | 56; 97; 113 | 3.12 | 44; 127; 135 | 3.57 | 28; 85; 103 | 2.45 | 12; 29; 61 | 3.60 | 49; 80; 97 | 6.03 |
| 24; 119; 133 | 3.30 | 1; 13; 114 | 3.12 | 9; 26; 97 | 3.57 | 34; 55; 129 | 2.45 | 27; 50; 125 | 3.60 | 56; 66; 77 | 6.03 |
| 24; 119; 138 | 3.30 | 81; 94; 149 | 3.12 | 17; 61; 127 | 3.57 | 70; 71; 125 | 2.45 | 26; 43; 77 | 3.60 | 13; 70; 87 | 6.03 |
| 27; 64; 98 | 3.30 | 81; 94; 150 | 3.12 | 52; 59; 127 | 3.57 | 31; 54; 120 | 2.45 | 21; 28; 142 | 3.60 | 18; 78; 129 | 6.03 |
| 21; 40; 119 | 3.30 | 1; 109; 114 | 3.12 | 59; 81; 127 | 3.57 | 34; 71; 147 | 2.45 | 29; 93; 146 | 3.60 | 17; 56; 148 | 6.03 |
| 21; 40; 98 | 3.30 | 94; 114; 118 | 3.12 | 25; 97; 135 | 3.57 | 34; 57; 98 | 2.45 | 24; 40; 102 | 3.60 | 18; 72; 80 | 6.03 |
| 6; 39; 97 | 3.30 | 64; 71; 97 | 3.12 | 40; 95; 128 | 3.57 | 8; 31; 120 | 2.45 | 27; 97; 102 | 3.60 | 17; 147; 150 | 6.03 |
| 27; 65; 103 | 3.30 | 35; 81; 84 | 3.12 | 43; 99; 127 | 3.57 | 31; 62; 63 | 2.45 | 27; 96; 102 | 3.60 | 17; 28; 77 | 6.03 |
| 12; 79; 113 | 3.30 | 36; 81; 93 | 3.12 | 32; 128; 143 | 3.57 | 31; 70; 71 | 2.45 | 24; 39; 102 | 3.60 | 18; 72; 78 | 6.03 |
| 24; 114; 127 | 3.30 | 15; 97; 114 | 3.12 | 10; 59; 127 | 3.57 | 99; 120; 129 | 2.45 | 26; 54; 102 | 3.60 | 17; 28; 80 | 6.03 |
| 28; 53; 103 | 3.30 | 20; 94; 148 | 3.12 | 95; 128; 143 | 2.66 | 34; 57; 89 | 2.45 | 27; 125; 131 | 3.60 | 17; 56; 119 | 6.03 |
| 28; 89; 97 | 3.30 | 37; 109; 113 | 3.12 | 7; 28; 97 | 2.66 | 62; 109; 122 | 2.45 | 28; 43; 77 | 3.60 | 49; 80; 95 | 6.03 |
| 21; 39; 97 | 3.30 | 81; 97; 108 | 3.12 | 95; 128; 142 | 2.66 | 30; 32; 100 | 2.45 | 21; 28; 64 | 3.60 | 17; 66; 77 | 6.03 |
| 27; 44; 103 | 3.30 | 81; 97; 109 | 3.12 | 95; 128; 133 | 2.66 | 31; 62; 68 | 2.45 | 27; 47; 102 | 3.60 | 28; 49; 119 | 6.03 |
| 28; 56; 97 | 3.30 | 81; 97; 113 | 3.12 | 95; 128; 146 | 2.66 | 31; 62; 69 | 2.45 | 29; 42; 141 | 3.60 | 49; 68; 77 | 6.03 |
| 28; 56; 98 | 3.30 | 16; 37; 149 | 3.12 | 9; 40; 128 | 2.66 | 68; 71; 125 | 2.45 | 1; 29; 102 | 3.60 | 18; 49; 77 | 6.03 |
| 27; 61; 103 | 3.30 | 36; 81; 86 | 3.12 | 7; 28; 118 | 2.66 | 31; 63; 133 | 2.45 | 21; 34; 43 | 3.60 | 49; 80; 83 | 6.03 |
| 27; 61; 102 | 3.30 | 36; 81; 85 | 3.12 | 31; 127; 129 | 2.66 | 31; 62; 70 | 2.45 | 13; 27; 102 | 3.60 | 49; 80; 84 | 6.03 |
| 27; 61; 98 | 3.30 | 35; 81; 149 | 3.12 | 95; 128; 129 | 2.66 | 5; 100; 120 | 2.45 | 28; 64; 102 | 3.60 | 66; 77; 86 | 6.03 |
| 34; 79; 97 | 3.30 | 35; 81; 148 | 3.12 | 95; 128; 150 | 2.66 | 63; 88; 133 | 2.45 | 8; 21; 119 | 3.60 | 17; 56; 80 | 6.03 |
| 23; 61; 97 | 3.30 | 94; 97; 114 | 3.12 | 44; 95; 128 | 2.66 | 34; 68; 92 | 2.45 | 12; 28; 141 | 3.60 | 49; 95; 119 | 6.03 |
| 27; 62; 103 | 3.30 | 81; 96; 109 | 3.12 | 95; 128; 134 | 2.66 | 36; 112; 133 | 2.45 | 26; 53; 102 | 3.60 | 49; 80; 85 | 6.03 |
| 39; 61; 98 | 3.30 | 94; 97; 109 | 3.12 | 29; 95; 128 | 2.66 | 18; 62; 100 | 2.45 | 24; 102; 127 | 3.60 | 17; 66; 72 | 6.03 |
| 39; 61; 97 | 3.30 | 94; 114; 148 | 3.12 | 24; 43; 97 | 2.66 | 90; 99; 129 | 2.45 | 29; 96; 149 | 3.60 | 49; 80; 88 | 6.03 |
| 27; 66; 97 | 3.30 | 29; 94; 114 | 3.12 | 93; 101; 118 | 2.66 | 80; 99; 126 | 2.45 | 28; 78; 102 | 3.60 | 49; 76; 78 | 6.03 |
| 27; 66; 103 | 3.30 | 59; 115; 121 | 3.12 | 1; 44; 118 | 2.66 | 31; 62; 120 | 2.45 | 29; 98; 102 | 3.60 | 49; 76; 77 | 6.03 |
| 24; 97; 150 | 3.30 | 36; 81; 82 | 3.12 | 95; 128; 135 | 2.66 | 32; 48; 131 | 2.45 | 21; 78; 135 | 3.60 | 35; 77; 135 | 6.03 |
| 27; 70; 103 | 3.30 | 6; 13; 114 | 3.12 | 32; 73; 128 | 2.66 | 82; 99; 126 | 2.45 | 90; 93; 103 | 3.60 | 49; 77; 79 | 6.03 |
| 27; 37; 103 | 3.30 | 81; 82; 108 | 3.12 | 95; 128; 132 | 2.66 | 70; 103; 129 | 2.45 | 12; 28; 145 | 3.60 | 49; 97; 135 | 6.03 |
| 24; 96; 97 | 3.30 | 7; 97; 114 | 3.12 | 95; 128; 136 | 2.66 | 18; 99; 125 | 2.45 | 28; 60; 102 | 3.60 | 49; 69; 148 | 6.03 |
| 24; 96; 98 | 3.30 | 52; 108; 114 | 3.12 | 95; 128; 151 | 2.66 | 64; 103; 129 | 2.45 | 9; 27; 134 | 3.60 | 17; 77; 126 | 6.03 |
| 27; 69; 103 | 3.30 | 56; 64; 114 | 3.12 | 44; 74; 127 | 2.66 | 31; 69; 71 | 2.45 | 9; 27; 78 | 3.60 | 17; 77; 132 | 6.03 |
| 24; 97; 114 | 3.30 | 13; 94; 114 | 3.12 | 9; 122; 127 | 2.66 | 25; 71; 100 | 2.45 | 21; 64; 84 | 3.60 | 49; 77; 119 | 6.03 |
| 28; 98; 116 | 3.30 | 1; 36; 114 | 3.12 | 26; 118; 149 | 2.66 | 55; 68; 147 | 2.45 | 29; 84; 96 | 3.60 | 49; 69; 147 | 6.03 |
| 24; 97; 147 | 3.30 | 38; 84; 148 | 3.12 | 29; 70; 97 | 2.66 | 69; 103; 129 | 2.45 | 22; 27; 102 | 3.60 | 17; 77; 134 | 6.03 |
| 24; 97; 148 | 3.30 | 7; 13; 114 | 3.12 | 43; 53; 118 | 2.66 | 18; 70; 108 | 2.45 | 12; 28; 43 | 3.60 | 17; 77; 135 | 6.03 |
| 27; 37; 98 | 3.30 | 36; 94; 114 | 3.12 | 6; 11; 97 | 2.66 | 31; 68; 103 | 2.45 | 26; 77; 102 | 3.60 | 49; 78; 119 | 6.03 |
| 28; 48; 102 | 3.30 | 71; 109; 114 | 3.12 | 32; 72; 128 | 2.66 | 20; 55; 103 | 2.45 | 27; 39; 131 | 3.60 | 13; 65; 78 | 6.03 |
| 20; 39; 97 | 3.30 | 30; 114; 143 | 3.12 | 5; 32; 128 | 2.66 | 62; 88; 100 | 2.45 | 26; 102; 150 | 3.60 | 17; 77; 147 | 6.03 |
| 9; 39; 98 | 3.30 | 56; 114; 129 | 3.12 | 60; 95; 127 | 2.66 | 8; 30; 100 | 2.45 | 28; 94; 131 | 3.60 | 17; 77; 150 | 6.03 |
| 40; 84; 98 | 3.30 | 81; 82; 84 | 3.12 | 60; 95; 128 | 2.66 | 25; 107; 132 | 2.45 | 21; 64; 81 | 3.60 | 49; 78; 129 | 6.03 |
| 17; 97; 138 | 3.30 | 36; 74; 81 | 3.12 | 17; 43; 127 | 2.66 | 19; 64; 104 | 2.45 | 28; 96; 102 | 3.60 | 13; 65; 87 | 6.03 |
| 6; 12; 113 | 3.30 | 53; 81; 108 | 3.12 | 9; 124; 128 | 2.66 | 27; 70; 103 | 2.45 | 12; 28; 61 | 3.60 | 17; 78; 80 | 6.03 |
| 12; 89; 113 | 3.30 | 13; 108; 114 | 3.12 | 37; 102; 118 | 2.66 | 5; 34; 92 | 2.45 | 26; 76; 102 | 3.60 | 17; 69; 77 | 6.03 |
| 28; 48; 118 | 3.30 | 36; 76; 94 | 3.12 | 9; 124; 127 | 2.66 | 19; 31; 100 | 2.45 | 27; 78; 102 | 3.60 | 49; 69; 119 | 6.03 |
| 28; 48; 119 | 3.30 | 81; 82; 86 | 3.12 | 43; 53; 97 | 2.66 | 19; 64; 91 | 2.45 | 8; 21; 81 | 2.56 | 17; 76; 80 | 6.03 |
| 39; 68; 97 | 3.30 | 13; 114; 140 | 3.12 | 31; 54; 127 | 2.66 | 69; 103; 108 | 2.45 | 29; 37; 95 | 2.56 | 18; 64; 80 | 6.03 |
| 28; 48; 138 | 3.30 | 28; 36; 94 | 3.12 | 40; 99; 127 | 2.66 | 31; 62; 138 | 2.45 | 12; 28; 37 | 2.56 | 49; 77; 126 | 6.03 |
| 24; 97; 149 | 3.30 | 52; 68; 114 | 3.12 | 9; 120; 125 | 2.66 | 31; 62; 148 | 2.45 | 27; 119; 135 | 2.56 | 49; 77; 129 | 6.03 |
| 24; 98; 102 | 3.30 | 29; 114; 142 | 3.12 | 32; 70; 128 | 2.66 | 31; 44; 62 | 2.45 | 8; 21; 78 | 2.56 | 49; 77; 149 | 6.03 |
| 24; 98; 103 | 3.30 | 36; 84; 147 | 3.12 | 59; 72; 127 | 2.66 | 5; 31; 71 | 2.45 | 47; 67; 78 | 2.56 | 49; 78; 80 | 6.03 |
| 12; 84; 113 | 3.30 | 94; 148; 149 | 3.12 | 46; 95; 127 | 2.66 | 79; 99; 129 | 2.45 | 21; 70; 149 | 2.56 | 49; 78; 81 | 6.03 |
| 12; 40; 114 | 3.30 | 94; 148; 150 | 3.12 | 46; 95; 128 | 2.66 | 62; 85; 103 | 2.45 | 27; 119; 141 | 2.56 | 49; 78; 82 | 6.03 |
| 12; 40; 117 | 3.30 | 81; 109; 113 | 3.12 | 59; 94; 128 | 2.66 | 34; 35; 69 | 2.45 | 9; 27; 149 | 2.56 | 49; 77; 146 | 6.03 |
| 12; 40; 118 | 3.30 | 13; 80; 114 | 3.12 | 22; 95; 128 | 2.66 | 20; 70; 103 | 2.45 | 8; 21; 103 | 2.56 | 49; 78; 84 | 6.03 |
| 12; 40; 119 | 3.30 | 13; 97; 113 | 3.12 | 15; 95; 128 | 2.66 | 62; 74; 133 | 2.45 | 8; 21; 118 | 2.56 | 49; 77; 145 | 6.03 |
| 12; 40; 127 | 3.30 | 52; 112; 114 | 3.12 | 59; 95; 127 | 2.66 | 68; 120; 125 | 2.45 | 24; 90; 102 | 2.56 | 49; 70; 80 | 6.03 |

| Hepatoblasts | | Horizontal cells | | IGFBP1_DKK1 positive cells | | Inhibitory interneurons | | Inhibitory neurons | | Intestinal epithelial cells | |
|---|---|---|---|---|---|---|---|---|---|---|---|
| Clusters | Score | Clusters | Score | Clusters | Score | Clusters | Score | Clusters | Score | Clusters | Score |
| 41; 43; 107 | 5.19 | 23; 85; 97 | 5.06 | 129; 143; 145 | 3.96 | 6; 94; 98 | 6.90 | 22; 81; 99 | 5.64 | 6; 43; 96 | 6.00 |
| 16; 41; 43 | 5.19 | 24; 88; 98 | 5.06 | 8; 114; 135 | 3.96 | 1; 79; 96 | 5.82 | 15; 22; 99 | 5.64 | 41; 43; 63 | 6.00 |
| 3; 29; 148 | 5.19 | 25; 28; 98 | 5.06 | 40; 54; 130 | 3.96 | 8; 81; 92 | 5.82 | 1; 15; 99 | 4.78 | 41; 43; 147 | 6.00 |
| 3; 84; 86 | 5.19 | 29; 98; 126 | 5.06 | 130; 142; 144 | 3.96 | 56; 68; 92 | 5.82 | 18; 89; 99 | 4.78 | 43; 55; 147 | 6.00 |
| 3; 29; 149 | 5.19 | 23; 88; 97 | 5.06 | 129; 133; 145 | 3.96 | 6; 26; 89 | 5.82 | 15; 24; 39 | 4.78 | 6; 43; 45 | 6.00 |
| 43; 44; 127 | 3.93 | 29; 84; 98 | 5.06 | 130; 141; 149 | 3.96 | 1; 84; 98 | 5.82 | 26; 56; 89 | 4.78 | 1; 43; 53 | 6.00 |
| 43; 68; 106 | 3.93 | 29; 82; 98 | 5.06 | 130; 141; 145 | 3.96 | 8; 37; 97 | 5.82 | 23; 76; 101 | 4.78 | 1; 43; 61 | 6.00 |
| 3; 61; 96 | 3.93 | 24; 98; 117 | 5.06 | 73; 129; 135 | 3.96 | 1; 79; 98 | 5.82 | 26; 49; 111 | 4.78 | 25; 43; 96 | 6.00 |
| 16; 20; 43 | 3.93 | 28; 29; 98 | 5.06 | 88; 129; 145 | 3.96 | 1; 96; 98 | 5.82 | 40; 105; 110 | 4.78 | 1; 25; 43 | 6.00 |
| 2; 43; 61 | 3.93 | 23; 62; 97 | 5.06 | 40; 62; 130 | 3.96 | 1; 83; 96 | 5.82 | 18; 86; 89 | 4.78 | 30; 43; 119 | 6.00 |
| 3; 61; 86 | 3.93 | 29; 85; 98 | 5.06 | 129; 135; 142 | 3.96 | 81; 89; 94 | 5.82 | 18; 34; 89 | 4.78 | 33; 43; 96 | 6.00 |
| 26; 43; 52 | 3.93 | 24; 61; 102 | 5.06 | 37; 129; 149 | 3.96 | 1; 83; 98 | 5.82 | 16; 39; 101 | 4.78 | 6; 35; 43 | 6.00 |
| 3; 61; 84 | 3.93 | 24; 61; 98 | 5.06 | 70; 129; 135 | 3.07 | 1; 56; 96 | 5.82 | 56; 79; 101 | 4.78 | 43; 45; 96 | 6.00 |
| 3; 61; 82 | 3.93 | 23; 84; 119 | 5.06 | 75; 130; 141 | 3.07 | 1; 81; 97 | 5.82 | 26; 49; 101 | 4.78 | 7; 33; 43 | 4.86 |
| 43; 68; 127 | 3.93 | 72; 85; 98 | 5.06 | 72; 112; 135 | 3.07 | 56; 81; 97 | 5.82 | 47; 78; 101 | 4.78 | 43; 70; 91 | 4.86 |
| 3; 29; 119 | 3.93 | 23; 97; 150 | 5.06 | 126; 129; 145 | 3.07 | 14; 28; 89 | 5.82 | 19; 56; 101 | 4.78 | 43; 72; 108 | 4.86 |
| 12; 43; 146 | 3.93 | 18; 84; 88 | 4.07 | 40; 99; 130 | 3.07 | 1; 81; 93 | 4.80 | 19; 24; 39 | 4.78 | 43; 70; 108 | 4.86 |
| 43; 44; 131 | 3.93 | 24; 77; 98 | 4.07 | 40; 101; 130 | 3.07 | 9; 79; 92 | 4.80 | 56; 93; 101 | 4.78 | 43; 72; 91 | 4.86 |
| 41; 42; 43 | 3.93 | 56; 93; 118 | 4.07 | 60; 131; 133 | 3.07 | 4; 26; 97 | 4.80 | 22; 29; 99 | 4.78 | 7; 41; 43 | 4.86 |
| 43; 68; 100 | 3.93 | 29; 68; 98 | 4.07 | 3; 130; 145 | 3.07 | 1; 81; 96 | 4.80 | 22; 39; 102 | 4.78 | 43; 71; 151 | 4.86 |
| 1; 41; 43 | 3.93 | 14; 76; 119 | 4.07 | 75; 130; 145 | 3.07 | 1; 81; 98 | 4.80 | 8; 24; 102 | 4.78 | 43; 69; 91 | 4.86 |
| 23; 41; 43 | 3.93 | 7; 85; 118 | 4.07 | 75; 130; 144 | 3.07 | 4; 26; 81 | 4.80 | 47; 82; 101 | 4.78 | 1; 41; 43 | 4.86 |
| 43; 63; 138 | 3.93 | 73; 98; 135 | 4.07 | 40; 107; 130 | 3.07 | 1; 82; 98 | 4.80 | 15; 18; 100 | 4.78 | 1; 42; 43 | 4.86 |
| 43; 52; 151 | 3.93 | 98; 118; 149 | 4.07 | 89; 131; 142 | 3.07 | 68; 92; 94 | 4.80 | 22; 24; 102 | 4.78 | 1; 43; 54 | 4.86 |
| 36; 43; 146 | 3.93 | 27; 84; 98 | 4.07 | 70; 130; 141 | 3.07 | 4; 89; 97 | 4.80 | 37; 89; 99 | 4.78 | 3; 43; 61 | 4.86 |
| 43; 56; 109 | 3.93 | 24; 76; 98 | 4.07 | 60; 131; 142 | 3.07 | 37; 77; 98 | 4.80 | 19; 26; 83 | 4.78 | 1; 43; 70 | 4.86 |
| 43; 81; 107 | 3.93 | 24; 76; 102 | 4.07 | 19; 40; 130 | 3.07 | 6; 97; 107 | 4.80 | 2; 24; 111 | 4.78 | 1; 43; 68 | 4.86 |
| 3; 70; 84 | 3.93 | 23; 98; 150 | 4.07 | 5; 130; 145 | 3.07 | 1; 83; 93 | 4.80 | 16; 64; 101 | 4.78 | 1; 43; 67 | 4.86 |
| 3; 29; 84 | 3.93 | 26; 73; 97 | 4.07 | 114; 130; 145 | 3.07 | 1; 76; 92 | 4.80 | 56; 86; 89 | 4.78 | 1; 43; 63 | 4.86 |
| 3; 61; 126 | 3.93 | 29; 74; 98 | 4.07 | 40; 96; 130 | 3.07 | 6; 75; 92 | 4.80 | 30; 86; 101 | 4.78 | 1; 43; 62 | 4.86 |
| 3; 61; 119 | 3.93 | 24; 102; 129 | 4.07 | 68; 81; 129 | 3.07 | 56; 79; 94 | 4.80 | 14; 26; 89 | 4.78 | 7; 30; 43 | 4.86 |
| 7; 43; 106 | 3.93 | 29; 93; 118 | 4.07 | 38; 129; 149 | 3.07 | 4; 94; 95 | 4.80 | 16; 41; 101 | 4.78 | 1; 43; 45 | 4.86 |
| 44; 84; 107 | 3.93 | 23; 85; 102 | 4.07 | 14; 129; 145 | 3.07 | 56; 92; 94 | 4.80 | 22; 89; 99 | 4.78 | 20; 42; 44 | 4.86 |
| 43; 73; 106 | 3.93 | 23; 102; 150 | 4.07 | 38; 129; 145 | 3.07 | 85; 94; 98 | 4.80 | 56; 86; 101 | 4.78 | 7; 25; 43 | 4.86 |
| 18; 43; 52 | 3.93 | 67; 102; 150 | 4.07 | 25; 114; 129 | 3.07 | 92; 94; 98 | 4.80 | 13; 28; 101 | 3.97 | 43; 73; 91 | 4.86 |
| 20; 43; 52 | 3.93 | 98; 119; 135 | 4.07 | 114; 130; 150 | 3.07 | 56; 81; 92 | 4.80 | 2; 26; 40 | 3.97 | 3; 43; 45 | 4.86 |
| 43; 72; 106 | 3.93 | 40; 97; 118 | 4.07 | 114; 130; 151 | 3.07 | 56; 81; 94 | 4.80 | 17; 100; 101 | 3.97 | 30; 38; 43 | 4.86 |
| 44; 51; 107 | 3.93 | 54; 102; 133 | 4.07 | 40; 68; 130 | 3.07 | 1; 78; 79 | 4.80 | 15; 30; 101 | 3.97 | 43; 54; 61 | 4.86 |
| 41; 43; 135 | 3.93 | 54; 102; 132 | 4.07 | 82; 130; 144 | 3.07 | 1; 78; 81 | 4.80 | 24; 34; 89 | 3.97 | 43; 73; 108 | 4.86 |
| 41; 43; 142 | 3.93 | 85; 88; 98 | 4.07 | 70; 130; 145 | 3.07 | 1; 78; 83 | 4.80 | 23; 68; 101 | 3.97 | 30; 43; 75 | 4.86 |
| 3; 61; 79 | 3.93 | 29; 79; 97 | 4.07 | 18; 67; 130 | 3.07 | 79; 94; 98 | 4.80 | 8; 16; 98 | 3.97 | 30; 43; 79 | 4.86 |
| 41; 43; 145 | 3.93 | 24; 80; 98 | 4.07 | 70; 130; 144 | 3.07 | 1; 78; 98 | 4.80 | 39; 89; 102 | 3.97 | 7; 43; 108 | 4.86 |
| 43; 83; 106 | 3.93 | 37; 98; 118 | 4.07 | 7; 131; 149 | 3.07 | 68; 88; 94 | 4.80 | 22; 34; 89 | 3.97 | 30; 43; 82 | 4.86 |
| 41; 43; 146 | 3.93 | 29; 44; 98 | 4.07 | 130; 145; 149 | 3.07 | 1; 56; 92 | 4.80 | 29; 56; 101 | 3.97 | 30; 43; 83 | 4.86 |
| 41; 43; 147 | 3.93 | 23; 88; 119 | 4.07 | 56; 70; 114 | 3.07 | 1; 17; 92 | 4.80 | 15; 99; 100 | 3.97 | 30; 43; 84 | 4.86 |
| 41; 43; 148 | 3.93 | 27; 85; 98 | 4.07 | 89; 131; 145 | 3.07 | 70; 94; 98 | 4.80 | 20; 22; 99 | 3.97 | 20; 43; 91 | 4.86 |
| 43; 52; 135 | 3.93 | 67; 88; 102 | 4.07 | 25; 40; 130 | 3.07 | 27; 97; 142 | 4.80 | 8; 16; 101 | 3.97 | 30; 43; 85 | 4.86 |
| 43; 52; 134 | 3.93 | 85; 86; 118 | 4.07 | 11; 129; 135 | 3.07 | 54; 81; 94 | 4.80 | 72; 86; 89 | 3.97 | 30; 43; 86 | 4.86 |
| 41; 43; 132 | 3.93 | 74; 85; 98 | 4.07 | 130; 145; 150 | 3.07 | 1; 7; 92 | 4.80 | 26; 39; 81 | 3.97 | 30; 43; 89 | 4.86 |
| 41; 43; 131 | 3.93 | 23; 88; 102 | 4.07 | 89; 131; 135 | 3.07 | 81; 94; 98 | 4.80 | 8; 18; 101 | 3.97 | 30; 43; 90 | 4.86 |
| 41; 43; 129 | 3.93 | 26; 93; 98 | 4.07 | 130; 145; 146 | 3.07 | 56; 84; 94 | 4.80 | 22; 30; 101 | 3.97 | 20; 43; 108 | 4.86 |
| 9; 43; 100 | 3.93 | 26; 93; 97 | 4.07 | 37; 129; 145 | 3.07 | 1; 77; 98 | 4.80 | 6; 22; 99 | 3.97 | 20; 43; 133 | 4.86 |
| 43; 52; 132 | 3.93 | 9; 24; 98 | 4.07 | 96; 129; 135 | 3.07 | 6; 13; 126 | 4.80 | 23; 72; 101 | 3.97 | 20; 43; 151 | 4.86 |
| 43; 83; 127 | 3.93 | 29; 37; 118 | 4.07 | 62; 112; 135 | 3.07 | 6; 28; 94 | 4.80 | 28; 47; 101 | 3.97 | 43; 74; 108 | 4.86 |
| 41; 43; 126 | 3.93 | 29; 70; 98 | 4.07 | 130; 144; 148 | 3.07 | 28; 94; 98 | 4.80 | 2; 40; 99 | 3.97 | 30; 43; 120 | 4.86 |
| 32; 43; 132 | 3.93 | 23; 97; 107 | 4.07 | 37; 130; 145 | 3.07 | 2; 105; 128 | 4.80 | 26; 47; 79 | 3.97 | 30; 43; 78 | 4.86 |
| 43; 52; 131 | 3.93 | 37; 85; 118 | 4.07 | 64; 114; 129 | 3.07 | 8; 84; 92 | 4.80 | 22; 26; 102 | 3.97 | 30; 43; 73 | 4.86 |
| 37; 43; 52 | 3.93 | 23; 97; 118 | 4.07 | 96; 129; 133 | 3.07 | 68; 79; 94 | 4.80 | 22; 75; 99 | 3.97 | 20; 43; 45 | 4.86 |
| 41; 43; 149 | 3.93 | 27; 64; 98 | 4.07 | 75; 129; 149 | 3.07 | 68; 79; 92 | 4.80 | 15; 98; 99 | 3.97 | 30; 43; 72 | 4.86 |
| 41; 43; 150 | 3.93 | 54; 74; 102 | 4.07 | 87; 114; 130 | 3.07 | 1; 96; 148 | 4.80 | 21; 22; 101 | 3.97 | 1; 8; 43 | 4.86 |
| 3; 29; 150 | 3.93 | 24; 29; 98 | 4.07 | 79; 130; 144 | 3.07 | 1; 38; 98 | 4.80 | 24; 51; 105 | 3.97 | 1; 43; 75 | 4.86 |
| 3; 70; 86 | 3.93 | 25; 99; 102 | 4.07 | 62; 108; 130 | 3.07 | 79; 89; 94 | 4.80 | 23; 74; 89 | 3.97 | 7; 43; 45 | 4.86 |
| 3; 61; 78 | 3.93 | 27; 73; 98 | 4.07 | 84; 129; 143 | 3.07 | 1; 98; 138 | 4.80 | 22; 38; 99 | 3.97 | 20; 43; 53 | 4.86 |
| 33; 43; 109 | 3.93 | 24; 29; 102 | 4.07 | 7; 130; 144 | 3.07 | 1; 98; 147 | 4.80 | 98; 99; 110 | 3.97 | 20; 43; 54 | 4.86 |
| 15; 43; 81 | 3.93 | 24; 56; 98 | 4.07 | 60; 130; 135 | 3.07 | 1; 98; 148 | 4.80 | 33; 39; 102 | 3.97 | 7; 43; 54 | 4.86 |
| 43; 52; 148 | 3.93 | 23; 97; 119 | 4.07 | 129; 131; 135 | 3.07 | 8; 85; 92 | 4.80 | 22; 73; 99 | 3.97 | 43; 74; 91 | 4.86 |
| 27; 43; 142 | 3.93 | 28; 56; 98 | 4.07 | 19; 130; 131 | 3.07 | 15; 82; 89 | 4.80 | 22; 73; 98 | 3.97 | 43; 74; 96 | 4.86 |
| 43; 44; 110 | 3.93 | 23; 98; 118 | 4.07 | 78; 130; 144 | 3.07 | 1; 93; 98 | 4.80 | 4; 24; 102 | 3.97 | 33; 43; 150 | 4.86 |
| 43; 44; 109 | 3.93 | 28; 98; 102 | 4.07 | 56; 114; 135 | 3.07 | 56; 89; 94 | 4.80 | 33; 86; 89 | 3.97 | 30; 43; 62 | 4.86 |
| 43; 52; 146 | 3.93 | 23; 98; 126 | 4.07 | 60; 67; 130 | 3.07 | 1; 93; 96 | 4.80 | 14; 84; 89 | 3.97 | 30; 43; 63 | 4.86 |
| 43; 44; 106 | 3.93 | 29; 97; 126 | 4.07 | 20; 114; 130 | 3.07 | 4; 81; 92 | 4.80 | 13; 24; 94 | 3.97 | 30; 43; 66 | 4.86 |
| 3; 29; 147 | 3.93 | 23; 98; 134 | 4.07 | 89; 131; 149 | 3.07 | 4; 92; 94 | 4.80 | 56; 78; 101 | 3.97 | 7; 43; 91 | 4.86 |
| 33; 43; 52 | 3.93 | 24; 107; 119 | 4.07 | 96; 112; 135 | 3.07 | 73; 86; 89 | 4.80 | 2; 40; 110 | 3.97 | 30; 43; 71 | 4.86 |
| 3; 41; 43 | 3.93 | 29; 75; 98 | 4.07 | 48; 130; 144 | 3.07 | 1; 89; 98 | 4.80 | 22; 26; 99 | 3.97 | 7; 43; 96 | 4.86 |
| 43; 52; 142 | 3.93 | 26; 76; 97 | 4.07 | 73; 130; 145 | 3.07 | 1; 98; 149 | 4.80 | 8; 22; 102 | 3.97 | 1; 43; 74 | 4.86 |
| 3; 61; 70 | 3.93 | 23; 98; 102 | 4.07 | 97; 131; 135 | 3.07 | 79; 83; 94 | 4.80 | 16; 26; 39 | 3.97 | 1; 43; 76 | 4.86 |
| 43; 52; 140 | 3.93 | 29; 97; 108 | 4.07 | 21; 114; 130 | 3.07 | 1; 75; 98 | 4.80 | 15; 87; 99 | 3.97 | 43; 45; 147 | 4.86 |
| 3; 61; 68 | 3.93 | 23; 97; 126 | 4.07 | 6; 130; 145 | 3.07 | 12; 54; 100 | 4.80 | 15; 26; 78 | 3.97 | 43; 63; 117 | 4.86 |
| 1; 61; 132 | 3.93 | 23; 97; 129 | 4.07 | 68; 89; 129 | 3.07 | 1; 68; 97 | 4.80 | 39; 71; 98 | 3.97 | 43; 63; 118 | 4.86 |
| 43; 96; 106 | 3.93 | 23; 25; 102 | 4.07 | 40; 72; 130 | 3.07 | 1; 68; 96 | 4.80 | 8; 22; 99 | 3.97 | 6; 43; 61 | 4.86 |
| 44; 76; 107 | 3.93 | 27; 56; 98 | 4.07 | 73; 129; 149 | 3.07 | 6; 15; 98 | 4.80 | 22; 79; 99 | 3.97 | 6; 43; 62 | 4.86 |
| 43; 78; 106 | 3.93 | 23; 97; 147 | 4.07 | 40; 81; 130 | 3.07 | 6; 16; 56 | 3.86 | 22; 89; 101 | 3.97 | 6; 43; 70 | 4.86 |
| 43; 94; 138 | 3.93 | 23; 97; 149 | 4.07 | 135; 143; 149 | 3.07 | 15; 82; 92 | 3.86 | 56; 73; 89 | 3.97 | 6; 43; 72 | 4.86 |
| 43; 75; 109 | 3.93 | 23; 93; 118 | 4.07 | 110; 132; 148 | 3.07 | 6; 13; 79 | 3.86 | 2; 18; 111 | 3.97 | 6; 43; 73 | 4.86 |
| 36; 41; 43 | 3.93 | 24; 54; 98 | 4.07 | 8; 129; 135 | 3.07 | 4; 13; 90 | 3.86 | 18; 24; 26 | 3.97 | 6; 43; 74 | 4.86 |
| 16; 37; 43 | 3.93 | 26; 84; 97 | 4.07 | 72; 129; 149 | 3.07 | 1; 13; 81 | 3.86 | 16; 26; 56 | 3.97 | 6; 43; 82 | 4.86 |
| 39; 43; 107 | 3.93 | 29; 76; 119 | 4.07 | 107; 130; 145 | 3.07 | 4; 12; 92 | 3.86 | 7; 30; 98 | 3.97 | 6; 43; 83 | 4.86 |
| 43; 134; 146 | 3.93 | 76; 102; 142 | 4.07 | 96; 114; 135 | 3.07 | 6; 15; 81 | 3.86 | 15; 39; 99 | 3.97 | 6; 43; 84 | 4.86 |
| 29; 39; 43 | 3.93 | 29; 76; 102 | 4.07 | 114; 130; 141 | 3.07 | 1; 15; 37 | 3.86 | 55; 74; 89 | 3.97 | 1; 5; 43 | 4.86 |
| 34; 43; 60 | 3.93 | 26; 83; 97 | 4.07 | 40; 73; 130 | 3.07 | 6; 12; 100 | 3.86 | 22; 89; 102 | 3.97 | 43; 45; 150 | 4.86 |
| 39; 43; 147 | 3.93 | 24; 69; 98 | 4.07 | 109; 130; 143 | 3.07 | 6; 16; 72 | 3.86 | 16; 89; 101 | 3.97 | 1; 43; 83 | 4.86 |
| 43; 46; 124 | 3.93 | 29; 76; 98 | 4.07 | 54; 86; 114 | 3.07 | 6; 16; 70 | 3.86 | 16; 18; 101 | 3.97 | 43; 61; 111 | 4.86 |
| 43; 103; 120 | 3.93 | 26; 85; 97 | 4.07 | 4; 75; 130 | 3.07 | 6; 13; 15 | 3.86 | 22; 74; 99 | 3.97 | 43; 61; 118 | 4.86 |
| 43; 55; 101 | 3.93 | 24; 102; 150 | 4.07 | 3; 8; 130 | 3.07 | 4; 13; 78 | 3.86 | 15; 18; 99 | 3.97 | 43; 61; 133 | 4.86 |
| 30; 41; 43 | 3.93 | 33; 54; 102 | 4.07 | 25; 130; 141 | 3.07 | 4; 13; 81 | 3.86 | 39; 63; 102 | 3.97 | 6; 37; 43 | 4.86 |
| 43; 46; 140 | 3.93 | 37; 84; 118 | 4.07 | 54; 85; 114 | 3.07 | 8; 20; 97 | 3.86 | 17; 26; 63 | 3.97 | 6; 41; 43 | 4.86 |
| 43; 46; 141 | 3.93 | 25; 67; 102 | 4.07 | 69; 112; 135 | 3.07 | 6; 15; 97 | 3.86 | 8; 22; 120 | 3.97 | 43; 62; 91 | 4.86 |
| 39; 43; 149 | 3.93 | 23; 93; 97 | 4.07 | 109; 114; 130 | 3.07 | 79; 92; 98 | 3.86 | 14; 89; 93 | 3.97 | 43; 62; 108 | 4.86 |
| 43; 133; 146 | 3.93 | 64; 94; 118 | 4.07 | 33; 130; 145 | 3.07 | 17; 81; 89 | 3.86 | 18; 24; 102 | 3.97 | 3; 43; 150 | 4.86 |
| 43; 65; 103 | 3.93 | 25; 98; 126 | 4.07 | 40; 69; 130 | 3.07 | 6; 14; 97 | 3.86 | 22; 33; 99 | 3.97 | 43; 63; 96 | 4.86 |

| Lymphatic | | | | MUC13_DMBT1 | | | | | | | |
|---|---|---|---|---|---|---|---|---|---|---|---|
| endothelial cells | | Lymphoid cells | | positive cells | | Megakaryocytes | | Mesangial cells | | Mesothelial cells | |
| Clusters | Score | Clusters | Score | Clusters | Score | Clusters | Score | Clusters | Score | Clusters | Score |
| 100; 106; 130 | 5.73 | 40; 41; 108 | 5.34 | 31; 82; 125 | 5.06 | 36; 57; 130 | 3.76 | 51; 88; 112 | 11.14 | 22; 121; 149 | 3.93 |
| 108; 120; 149 | 5.73 | 10; 40; 145 | 5.34 | 43; 63; 96 | 5.06 | 8; 64; 100 | 3.76 | 27; 111; 122 | 11.14 | 40; 105; 141 | 3.93 |
| 44; 121; 129 | 5.73 | 41; 91; 135 | 5.34 | 31; 72; 125 | 5.06 | 56; 86; 149 | 3.76 | 51; 111; 120 | 11.14 | 29; 89; 138 | 2.81 |
| 72; 77; 120 | 5.73 | 6; 91; 135 | 5.34 | 41; 43; 63 | 5.06 | 46; 48; 64 | 3.76 | 34; 95; 111 | 11.14 | 39; 70; 103 | 2.81 |
| 100; 106; 149 | 5.73 | 17; 40; 107 | 4.31 | 31; 83; 125 | 5.06 | 36; 56; 130 | 3.76 | 34; 51; 111 | 9.88 | 40; 41; 105 | 2.81 |
| 26; 129; 149 | 5.73 | 3; 34; 40 | 4.31 | 7; 43; 125 | 4.07 | 36; 49; 130 | 3.76 | 44; 111; 120 | 9.88 | 40; 88; 121 | 2.81 |
| 72; 108; 149 | 5.73 | 40; 71; 133 | 4.31 | 43; 64; 125 | 4.07 | 8; 57; 100 | 3.76 | 51; 112; 120 | 9.88 | 5; 105; 115 | 2.81 |
| 100; 130; 145 | 5.73 | 6; 55; 135 | 4.31 | 17; 43; 83 | 4.07 | 48; 64; 100 | 3.76 | 51; 71; 112 | 9.88 | 45; 78; 143 | 2.81 |
| 100; 130; 140 | 5.73 | 17; 40; 41 | 4.31 | 43; 44; 125 | 4.07 | 48; 55; 100 | 3.76 | 94; 111; 122 | 9.88 | 39; 68; 103 | 2.81 |
| 9; 77; 129 | 5.73 | 40; 70; 133 | 4.31 | 63; 125; 150 | 4.07 | 48; 57; 119 | 2.68 | 51; 82; 111 | 9.88 | 62; 96; 102 | 2.81 |
| 44; 120; 129 | 5.73 | 40; 41; 129 | 4.31 | 43; 73; 81 | 4.07 | 1; 48; 64 | 2.68 | 55; 111; 122 | 9.88 | 67; 105; 115 | 2.81 |
| 120; 129; 133 | 5.73 | 6; 45; 135 | 4.31 | 17; 43; 82 | 4.07 | 48; 57; 130 | 2.68 | 54; 111; 122 | 9.88 | 40; 86; 121 | 2.81 |
| 77; 120; 126 | 5.73 | 17; 40; 142 | 4.31 | 17; 43; 81 | 4.07 | 51; 75; 147 | 2.68 | 35; 111; 122 | 9.88 | 40; 85; 121 | 2.81 |
| 44; 100; 121 | 4.35 | 40; 70; 91 | 4.31 | 38; 84; 125 | 4.07 | 5; 51; 64 | 2.68 | 19; 111; 122 | 9.88 | 5; 40; 121 | 2.81 |
| 100; 129; 151 | 4.35 | 41; 94; 135 | 4.31 | 37; 44; 125 | 4.07 | 29; 62; 100 | 2.68 | 29; 34; 111 | 9.88 | 97; 143; 150 | 2.81 |
| 71; 100; 129 | 4.35 | 41; 98; 135 | 4.31 | 43; 77; 125 | 4.07 | 48; 57; 138 | 2.68 | 33; 111; 122 | 9.88 | 40; 84; 121 | 2.81 |
| 46; 120; 138 | 4.35 | 6; 69; 135 | 4.31 | 31; 70; 125 | 4.07 | 51; 75; 150 | 2.68 | 34; 56; 111 | 9.88 | 39; 64; 115 | 2.81 |
| 55; 108; 120 | 4.35 | 41; 107; 132 | 4.31 | 31; 44; 125 | 4.07 | 5; 48; 71 | 2.68 | 25; 111; 122 | 9.88 | 40; 83; 121 | 2.81 |
| 71; 100; 130 | 4.35 | 40; 69; 133 | 4.31 | 5; 41; 43 | 4.07 | 51; 75; 86 | 2.68 | 16; 112; 122 | 9.88 | 41; 104; 142 | 2.81 |
| 102; 145; 146 | 4.35 | 39; 69; 133 | 4.31 | 31; 81; 125 | 4.07 | 10; 55; 100 | 2.68 | 67; 111; 122 | 9.88 | 22; 39; 115 | 2.81 |
| 100; 145; 146 | 4.35 | 37; 40; 133 | 4.31 | 43; 125; 135 | 4.07 | 48; 57; 149 | 2.68 | 56; 111; 120 | 9.88 | 41; 105; 141 | 2.81 |
| 23; 124; 129 | 4.35 | 40; 75; 133 | 4.31 | 43; 72; 83 | 4.07 | 13; 28; 36 | 2.68 | 57; 111; 122 | 9.88 | 41; 105; 145 | 2.81 |
| 100; 106; 120 | 4.35 | 40; 79; 133 | 4.31 | 43; 72; 81 | 4.07 | 48; 57; 148 | 2.68 | 29; 111; 122 | 9.88 | 12; 40; 121 | 2.81 |
| 55; 77; 121 | 4.35 | 9; 40; 148 | 4.31 | 43; 79; 125 | 4.07 | 48; 57; 147 | 2.68 | 51; 93; 112 | 9.88 | 40; 100; 141 | 2.81 |
| 23; 120; 133 | 4.35 | 40; 79; 91 | 4.31 | 63; 82; 125 | 4.07 | 46; 94; 130 | 2.68 | 61; 111; 122 | 9.88 | 10; 40; 121 | 2.81 |
| 61; 100; 130 | 4.35 | 6; 37; 135 | 4.31 | 38; 43; 125 | 4.07 | 50; 130; 138 | 2.68 | 62; 111; 120 | 9.88 | 55; 103; 119 | 2.81 |
| 1; 77; 121 | 4.35 | 40; 78; 91 | 4.31 | 43; 72; 125 | 4.07 | 18; 47; 138 | 2.68 | 46; 74; 111 | 8.68 | 5; 116; 123 | 2.81 |
| 100; 108; 121 | 4.35 | 39; 40; 125 | 4.31 | 43; 64; 96 | 4.07 | 60; 65; 123 | 2.68 | 28; 112; 127 | 8.68 | 22; 113; 149 | 2.81 |
| 23; 108; 120 | 4.35 | 40; 76; 125 | 4.31 | 7; 43; 96 | 4.07 | 38; 52; 65 | 2.68 | 21; 42; 112 | 8.68 | 22; 113; 146 | 2.81 |
| 102; 145; 151 | 4.35 | 6; 39; 133 | 4.31 | 31; 55; 125 | 4.07 | 36; 56; 138 | 2.68 | 69; 111; 122 | 8.68 | 22; 113; 145 | 2.81 |
| 77; 120; 124 | 4.35 | 39; 68; 133 | 4.31 | 41; 43; 71 | 4.07 | 60; 64; 136 | 2.68 | 102; 111; 122 | 8.68 | 39; 73; 103 | 2.81 |
| 7; 77; 120 | 4.35 | 6; 40; 41 | 4.31 | 44; 125; 150 | 4.07 | 48; 57; 100 | 2.68 | 23; 56; 112 | 8.68 | 6; 78; 147 | 2.81 |
| 23; 120; 126 | 4.35 | 40; 74; 133 | 4.31 | 29; 83; 125 | 4.07 | 50; 130; 147 | 2.68 | 23; 86; 112 | 8.68 | 64; 103; 119 | 2.81 |
| 44; 108; 120 | 4.35 | 6; 40; 133 | 4.31 | 84; 125; 150 | 4.07 | 38; 51; 147 | 2.68 | 26; 111; 122 | 8.68 | 40; 93; 121 | 2.81 |
| 72; 100; 121 | 4.35 | 6; 40; 145 | 4.31 | 41; 43; 68 | 4.07 | 38; 51; 150 | 2.68 | 44; 71; 111 | 8.68 | 67; 116; 123 | 2.81 |
| 23; 72; 120 | 4.35 | 40; 73; 133 | 4.31 | 38; 44; 125 | 4.07 | 50; 130; 148 | 2.68 | 51; 75; 111 | 8.68 | 64; 105; 141 | 2.81 |
| 100; 120; 128 | 4.35 | 40; 73; 91 | 4.31 | 41; 43; 79 | 4.07 | 57; 71; 136 | 2.68 | 34; 85; 111 | 8.68 | 61; 92; 143 | 2.81 |
| 45; 102; 145 | 4.35 | 6; 75; 135 | 4.31 | 31; 63; 125 | 4.07 | 48; 62; 100 | 2.68 | 51; 79; 112 | 8.68 | 40; 101; 141 | 2.81 |
| 121; 129; 151 | 4.35 | 20; 40; 125 | 4.31 | 41; 43; 94 | 4.07 | 33; 61; 86 | 2.68 | 71; 111; 126 | 8.68 | 40; 71; 138 | 2.81 |
| 100; 145; 149 | 4.35 | 39; 73; 133 | 4.31 | 41; 43; 92 | 4.07 | 48; 62; 86 | 2.68 | 38; 51; 112 | 8.68 | 40; 71; 117 | 2.81 |
| 81; 100; 121 | 4.35 | 8; 133; 135 | 4.31 | 41; 43; 98 | 4.07 | 48; 62; 85 | 2.68 | 71; 111; 122 | 8.68 | 40; 71; 114 | 2.81 |
| 23; 129; 146 | 4.35 | 39; 74; 133 | 4.31 | 43; 87; 151 | 4.07 | 48; 62; 84 | 2.68 | 38; 51; 111 | 8.68 | 19; 105; 115 | 2.81 |
| 100; 145; 150 | 4.35 | 39; 76; 133 | 4.31 | 43; 50; 62 | 4.07 | 48; 62; 83 | 2.68 | 21; 71; 112 | 8.68 | 59; 101; 117 | 2.81 |
| 100; 129; 142 | 4.35 | 40; 57; 125 | 4.31 | 7; 41; 43 | 4.07 | 48; 62; 82 | 2.68 | 6; 111; 122 | 8.68 | 45; 105; 115 | 2.81 |
| 106; 122; 130 | 4.35 | 39; 84; 133 | 4.31 | 63; 84; 133 | 4.07 | 46; 79; 130 | 2.68 | 6; 111; 127 | 8.68 | 8; 95; 125 | 2.81 |
| 44; 100; 129 | 4.35 | 44; 45; 133 | 4.31 | 43; 66; 125 | 4.07 | 48; 62; 79 | 2.68 | 47; 65; 111 | 8.68 | 59; 102; 114 | 2.81 |
| 77; 120; 129 | 4.35 | 54; 68; 135 | 4.31 | 41; 43; 84 | 4.07 | 48; 62; 75 | 2.68 | 34; 84; 111 | 8.68 | 117; 120; 142 | 2.81 |
| 61; 100; 118 | 4.35 | 40; 55; 125 | 4.31 | 26; 41; 43 | 4.07 | 48; 62; 73 | 2.68 | 16; 29; 112 | 8.68 | 40; 70; 121 | 2.81 |
| 92; 100; 129 | 4.35 | 40; 55; 108 | 4.31 | 31; 84; 125 | 4.07 | 9; 86; 150 | 2.68 | 38; 111; 122 | 8.68 | 76; 105; 141 | 2.81 |
| 20; 120; 129 | 4.35 | 44; 129; 133 | 4.31 | 43; 73; 125 | 4.07 | 46; 80; 130 | 2.68 | 51; 102; 111 | 8.68 | 71; 88; 146 | 2.81 |
| 106; 130; 145 | 4.35 | 3; 133; 135 | 4.31 | 43; 55; 81 | 4.07 | 48; 62; 71 | 2.68 | 21; 44; 112 | 8.68 | 56; 105; 115 | 2.81 |
| 106; 130; 146 | 4.35 | 40; 54; 125 | 4.31 | 37; 43; 71 | 4.07 | 46; 77; 130 | 2.68 | 55; 95; 111 | 8.68 | 9; 40; 121 | 2.81 |
| 122; 130; 145 | 4.35 | 45; 129; 133 | 4.31 | 38; 82; 125 | 4.07 | 46; 81; 130 | 2.68 | 85; 111; 122 | 8.68 | 9; 105; 115 | 2.81 |
| 23; 120; 147 | 4.35 | 45; 129; 135 | 4.31 | 43; 93; 125 | 4.07 | 48; 62; 120 | 2.68 | 5; 112; 127 | 8.68 | 5; 39; 103 | 2.81 |
| 100; 129; 145 | 4.35 | 68; 91; 135 | 4.31 | 37; 43; 62 | 4.07 | 5; 56; 75 | 2.68 | 78; 111; 122 | 8.68 | 40; 81; 105 | 2.81 |
| 122; 130; 141 | 4.35 | 3; 41; 135 | 4.31 | 37; 43; 64 | 4.07 | 9; 55; 75 | 2.68 | 51; 77; 112 | 8.68 | 40; 43; 145 | 2.81 |
| 34; 118; 130 | 4.35 | 40; 63; 91 | 4.31 | 44; 73; 125 | 4.07 | 13; 19; 64 | 2.68 | 96; 111; 122 | 8.68 | 40; 79; 121 | 2.81 |
| 44; 72; 120 | 4.35 | 25; 40; 41 | 4.31 | 31; 64; 125 | 4.07 | 9; 55; 73 | 2.68 | 44; 51; 112 | 8.68 | 22; 40; 121 | 2.81 |
| 23; 120; 148 | 4.35 | 40; 63; 133 | 4.31 | 41; 43; 45 | 4.07 | 49; 120; 147 | 2.68 | 28; 112; 120 | 8.68 | 39; 62; 115 | 2.81 |
| 66; 120; 129 | 4.35 | 41; 126; 135 | 4.31 | 43; 81; 143 | 4.07 | 48; 62; 145 | 2.68 | 29; 30; 112 | 8.68 | 41; 119; 143 | 2.81 |
| 23; 129; 141 | 4.35 | 54; 135; 147 | 4.31 | 31; 79; 125 | 4.07 | 8; 23; 64 | 2.68 | 34; 83; 111 | 8.68 | 40; 45; 121 | 2.81 |
| 5; 102; 145 | 4.35 | 41; 129; 135 | 4.31 | 43; 62; 138 | 4.07 | 19; 60; 130 | 2.68 | 85; 111; 128 | 8.68 | 22; 41; 121 | 2.81 |
| 118; 129; 145 | 4.35 | 6; 79; 135 | 4.31 | 10; 41; 43 | 4.07 | 37; 48; 147 | 2.68 | 9; 111; 120 | 8.68 | 39; 59; 138 | 2.81 |
| 85; 108; 120 | 4.35 | 40; 68; 151 | 4.31 | 63; 64; 125 | 4.07 | 48; 62; 126 | 2.68 | 111; 116; 122 | 8.68 | 5; 92; 143 | 2.81 |
| 44; 120; 149 | 4.35 | 6; 83; 135 | 4.31 | 43; 63; 118 | 4.07 | 33; 38; 65 | 2.68 | 20; 111; 122 | 8.68 | 82; 105; 115 | 2.81 |
| 17; 80; 121 | 4.35 | 6; 84; 135 | 4.31 | 6; 43; 125 | 4.07 | 46; 82; 130 | 2.68 | 97; 111; 122 | 8.68 | 41; 143; 147 | 2.81 |
| 35; 80; 120 | 4.35 | 40; 68; 133 | 4.31 | 43; 62; 66 | 4.07 | 36; 55; 130 | 2.68 | 29; 88; 112 | 8.68 | 13; 103; 141 | 2.81 |
| 124; 130; 140 | 4.35 | 6; 88; 135 | 4.31 | 10; 43; 77 | 4.07 | 38; 51; 71 | 2.68 | 51; 98; 112 | 8.68 | 88; 121; 146 | 2.81 |
| 44; 108; 149 | 4.35 | 40; 68; 108 | 4.31 | 43; 63; 125 | 4.07 | 46; 85; 130 | 2.68 | 19; 112; 122 | 8.68 | 40; 120; 138 | 2.81 |
| 44; 72; 149 | 4.35 | 70; 91; 135 | 4.31 | 10; 43; 78 | 4.07 | 38; 51; 73 | 2.68 | 51; 96; 111 | 8.68 | 40; 119; 121 | 2.81 |
| 44; 120; 147 | 4.35 | 6; 90; 135 | 4.31 | 10; 43; 81 | 4.07 | 38; 51; 75 | 2.68 | 52; 112; 120 | 8.68 | 105; 115; 147 | 2.81 |
| 55; 77; 129 | 4.35 | 31; 40; 96 | 4.31 | 43; 62; 64 | 4.07 | 46; 86; 130 | 2.68 | 47; 95; 111 | 8.68 | 39; 92; 103 | 2.81 |
| 107; 108; 120 | 4.35 | 40; 67; 125 | 4.31 | 43; 62; 70 | 4.07 | 38; 51; 82 | 2.68 | 23; 62; 112 | 8.68 | 6; 92; 143 | 2.81 |
| 100; 120; 150 | 4.35 | 20; 41; 135 | 4.31 | 43; 62; 132 | 4.07 | 38; 51; 83 | 2.68 | 111; 118; 122 | 8.68 | 39; 103; 119 | 2.81 |
| 100; 120; 141 | 4.35 | 4; 40; 107 | 4.31 | 38; 43; 64 | 4.07 | 36; 54; 130 | 2.68 | 34; 65; 111 | 8.68 | 40; 117; 121 | 2.81 |
| 108; 120; 129 | 4.35 | 3; 40; 83 | 4.31 | 43; 62; 73 | 4.07 | 25; 91; 130 | 2.68 | 44; 88; 112 | 8.68 | 40; 117; 120 | 2.81 |
| 100; 130; 142 | 4.35 | 40; 79; 145 | 4.31 | 43; 62; 63 | 4.07 | 60; 62; 136 | 2.68 | 34; 64; 111 | 8.68 | 54; 83; 138 | 2.81 |
| 100; 130; 141 | 4.35 | 41; 60; 91 | 4.31 | 63; 83; 125 | 4.07 | 38; 51; 70 | 2.68 | 35; 65; 112 | 8.68 | 40; 116; 138 | 2.81 |
| 26; 118; 130 | 4.35 | 40; 91; 119 | 4.31 | 44; 84; 133 | 4.07 | 46; 84; 130 | 2.68 | 112; 122; 129 | 8.68 | 40; 116; 121 | 2.81 |
| 108; 120; 133 | 4.35 | 40; 91; 146 | 4.31 | 43; 63; 78 | 4.07 | 5; 55; 56 | 2.68 | 52; 111; 122 | 8.68 | 40; 114; 142 | 2.81 |
| 118; 130; 140 | 4.35 | 10; 40; 129 | 4.31 | 43; 63; 81 | 4.07 | 36; 53; 130 | 2.68 | 34; 68; 111 | 8.68 | 95; 114; 143 | 2.81 |
| 108; 120; 151 | 4.35 | 40; 91; 141 | 4.31 | 43; 81; 125 | 4.07 | 39; 46; 130 | 2.68 | 51; 84; 112 | 8.68 | 63; 105; 115 | 2.81 |
| 72; 108; 120 | 4.35 | 40; 126; 145 | 4.31 | 43; 62; 150 | 4.07 | 46; 83; 130 | 2.68 | 51; 95; 111 | 8.68 | 105; 141; 142 | 2.81 |
| 77; 79; 121 | 4.35 | 10; 40; 119 | 4.31 | 43; 82; 125 | 4.07 | 27; 60; 120 | 2.68 | 28; 71; 111 | 8.68 | 63; 105; 141 | 2.81 |
| 46; 126; 149 | 4.35 | 40; 91; 133 | 4.31 | 38; 43; 71 | 4.07 | 36; 56; 149 | 2.68 | 22; 112; 120 | 8.68 | 29; 40; 121 | 2.81 |
| 46; 124; 146 | 4.35 | 10; 40; 107 | 4.31 | 31; 77; 125 | 4.07 | 44; 47; 65 | 2.68 | 112; 122; 135 | 8.68 | 40; 121; 150 | 2.81 |
| 26; 118; 129 | 4.35 | 40; 91; 120 | 4.31 | 43; 49; 64 | 4.07 | 34; 46; 130 | 2.68 | 111; 127; 135 | 8.68 | 40; 121; 148 | 2.81 |
| 46; 92; 149 | 4.35 | 40; 129; 133 | 4.31 | 43; 62; 83 | 4.07 | 13; 37; 149 | 2.68 | 95; 111; 151 | 8.68 | 40; 121; 145 | 2.81 |
| 26; 118; 149 | 4.35 | 40; 81; 91 | 4.31 | 43; 70; 125 | 4.07 | 13; 37; 150 | 2.68 | 111; 119; 122 | 8.68 | 40; 121; 142 | 2.81 |
| 91; 129; 149 | 4.35 | 40; 91; 109 | 4.31 | 44; 83; 125 | 4.07 | 9; 47; 150 | 2.68 | 10; 108; 112 | 8.68 | 40; 121; 141 | 2.81 |
| 80; 100; 118 | 4.35 | 40; 132; 133 | 4.31 | 43; 64; 73 | 4.07 | 9; 47; 149 | 2.68 | 23; 93; 112 | 8.68 | 40; 121; 138 | 2.81 |
| 23; 101; 120 | 4.35 | 10; 40; 92 | 4.31 | 43; 84; 125 | 4.07 | 9; 47; 148 | 2.68 | 43; 111; 122 | 8.68 | 50; 105; 115 | 2.81 |
| 101; 130; 145 | 4.35 | 40; 90; 132 | 4.31 | 8; 41; 43 | 4.07 | 48; 55; 81 | 2.68 | 44; 95; 111 | 8.68 | 40; 114; 121 | 2.81 |
| 79; 120; 129 | 4.35 | 10; 40; 85 | 4.31 | 38; 43; 62 | 4.07 | 47; 49; 136 | 2.68 | 85; 112; 120 | 8.68 | 40; 110; 113 | 2.81 |
| 34; 120; 129 | 4.35 | 40; 125; 151 | 4.31 | 6; 35; 43 | 4.07 | 9; 47; 147 | 2.68 | 37; 95; 111 | 8.68 | 36; 39; 115 | 2.81 |
| 106; 118; 130 | 4.35 | 40; 125; 129 | 4.31 | 6; 43; 53 | 4.07 | 9; 47; 145 | 2.68 | 23; 54; 112 | 8.68 | 39; 83; 103 | 2.81 |
| 118; 130; 145 | 4.35 | 55; 91; 135 | 4.31 | 6; 43; 45 | 4.07 | 9; 47; 140 | 2.68 | 62; 71; 111 | 8.68 | 41; 61; 121 | 2.81 |
| 70; 100; 121 | 4.35 | 40; 120; 142 | 4.31 | 43; 125; 150 | 4.07 | 9; 47; 138 | 2.68 | 34; 75; 111 | 8.68 | 39; 82; 103 | 2.81 |
| 120; 133; 149 | 4.35 | 40; 107; 132 | 4.31 | 43; 83; 125 | 4.07 | 55; 56; 100 | 2.68 | 34; 74; 111 | 8.68 | 22; 121; 142 | 2.81 |
| 108; 120; 142 | 4.35 | 40; 101; 133 | 4.31 | 43; 62; 81 | 4.07 | 13; 37; 70 | 2.68 | 10; 112; 127 | 8.68 | 39; 81; 103 | 2.81 |

| | | | | Neuroendocrine | | | | PAEP_MECOM | | PDE11A_FAM19A2 | |
|---|---|---|---|---|---|---|---|---|---|---|---|
| Metanephric cells | | Myeloid cells | | cells | | Oligodendrocytes | | positive cells | | positive cells | |
| Clusters | Score | Clusters | Score | Clusters | Score | Clusters | Score | Clusters | Score | Clusters | Score |
| 4; 86; 110 | 14.10 | 30; 41; 60 | 3.30 | 70; 88; 147 | 5.38 | 94; 97; 101 | 5.19 | 35; 62; 133 | 6.00 | 37; 125; 135 | 4.39 |
| 15; 79; 126 | 14.10 | 26; 60; 114 | 3.30 | 29; 88; 147 | 5.38 | 17; 45; 81 | 5.19 | 35; 55; 114 | 6.00 | 25; 97; 135 | 4.39 |
| 4; 15; 37 | 14.10 | 57; 75; 80 | 3.30 | 26; 68; 132 | 4.23 | 89; 95; 98 | 5.19 | 38; 74; 108 | 6.00 | 50; 99; 136 | 4.39 |
| 15; 85; 135 | 14.10 | 50; 57; 125 | 3.30 | 39; 43; 102 | 4.23 | 16; 83; 89 | 5.19 | 72; 74; 108 | 6.00 | 9; 59; 127 | 3.31 |
| 15; 85; 126 | 14.10 | 50; 80; 114 | 3.30 | 28; 118; 131 | 4.23 | 37; 79; 89 | 5.19 | 35; 37; 141 | 6.00 | 127; 133; 135 | 3.31 |
| 24; 102; 112 | 14.10 | 47; 132; 14 | 3.30 | 29; 88; 101 | 4.23 | 17; 101; 107 | 5.19 | 35; 108; 129 | 4.86 | 14; 47; 136 | 3.31 |
| 15; 25; 126 | 14.10 | 57; 73; 80 | 3.30 | 27; 118; 131 | 4.23 | 29; 89; 120 | 5.19 | 31; 35; 141 | 4.86 | 54; 127; 132 | 3.31 |
| 17; 52; 110 | 14.10 | 4; 60; 114 | 3.30 | 27; 101; 131 | 4.23 | 17; 81; 89 | 5.19 | 31; 38; 74 | 4.86 | 72; 97; 135 | 3.31 |
| 15; 29; 85 | 14.10 | 57; 68; 80 | 3.30 | 29; 83; 88 | 4.23 | 82; 92; 98 | 4.08 | 35; 62; 108 | 4.86 | 59; 127; 146 | 3.31 |
| 1; 5; 110 | 14.10 | 4; 50; 114 | 3.30 | 68; 88; 147 | 4.23 | 16; 89; 150 | 4.08 | 35; 38; 149 | 4.86 | 84; 98; 135 | 3.31 |
| 15; 28; 126 | 14.10 | 57; 88; 148 | 3.30 | 26; 68; 119 | 4.23 | 17; 62; 89 | 4.08 | 35; 74; 108 | 4.86 | 25; 125; 135 | 3.31 |
| 28; 102; 111 | 14.10 | 50; 87; 114 | 3.30 | 27; 91; 131 | 4.23 | 17; 79; 89 | 4.08 | 31; 64; 108 | 4.86 | 60; 101; 146 | 3.31 |
| 15; 28; 135 | 14.10 | 41; 57; 81 | 3.30 | 26; 68; 85 | 4.23 | 29; 79; 89 | 4.08 | 38; 53; 148 | 4.86 | 59; 127; 148 | 3.31 |
| 15; 26; 68 | 14.10 | 47; 81; 132 | 3.30 | 46; 100; 114 | 4.23 | 85; 99; 122 | 4.08 | 35; 74; 140 | 4.86 | 43; 59; 127 | 3.31 |
| 15; 86; 126 | 14.10 | 41; 47; 83 | 3.30 | 26; 68; 84 | 4.23 | 29; 99; 122 | 4.08 | 31; 37; 62 | 4.86 | 28; 62; 136 | 3.31 |
| 15; 29; 126 | 14.10 | 41; 47; 82 | 3.30 | 27; 89; 131 | 4.23 | 7; 72; 98 | 4.08 | 31; 62; 85 | 4.86 | 102; 135; 142 | 3.31 |
| 6; 15; 81 | 14.10 | 7; 57; 80 | 3.30 | 27; 116; 131 | 4.23 | 7; 22; 98 | 4.08 | 31; 35; 62 | 4.86 | 41; 95; 136 | 3.31 |
| 15; 29; 68 | 14.10 | 41; 47; 75 | 3.30 | 68; 85; 88 | 4.23 | 62; 89; 98 | 4.08 | 35; 38; 133 | 4.86 | 29; 76; 119 | 3.31 |
| 81; 110; 150 | 12.23 | 41; 47; 73 | 3.30 | 27; 93; 131 | 4.23 | 72; 99; 102 | 4.08 | 31; 35; 69 | 4.86 | 27; 60; 136 | 3.31 |
| 28; 72; 110 | 12.23 | 31; 50; 80 | 3.30 | 23; 118; 131 | 4.23 | 73; 89; 93 | 4.08 | 38; 41; 75 | 4.86 | 36; 136; 143 | 3.31 |
| 74; 110; 151 | 12.23 | 57; 80; 84 | 3.30 | 18; 27; 118 | 4.23 | 61; 63; 98 | 4.08 | 31; 54; 108 | 4.86 | 57; 98; 136 | 3.31 |
| 61; 63; 110 | 12.23 | 50; 88; 114 | 3.30 | 54; 88; 101 | 4.23 | 26; 89; 97 | 4.08 | 37; 74; 108 | 4.86 | 55; 102; 135 | 3.31 |
| 24; 85; 110 | 12.23 | 50; 94; 114 | 3.30 | 26; 84; 147 | 4.23 | 26; 89; 107 | 4.08 | 35; 84; 150 | 4.86 | 29; 53; 97 | 3.31 |
| 26; 65; 110 | 12.23 | 50; 75; 114 | 3.30 | 26; 44; 119 | 4.23 | 77; 98; 122 | 4.08 | 31; 38; 62 | 4.86 | 9; 59; 136 | 3.31 |
| 15; 25; 129 | 12.23 | 15; 60; 125 | 3.30 | 27; 75; 102 | 3.19 | 82; 98; 102 | 4.08 | 31; 70; 75 | 4.86 | 18; 93; 118 | 3.31 |
| 81; 110; 151 | 12.23 | 47; 135; 14 | 3.30 | 17; 118; 131 | 3.19 | 79; 97; 98 | 4.08 | 41; 60; 112 | 4.86 | 53; 63; 118 | 3.31 |
| 14; 37; 110 | 12.23 | 1; 57; 125 | 3.30 | 27; 31; 131 | 3.19 | 17; 89; 150 | 4.08 | 35; 81; 133 | 4.86 | 40; 63; 136 | 3.31 |
| 8; 110; 129 | 12.23 | 8; 50; 128 | 3.30 | 26; 74; 148 | 3.19 | 63; 82; 98 | 4.08 | 35; 85; 150 | 4.86 | 33; 127; 135 | 3.31 |
| 81; 110; 149 | 12.23 | 47; 120; 13 | 3.30 | 26; 68; 74 | 3.19 | 62; 99; 122 | 4.08 | 31; 62; 82 | 4.86 | 59; 80; 127 | 3.31 |
| 15; 84; 126 | 12.23 | 30; 57; 125 | 3.30 | 30; 98; 118 | 3.19 | 17; 89; 107 | 4.08 | 33; 35; 148 | 4.86 | 61; 97; 135 | 3.31 |
| 74; 110; 150 | 12.23 | 50; 80; 133 | 3.30 | 44; 79; 108 | 3.19 | 42; 97; 98 | 4.08 | 35; 38; 129 | 4.86 | 37; 101; 135 | 3.31 |
| 81; 110; 129 | 12.23 | 57; 80; 126 | 3.30 | 64; 88; 101 | 3.19 | 85; 97; 98 | 4.08 | 31; 38; 142 | 4.86 | 59; 127; 138 | 3.31 |
| 74; 110; 120 | 12.23 | 8; 74; 75 | 3.30 | 75; 101; 129 | 3.19 | 90; 99; 122 | 4.08 | 31; 40; 68 | 3.81 | 23; 52; 136 | 3.31 |
| 24; 86; 110 | 12.23 | 47; 85; 132 | 2.16 | 85; 88; 147 | 3.19 | 89; 92; 98 | 4.08 | 31; 40; 70 | 3.81 | 14; 60; 97 | 3.31 |
| 8; 110; 148 | 12.23 | 41; 94; 114 | 2.16 | 27; 98; 131 | 3.19 | 2; 79; 102 | 4.08 | 54; 108; 129 | 3.81 | 27; 59; 95 | 3.31 |
| 8; 110; 147 | 12.23 | 64; 73; 114 | 2.16 | 27; 31; 118 | 3.19 | 21; 98; 101 | 4.08 | 38; 107; 149 | 3.81 | 12; 50; 136 | 3.31 |
| 74; 110; 126 | 12.23 | 47; 52; 74 | 2.16 | 17; 24; 131 | 3.19 | 70; 99; 122 | 4.08 | 35; 74; 133 | 3.81 | 43; 95; 136 | 3.31 |
| 74; 110; 129 | 12.23 | 57; 59; 74 | 2.16 | 46; 88; 100 | 3.19 | 63; 83; 98 | 4.08 | 50; 108; 114 | 3.81 | 127; 132; 135 | 3.31 |
| 74; 110; 132 | 12.23 | 14; 35; 61 | 2.16 | 44; 63; 114 | 3.19 | 72; 97; 98 | 4.08 | 5; 15; 41 | 3.81 | 41; 86; 118 | 3.31 |
| 74; 110; 133 | 12.23 | 47; 85; 134 | 2.16 | 26; 68; 70 | 3.19 | 99; 102; 129 | 4.08 | 75; 107; 149 | 3.81 | 59; 98; 127 | 3.31 |
| 81; 110; 126 | 12.23 | 14; 53; 55 | 2.16 | 68; 84; 88 | 3.19 | 89; 98; 101 | 4.08 | 26; 38; 41 | 3.81 | 27; 43; 97 | 3.31 |
| 81; 110; 132 | 12.23 | 8; 60; 128 | 2.16 | 27; 38; 101 | 3.19 | 28; 98; 122 | 4.08 | 15; 41; 133 | 3.81 | 14; 60; 127 | 3.31 |
| 74; 110; 149 | 12.23 | 14; 53; 57 | 2.16 | 26; 74; 119 | 3.19 | 53; 97; 98 | 4.08 | 31; 64; 88 | 3.81 | 102; 132; 135 | 3.31 |
| 19; 74; 110 | 12.23 | 14; 53; 59 | 2.16 | 27; 74; 97 | 3.19 | 18; 42; 100 | 4.08 | 31; 74; 75 | 3.81 | 63; 125; 135 | 3.31 |
| 81; 110; 133 | 12.23 | 15; 26; 60 | 2.16 | 26; 68; 96 | 3.19 | 39; 89; 97 | 4.08 | 38; 107; 150 | 3.81 | 20; 47; 136 | 3.31 |
| 62; 79; 110 | 12.23 | 14; 35; 53 | 2.16 | 75; 77; 102 | 3.19 | 98; 122; 150 | 4.08 | 41; 50; 112 | 3.81 | 53; 63; 136 | 3.31 |
| 81; 110; 135 | 12.23 | 50; 83; 128 | 2.16 | 98; 118; 131 | 3.19 | 51; 98; 119 | 4.08 | 35; 62; 150 | 3.81 | 60; 101; 119 | 3.31 |
| 74; 110; 140 | 12.23 | 57; 59; 79 | 2.16 | 27; 100; 104 | 3.19 | 63; 70; 98 | 4.08 | 35; 54; 114 | 3.81 | 29; 76; 97 | 3.31 |
| 81; 110; 138 | 12.23 | 29; 31; 50 | 2.16 | 27; 100; 102 | 3.19 | 51; 98; 116 | 4.08 | 35; 84; 108 | 3.81 | 40; 97; 118 | 3.31 |
| 8; 110; 135 | 12.23 | 50; 83; 125 | 2.16 | 81; 99; 102 | 3.19 | 18; 100; 149 | 4.08 | 35; 83; 133 | 3.81 | 20; 126; 135 | 3.31 |
| 74; 110; 146 | 12.23 | 8; 29; 73 | 2.16 | 61; 99; 102 | 3.19 | 98; 122; 141 | 4.08 | 35; 84; 129 | 3.81 | 34; 60; 127 | 3.31 |
| 74; 110; 147 | 12.23 | 13; 30; 53 | 2.16 | 27; 100; 116 | 3.19 | 53; 98; 102 | 4.08 | 41; 64; 112 | 3.81 | 25; 66; 136 | 3.31 |
| 81; 110; 147 | 12.23 | 72; 74; 75 | 2.16 | 24; 117; 147 | 3.19 | 6; 99; 102 | 4.08 | 35; 83; 129 | 3.81 | 59; 81; 127 | 3.31 |
| 78; 93; 110 | 12.23 | 57; 59; 75 | 2.16 | 30; 99; 118 | 3.19 | 89; 92; 126 | 4.08 | 34; 75; 108 | 3.81 | 84; 101; 135 | 3.31 |
| 15; 25; 149 | 12.2 | 20; 24; 50 | 2.16 | 27; 129; 131 | 3.19 | 83; 98; 102 | 4.08 | 15; 62; 140 | 3.81 | 55; 89; 135 | 3.31 |
| 77; 84; 110 | 12.23 | 10; 15; 150 | 2.16 | 26; 131; 147 | 3.19 | 75; 79; 89 | 4.08 | 35; 129; 150 | 3.81 | 24; 64; 119 | 3.31 |
| 15; 25; 138 | 12.23 | 15; 26; 50 | 2.16 | 27; 82; 131 | 3.19 | 12; 97; 98 | 4.08 | 35; 84; 133 | 3.81 | 63; 97; 135 | 3.31 |
| 21; 35; 110 | 12.23 | 26; 55; 63 | 2.16 | 65; 101; 104 | 3.19 | 36; 97; 98 | 4.08 | 29; 35; 114 | 3.81 | 33; 102; 135 | 3.31 |
| 17; 70; 110 | 12.23 | 33; 47; 73 | 2.16 | 28; 30; 147 | 3.19 | 29; 98; 122 | 4.08 | 34; 35; 150 | 3.81 | 24; 64; 97 | 3.31 |
| 15; 26; 47 | 12.23 | 47; 53; 54 | 2.16 | 7; 75; 102 | 3.19 | 76; 79; 89 | 4.08 | 15; 62; 133 | 3.81 | 33; 101; 135 | 3.31 |
| 27; 75; 110 | 12.23 | 15; 59; 143 | 2.16 | 23; 100; 114 | 3.19 | 17; 28; 89 | 4.08 | 31; 37; 69 | 3.81 | 69; 102; 135 | 3.31 |
| 48; 63; 110 | 12.23 | 75; 82; 86 | 2.16 | 24; 98; 131 | 3.19 | 28; 99; 122 | 4.08 | 37; 75; 107 | 3.81 | 59; 96; 127 | 3.31 |
| 15; 26; 54 | 12.23 | 50; 84; 114 | 2.16 | 27; 68; 131 | 3.19 | 42; 99; 122 | 4.08 | 15; 41; 108 | 3.81 | 97; 101; 118 | 3.31 |
| 15; 53; 81 | 12.23 | 47; 53; 74 | 2.16 | 26; 27; 131 | 3.19 | 12; 89; 97 | 4.08 | 35; 37; 129 | 3.81 | 62; 73; 136 | 3.31 |
| 47; 78; 110 | 12.23 | 29; 30; 129 | 2.16 | 81; 98; 102 | 3.19 | 45; 99; 122 | 4.08 | 31; 37; 108 | 3.81 | 33; 97; 135 | 3.31 |
| 63; 90; 110 | 12.23 | 47; 53; 73 | 2.16 | 68; 83; 88 | 3.19 | 68; 99; 122 | 4.08 | 82; 108; 126 | 3.81 | 59; 125; 127 | 3.31 |
| 56; 70; 110 | 12.23 | 47; 53; 72 | 2.16 | 24; 131; 151 | 3.19 | 29; 98; 101 | 4.08 | 38; 40; 150 | 3.81 | 37; 60; 127 | 3.31 |
| 44; 81; 110 | 12.23 | 6; 60; 114 | 2.16 | 68; 88; 101 | 3.19 | 29; 98; 118 | 4.08 | 82; 108; 129 | 3.81 | 63; 98; 135 | 3.31 |
| 15; 26; 65 | 12.23 | 47; 53; 70 | 2.16 | 65; 98; 102 | 3.19 | 62; 98; 122 | 4.08 | 55; 108; 133 | 3.81 | 60; 74; 127 | 3.31 |
| 76; 78; 110 | 12.23 | 47; 68; 72 | 2.16 | 26; 68; 83 | 3.19 | 12; 44; 89 | 4.08 | 6; 31; 35 | 3.81 | 62; 72; 136 | 3.31 |
| 34; 70; 110 | 12.23 | 48; 58; 61 | 2.16 | 27; 74; 118 | 3.19 | 98; 101; 107 | 4.08 | 82; 108; 133 | 3.81 | 24; 59; 119 | 3.31 |
| 3; 86; 110 | 12.23 | 47; 84; 132 | 2.16 | 34; 118; 131 | 3.19 | 17; 69; 89 | 4.08 | 37; 108; 129 | 3.81 | 24; 59; 118 | 3.31 |
| 6; 48; 110 | 12.23 | 47; 53; 75 | 2.16 | 27; 126; 131 | 3.19 | 79; 89; 126 | 4.08 | 35; 38; 148 | 3.81 | 82; 98; 135 | 3.31 |
| 53; 74; 110 | 12.23 | 47; 53; 76 | 2.16 | 65; 99; 102 | 3.19 | 84; 99; 122 | 4.08 | 33; 62; 108 | 3.81 | 29; 127; 135 | 3.31 |
| 24; 81; 112 | 12.23 | 47; 53; 77 | 2.16 | 69; 99; 102 | 3.19 | 18; 83; 89 | 4.08 | 38; 55; 114 | 3.81 | 96; 98; 135 | 3.31 |
| 24; 81; 110 | 12.23 | 47; 53; 84 | 2.16 | 27; 99; 131 | 3.19 | 17; 85; 89 | 4.08 | 35; 74; 146 | 3.81 | 73; 102; 135 | 3.31 |
| 15; 26; 69 | 12.23 | 47; 68; 73 | 2.16 | 27; 89; 119 | 3.19 | 83; 99; 122 | 4.08 | 35; 37; 140 | 3.81 | 48; 101; 118 | 3.31 |
| 37; 61; 110 | 12.23 | 47; 53; 88 | 2.16 | 70; 88; 101 | 3.19 | 83; 97; 98 | 4.08 | 35; 37; 133 | 3.81 | 47; 75; 136 | 3.31 |
| 11; 33; 110 | 12.23 | 47; 53; 87 | 2.16 | 27; 125; 131 | 3.19 | 79; 98; 122 | 4.08 | 31; 40; 79 | 3.81 | 6; 14; 119 | 3.31 |
| 24; 83; 110 | 12.23 | 47; 53; 85 | 2.16 | 51; 100; 114 | 3.19 | 81; 98; 122 | 4.08 | 15; 35; 133 | 3.81 | 27; 42; 70 | 3.31 |
| 23; 47; 110 | 12.23 | 47; 53; 83 | 2.16 | 27; 120; 131 | 3.19 | 22; 98; 101 | 4.08 | 35; 75; 146 | 3.81 | 59; 71; 127 | 3.31 |
| 15; 25; 140 | 12.23 | 47; 53; 78 | 2.16 | 26; 119; 132 | 3.19 | 72; 98; 102 | 4.08 | 15; 35; 132 | 3.81 | 22; 60; 136 | 3.31 |
| 15; 25; 147 | 12.23 | 47; 53; 82 | 2.16 | 27; 116; 141 | 3.19 | 7; 17; 102 | 4.08 | 35; 38; 141 | 3.81 | 3; 47; 136 | 3.31 |
| 15; 25; 148 | 12.23 | 48; 58; 63 | 2.16 | 28; 98; 129 | 3.19 | 15; 99; 101 | 4.08 | 35; 75; 149 | 3.81 | 11; 76; 96 | 3.31 |
| 102; 110; 111 | 12.23 | 47; 53; 81 | 2.16 | 27; 93; 119 | 3.19 | 38; 97; 98 | 4.08 | 38; 40; 147 | 3.81 | 71; 101; 135 | 3.31 |
| 15; 25; 110 | 12.23 | 47; 53; 80 | 2.16 | 3; 28; 100 | 3.19 | 93; 98; 102 | 4.08 | 37; 38; 135 | 3.81 | 26; 78; 118 | 3.31 |
| 15; 25; 150 | 12.23 | 1; 29; 47 | 2.16 | 84; 88; 101 | 3.19 | 72; 98; 116 | 4.08 | 74; 108; 125 | 3.81 | 62; 63; 136 | 3.31 |
| 19; 72; 110 | 12.23 | 47; 53; 79 | 2.16 | 27; 30; 131 | 3.19 | 7; 70; 98 | 4.08 | 31; 37; 82 | 3.81 | 48; 101; 135 | 3.31 |
| 17; 71; 110 | 12.23 | 48; 58; 60 | 2.16 | 28; 98; 131 | 3.19 | 22; 61; 98 | 4.08 | 33; 35; 141 | 3.81 | 98; 101; 135 | 3.31 |
| 15; 26; 28 | 12.23 | 47; 53; 69 | 2.16 | 7; 68; 102 | 3.19 | 64; 99; 122 | 4.08 | 6; 31; 62 | 3.81 | 59; 77; 127 | 3.31 |
| 15; 26; 30 | 12.23 | 8; 53; 59 | 2.16 | 27; 116; 149 | 3.19 | 69; 98; 122 | 4.08 | 35; 37; 108 | 3.81 | 62; 75; 136 | 3.31 |
| 15; 26; 33 | 12.23 | 47; 53; 68 | 2.16 | 83; 85; 88 | 3.19 | 15; 98; 101 | 4.08 | 15; 38; 41 | 3.81 | 73; 101; 135 | 3.31 |
| 24; 84; 110 | 12.23 | 47; 85; 142 | 2.16 | 24; 116; 131 | 3.19 | 18; 85; 89 | 4.08 | 38; 55; 108 | 3.81 | 73; 101; 132 | 3.31 |
| 1; 55; 110 | 12.23 | 47; 68; 69 | 2.16 | 46; 100; 115 | 3.19 | 89; 95; 107 | 4.08 | 31; 37; 75 | 3.81 | 13; 40; 136 | 3.31 |
| 15; 53; 110 | 12.23 | 33; 41; 47 | 2.16 | 27; 92; 131 | 3.19 | 63; 68; 98 | 4.08 | 31; 37; 74 | 3.81 | 76; 125; 126 | 3.31 |
| 15; 26; 37 | 12.23 | 13; 30; 41 | 2.16 | 26; 64; 147 | 3.19 | 22; 68; 98 | 4.08 | 36; 74; 108 | 3.81 | 37; 62; 136 | 3.31 |
| 15; 26; 41 | 12.23 | 47; 84; 142 | 2.16 | 26; 76; 101 | 3.19 | 29; 83; 89 | 4.08 | 40; 114; 150 | 3.81 | 60; 99; 136 | 3.31 |
| 26; 66; 110 | 12.23 | 57; 59; 72 | 2.16 | 83; 88; 101 | 3.19 | 2; 26; 101 | 4.08 | 31; 37; 83 | 3.81 | 60; 95; 127 | 3.31 |
| 8; 110; 149 | 12.23 | 31; 41; 53 | 2.16 | 7; 102; 149 | 3.19 | 69; 99; 122 | 4.08 | 34; 37; 38 | 3.81 | 50; 125; 127 | 3.31 |
| 63; 93; 110 | 12.23 | 47; 84; 149 | 2.16 | 70; 74; 88 | 3.19 | 72; 98; 122 | 4.08 | 33; 38; 85 | 3.81 | 96; 118; 135 | 3.31 |

| | | | | | | | | Retinal | | | |
|---|---|---|---|---|---|---|---|---|---|---|---|
| PDE1C_ACSM3 | | Parietal and | | Photoreceptor | | Retinal | | progenitors and | | SATB2_LRRC7 | |
| positive cells | | chief cells | | cells | | pigment cells | | Muller glia | | positive cells | |
| Clusters | Score | Clusters | Score | Clusters | Score | Clusters | Score | Clusters | Score | Clusters | Score |
| 10; 31; 49 | 7.45 | 75; 126; 133 | 3.30 | 52; 123; 125 | 4.13 | 22; 61; 147 | 3.36 | 73; 98; 135 | 9.08 | 24; 40; 102 | 5.58 |
| 7; 31; 49 | 7.45 | 54; 99; 129 | 2.16 | 54; 123; 125 | 2.96 | 22; 61; 148 | 3.36 | 96; 98; 135 | 9.08 | 40; 102; 128 | 5.58 |
| 31; 49; 143 | 7.45 | 18; 40; 44 | 2.16 | 70; 133; 135 | 2.96 | 4; 20; 22 | 3.36 | 97; 98; 135 | 7.70 | 39; 98; 102 | 5.58 |
| 31; 49; 54 | 7.45 | 54; 99; 150 | 2.16 | 54; 107; 134 | 2.96 | 22; 61; 149 | 3.36 | 83; 98; 135 | 7.70 | 12; 40; 127 | 4.39 |
| 31; 49; 62 | 7.45 | 54; 99; 149 | 2.16 | 82; 86; 133 | 2.96 | 22; 34; 70 | 3.36 | 84; 98; 135 | 7.70 | 39; 91; 102 | 4.39 |
| 31; 49; 75 | 7.45 | 39; 82; 126 | 2.16 | 97; 133; 135 | 2.96 | 22; 61; 134 | 3.36 | 82; 98; 135 | 7.70 | 12; 40; 102 | 4.39 |
| 49; 81; 133 | 6.19 | 39; 126; 138 | 2.16 | 97; 133; 134 | 2.96 | 22; 61; 83 | 3.36 | 26; 86; 97 | 6.40 | 40; 86; 97 | 4.39 |
| 47; 49; 109 | 6.19 | 39; 61; 126 | 2.16 | 54; 133; 134 | 2.96 | 82; 86; 133 | 3.36 | 28; 98; 135 | 6.40 | 24; 39; 102 | 4.39 |
| 18; 50; 109 | 6.19 | 4; 39; 126 | 2.16 | 54; 133; 135 | 2.96 | 22; 25; 61 | 3.36 | 10; 27; 98 | 6.40 | 39; 102; 150 | 4.39 |
| 23; 54; 62 | 6.19 | 5; 39; 127 | 2.16 | 54; 126; 135 | 2.96 | 1; 22; 61 | 3.36 | 29; 98; 126 | 6.40 | 28; 48; 102 | 4.39 |
| 31; 50; 70 | 6.19 | 5; 39; 126 | 2.16 | 54; 127; 135 | 2.96 | 22; 34; 61 | 3.36 | 27; 84; 98 | 6.40 | 39; 102; 126 | 4.39 |
| 25; 49; 69 | 6.19 | 62; 129; 133 | 2.16 | 30; 49; 133 | 2.96 | 22; 34; 150 | 3.36 | 27; 72; 98 | 6.40 | 39; 102; 135 | 4.39 |
| 25; 62; 108 | 6.19 | 8; 39; 138 | 2.16 | 8; 60; 123 | 2.96 | 4; 22; 101 | 3.36 | 29; 98; 119 | 6.40 | 39; 102; 141 | 4.39 |
| 22; 50; 109 | 6.19 | 54; 99; 107 | 2.16 | 30; 44; 125 | 2.96 | 22; 34; 81 | 3.36 | 70; 98; 135 | 6.40 | 39; 102; 142 | 4.39 |
| 50; 54; 109 | 6.19 | 39; 126; 129 | 2.16 | 79; 123; 125 | 2.96 | 22; 34; 148 | 3.36 | 29; 98; 118 | 6.40 | 39; 102; 145 | 4.39 |
| 31; 49; 69 | 6.19 | 39; 62; 138 | 2.16 | 79; 123; 137 | 2.96 | 20; 62; 70 | 2.50 | 28; 98; 118 | 6.40 | 39; 86; 97 | 4.39 |
| 31; 49; 83 | 6.19 | 18; 40; 129 | 2.16 | 54; 64; 127 | 2.96 | 72; 82; 134 | 2.50 | 27; 63; 98 | 6.40 | 20; 39; 102 | 4.39 |
| 31; 49; 82 | 6.19 | 62; 79; 133 | 2.16 | 54; 86; 134 | 2.96 | 22; 34; 43 | 2.50 | 28; 98; 108 | 6.40 | 27; 60; 102 | 4.39 |
| 31; 49; 70 | 6.19 | 54; 127; 133 | 2.16 | 54; 86; 123 | 2.96 | 5; 20; 61 | 2.50 | 27; 44; 98 | 6.40 | 39; 72; 102 | 4.39 |
| 31; 49; 72 | 6.19 | 39; 126; 150 | 2.16 | 81; 123; 125 | 2.96 | 4; 22; 28 | 2.50 | 60; 98; 118 | 6.40 | 39; 72; 97 | 4.39 |
| 50; 62; 109 | 6.19 | 39; 126; 151 | 2.16 | 13; 70; 133 | 2.96 | 4; 22; 25 | 2.50 | 60; 98; 119 | 6.40 | 18; 27; 102 | 4.39 |
| 25; 49; 85 | 6.19 | 18; 40; 127 | 2.16 | 30; 41; 127 | 2.96 | 25; 61; 79 | 2.50 | 78; 98; 118 | 6.40 | 39; 63; 102 | 4.39 |
| 50; 72; 109 | 6.19 | 18; 40; 128 | 2.16 | 30; 41; 126 | 2.96 | 25; 61; 85 | 2.50 | 26; 89; 97 | 6.40 | 39; 83; 102 | 4.39 |
| 28; 50; 109 | 6.19 | 62; 126; 135 | 2.16 | 30; 41; 101 | 2.96 | 25; 61; 81 | 2.50 | 76; 98; 135 | 6.40 | 39; 56; 97 | 4.39 |
| 10; 11; 64 | 6.19 | 62; 126; 133 | 2.16 | 13; 68; 133 | 2.96 | 25; 61; 82 | 2.50 | 63; 98; 135 | 6.40 | 39; 85; 102 | 4.39 |
| 5; 50; 109 | 6.19 | 70; 126; 133 | 2.16 | 54; 75; 123 | 2.96 | 25; 61; 63 | 2.50 | 84; 98; 118 | 6.40 | 18; 39; 113 | 4.39 |
| 18; 31; 50 | 6.19 | 62; 75; 133 | 2.16 | 30; 101; 134 | 2.96 | 61; 128; 151 | 2.50 | 27; 68; 98 | 6.40 | 40; 95; 102 | 4.39 |
| 18; 31; 49 | 6.19 | 40; 88; 128 | 2.16 | 8; 123; 125 | 2.96 | 22; 34; 82 | 2.50 | 98; 132; 135 | 6.40 | 40; 98; 102 | 4.39 |
| 31; 50; 85 | 6.19 | 44; 54; 99 | 2.16 | 69; 133; 135 | 2.96 | 22; 34; 79 | 2.50 | 27; 82; 98 | 6.40 | 40; 97; 113 | 4.39 |
| 25; 56; 108 | 6.19 | 70; 99; 126 | 2.16 | 8; 123; 137 | 2.96 | 110; 140; 151 | 2.50 | 27; 81; 98 | 6.40 | 40; 63; 102 | 3.31 |
| 5; 18; 31 | 6.19 | 8; 39; 126 | 2.16 | 86; 101; 134 | 2.96 | 110; 141; 151 | 2.50 | 98; 135; 142 | 6.40 | 40; 62; 102 | 3.31 |
| 31; 49; 150 | 6.19 | 54; 69; 100 | 2.16 | 6; 30; 123 | 2.96 | 22; 84; 134 | 2.50 | 26; 98; 118 | 6.40 | 36; 39; 98 | 3.31 |
| 44; 50; 109 | 6.19 | 18; 40; 126 | 2.16 | 86; 123; 137 | 2.96 | 110; 142; 151 | 2.50 | 26; 98; 119 | 6.40 | 36; 39; 102 | 3.31 |
| 31; 44; 49 | 6.19 | 54; 69; 99 | 2.16 | 41; 105; 137 | 2.96 | 110; 143; 151 | 2.50 | 27; 76; 98 | 6.40 | 36; 39; 127 | 3.31 |
| 10; 25; 49 | 6.19 | 41; 65; 129 | 2.16 | 86; 123; 125 | 2.96 | 5; 20; 101 | 2.50 | 27; 75; 98 | 6.40 | 39; 54; 102 | 3.31 |
| 18; 31; 62 | 6.19 | 18; 39; 141 | 2.16 | 86; 96; 133 | 2.96 | 9; 22; 101 | 2.50 | 26; 93; 97 | 6.40 | 18; 39; 97 | 3.31 |
| 10; 25; 62 | 6.19 | 18; 39; 151 | 2.16 | 69; 123; 125 | 2.96 | 2; 95; 139 | 2.50 | 27; 65; 98 | 6.40 | 36; 40; 102 | 3.31 |
| 49; 85; 103 | 6.19 | 126; 129; 133 | 2.16 | 8; 133; 135 | 2.96 | 23; 101; 133 | 2.50 | 98; 135; 147 | 6.40 | 18; 39; 102 | 3.31 |
| 31; 49; 85 | 6.19 | 40; 128; 129 | 2.16 | 70; 123; 125 | 2.96 | 22; 101; 134 | 2.50 | 68; 98; 135 | 6.40 | 40; 63; 127 | 3.31 |
| 5; 31; 62 | 6.19 | 40; 127; 140 | 2.16 | 50; 126; 127 | 2.96 | 4; 22; 61 | 2.50 | 47; 98; 118 | 6.40 | 40; 98; 107 | 3.31 |
| 23; 62; 64 | 6.19 | 40; 65; 107 | 2.16 | 50; 127; 133 | 2.96 | 6; 22; 25 | 2.50 | 72; 98; 135 | 6.40 | 28; 56; 127 | 3.31 |
| 18; 25; 74 | 6.19 | 62; 100; 126 | 2.16 | 60; 96; 98 | 2.96 | 15; 25; 97 | 2.50 | 27; 70; 98 | 6.40 | 40; 60; 127 | 3.31 |
| 25; 72; 75 | 6.19 | 62; 76; 148 | 2.16 | 30; 128; 137 | 2.96 | 6; 22; 61 | 2.50 | 27; 98; 108 | 6.40 | 22; 39; 119 | 3.31 |
| 25; 49; 108 | 6.19 | 40; 127; 139 | 2.16 | 30; 126; 133 | 2.96 | 6; 22; 83 | 2.50 | 27; 98; 118 | 6.40 | 102; 105; 144 | 3.31 |
| 49; 54; 109 | 6.19 | 88; 133; 150 | 2.16 | 14; 78; 134 | 2.96 | 4; 22; 70 | 2.50 | 27; 73; 98 | 6.40 | 39; 57; 102 | 3.31 |
| 7; 50; 109 | 6.19 | 18; 88; 133 | 2.16 | 74; 97; 132 | 2.96 | 44; 138; 151 | 2.50 | 37; 98; 135 | 6.40 | 40; 60; 102 | 3.31 |
| 25; 49; 150 | 6.19 | 18; 40; 89 | 2.16 | 60; 107; 123 | 2.96 | 2; 49; 97 | 2.50 | 27; 98; 146 | 6.40 | 22; 40; 95 | 3.31 |
| 25; 49; 147 | 6.19 | 41; 126; 138 | 2.16 | 30; 133; 134 | 2.96 | 9; 27; 107 | 2.50 | 79; 98; 135 | 6.40 | 27; 74; 97 | 3.31 |
| 23; 62; 143 | 5.02 | 79; 99; 126 | 2.16 | 8; 30; 123 | 2.96 | 43; 61; 151 | 2.50 | 27; 85; 98 | 6.40 | 39; 56; 119 | 3.31 |
| 25; 74; 75 | 5.02 | 40; 127; 138 | 2.16 | 14; 123; 125 | 2.96 | 9; 27; 97 | 2.50 | 27; 79; 98 | 6.40 | 39; 56; 102 | 3.31 |
| 23; 62; 75 | 5.02 | 40; 127; 137 | 2.16 | 60; 89; 123 | 2.96 | 22; 28; 61 | 2.50 | 37; 98; 118 | 6.40 | 22; 40; 102 | 3.31 |
| 23; 38; 62 | 5.02 | 54; 82; 99 | 2.16 | 30; 123; 125 | 2.96 | 22; 28; 34 | 2.50 | 27; 98; 119 | 6.40 | 22; 40; 127 | 3.31 |
| 23; 62; 73 | 5.02 | 62; 88; 125 | 2.16 | 60; 118; 123 | 2.96 | 9; 27; 88 | 2.50 | 98; 101; 135 | 6.40 | 56; 72; 118 | 3.31 |
| 50; 70; 99 | 5.02 | 40; 128; 150 | 2.16 | 52; 123; 133 | 2.96 | 22; 28; 142 | 2.50 | 30; 98; 135 | 5.19 | 40; 64; 102 | 3.31 |
| 32; 49; 56 | 5.02 | 40; 128; 149 | 2.16 | 14; 40; 125 | 2.96 | 22; 28; 134 | 2.50 | 68; 98; 118 | 5.19 | 40; 97; 147 | 3.31 |
| 18; 20; 74 | 5.02 | 40; 128; 148 | 2.16 | 74; 133; 135 | 2.96 | 20; 61; 82 | 2.50 | 78; 98; 108 | 5.19 | 97; 98; 102 | 3.31 |
| 28; 49; 72 | 5.02 | 41; 65; 89 | 2.16 | 46; 101; 134 | 2.96 | 2; 95; 110 | 2.50 | 7; 27; 98 | 5.19 | 40; 70; 102 | 3.31 |
| 32; 49; 54 | 5.02 | 62; 88; 133 | 2.16 | 60; 138; 140 | 2.96 | 20; 61; 79 | 2.50 | 73; 84; 98 | 5.19 | 40; 70; 127 | 3.31 |
| 15; 27; 50 | 5.02 | 62; 76; 126 | 2.16 | 60; 119; 123 | 2.96 | 34; 43; 143 | 2.50 | 98; 126; 147 | 5.19 | 27; 97; 113 | 3.31 |
| 10; 25; 150 | 5.02 | 39; 65; 126 | 2.16 | 14; 41; 125 | 2.96 | 22; 25; 146 | 2.50 | 27; 87; 98 | 5.19 | 18; 40; 97 | 3.31 |
| 15; 18; 64 | 5.02 | 40; 65; 66 | 2.16 | 14; 41; 137 | 2.96 | 22; 25; 134 | 2.50 | 98; 126; 148 | 5.19 | 24; 58; 102 | 3.31 |
| 23; 56; 62 | 5.02 | 62; 99; 126 | 2.16 | 46; 115; 137 | 2.96 | 22; 61; 85 | 2.50 | 98; 126; 150 | 5.19 | 40; 97; 107 | 3.31 |
| 23; 56; 64 | 5.02 | 40; 128; 138 | 2.16 | 14; 41; 101 | 2.96 | 22; 61; 84 | 2.50 | 98; 129; 132 | 5.19 | 18; 40; 102 | 3.31 |
| 23; 62; 72 | 5.02 | 75; 99; 126 | 2.16 | 14; 57; 137 | 2.96 | 5; 22; 81 | 2.50 | 28; 72; 98 | 5.19 | 40; 69; 102 | 3.31 |
| 10; 49; 96 | 5.02 | 40; 128; 137 | 2.16 | 75; 126; 135 | 2.96 | 22; 68; 134 | 2.50 | 44; 73; 98 | 5.19 | 97; 99; 113 | 3.31 |
| 7; 15; 64 | 5.02 | 40; 128; 139 | 2.16 | 60; 123; 125 | 2.96 | 22; 61; 77 | 2.50 | 76; 82; 98 | 5.19 | 40; 65; 127 | 3.31 |
| 7; 15; 62 | 5.02 | 69; 99; 126 | 2.16 | 75; 133; 135 | 2.96 | 27; 82; 135 | 2.50 | 27; 69; 98 | 5.19 | 36; 48; 102 | 3.31 |
| 25; 54; 108 | 5.02 | 62; 70; 133 | 2.16 | 75; 135; 147 | 2.96 | 22; 61; 74 | 2.50 | 28; 37; 98 | 5.19 | 89; 97; 113 | 3.31 |
| 50; 70; 109 | 5.02 | 40; 128; 143 | 2.16 | 75; 135; 148 | 2.96 | 22; 61; 73 | 2.50 | 14; 98; 101 | 5.19 | 40; 64; 127 | 3.31 |
| 49; 83; 103 | 5.02 | 126; 133; 150 | 2.16 | 75; 123; 125 | 2.96 | 22; 61; 69 | 2.50 | 28; 88; 98 | 5.19 | 40; 97; 127 | 3.31 |
| 31; 47; 49 | 5.02 | 39; 65; 129 | 2.16 | 52; 128; 137 | 2.96 | 22; 61; 68 | 2.50 | 10; 98; 135 | 5.19 | 8; 23; 127 | 3.31 |
| 23; 64; 75 | 5.02 | 40; 65; 106 | 2.16 | 75; 97; 132 | 2.96 | 22; 61; 90 | 2.50 | 27; 83; 98 | 5.19 | 39; 52; 97 | 3.31 |
| 26; 49; 76 | 5.02 | 40; 65; 150 | 2.16 | 52; 104; 123 | 2.96 | 22; 61; 114 | 2.50 | 26; 76; 97 | 5.19 | 40; 65; 102 | 3.31 |
| 5; 50; 111 | 5.02 | 40; 65; 151 | 2.16 | 60; 127; 134 | 2.96 | 22; 61; 101 | 2.50 | 73; 98; 146 | 5.19 | 27; 86; 102 | 3.31 |
| 27; 50; 54 | 5.02 | 40; 44; 151 | 2.16 | 60; 127; 133 | 2.96 | 15; 70; 82 | 2.50 | 73; 75; 98 | 5.19 | 24; 59; 105 | 3.31 |
| 50; 70; 106 | 5.02 | 20; 62; 100 | 2.16 | 74; 123; 125 | 2.96 | 9; 82; 101 | 2.50 | 6; 27; 98 | 5.19 | 24; 59; 102 | 3.31 |
| 23; 64; 74 | 5.02 | 40; 44; 65 | 2.16 | 52; 133; 135 | 2.96 | 44; 82; 101 | 2.50 | 72; 98; 119 | 5.19 | 40; 66; 102 | 3.31 |
| 27; 50; 56 | 5.02 | 18; 40; 65 | 2.16 | 60; 126; 134 | 2.96 | 44; 82; 103 | 2.50 | 37; 98; 119 | 5.19 | 40; 68; 102 | 3.31 |
| 23; 62; 63 | 5.02 | 82; 99; 126 | 2.16 | 14; 123; 137 | 2.96 | 49; 110; 123 | 2.50 | 21; 98; 117 | 5.19 | 40; 68; 127 | 3.31 |
| 28; 50; 85 | 5.02 | 5; 39; 138 | 2.16 | 78; 123; 137 | 2.96 | 106; 110; 123 | 2.50 | 72; 97; 98 | 5.19 | 27; 86; 97 | 3.31 |
| 23; 64; 72 | 5.02 | 88; 126; 133 | 2.16 | 30; 82; 133 | 2.96 | 25; 81; 151 | 2.50 | 72; 98; 134 | 5.19 | 27; 98; 102 | 3.31 |
| 50; 84; 99 | 5.02 | 69; 126; 132 | 2.16 | 78; 86; 132 | 2.96 | 106; 110; 151 | 2.50 | 29; 76; 98 | 5.19 | 39; 72; 119 | 3.31 |
| 50; 54; 99 | 5.02 | 40; 126; 128 | 2.16 | 53; 126; 133 | 2.96 | 8; 22; 81 | 2.50 | 29; 90; 98 | 5.19 | 40; 98; 138 | 3.31 |
| 10; 49; 99 | 5.02 | 40; 127; 128 | 2.16 | 78; 133; 135 | 2.96 | 4; 49; 104 | 2.50 | 45; 98; 135 | 5.19 | 98; 102; 107 | 3.31 |
| 10; 25; 70 | 5.02 | 62; 88; 100 | 2.16 | 98; 123; 137 | 2.96 | 44; 79; 134 | 2.50 | 47; 98; 101 | 5.19 | 40; 50; 127 | 3.31 |
| 20; 49; 108 | 5.02 | 18; 40; 83 | 2.16 | 123; 127; 133 | 2.96 | 22; 62; 149 | 2.50 | 45; 98; 119 | 5.19 | 24; 101; 119 | 3.31 |
| 22; 50; 106 | 5.02 | 40; 126; 140 | 2.16 | 13; 126; 133 | 2.96 | 49; 97; 134 | 2.50 | 45; 98; 118 | 5.19 | 28; 75; 102 | 3.31 |
| 49; 56; 109 | 5.02 | 40; 126; 139 | 2.16 | 14; 127; 135 | 2.96 | 49; 97; 103 | 2.50 | 18; 98; 118 | 5.19 | 24; 30; 113 | 3.31 |
| 25; 70; 75 | 5.02 | 40; 126; 138 | 2.16 | 14; 126; 133 | 2.96 | 49; 97; 126 | 2.50 | 18; 98; 135 | 5.19 | 40; 98; 127 | 3.31 |
| 49; 56; 111 | 5.02 | 40; 65; 129 | 2.16 | 14; 128; 137 | 2.96 | 10; 95; 138 | 2.50 | 45; 97; 98 | 5.19 | 24; 101; 102 | 3.31 |
| 50; 107; 108 | 5.02 | 18; 40; 82 | 2.16 | 60; 81; 123 | 2.96 | 44; 79; 132 | 2.50 | 47; 98; 119 | 5.19 | 39; 70; 102 | 3.31 |
| 49; 73; 81 | 5.02 | 40; 97; 128 | 2.16 | 60; 79; 123 | 2.96 | 8; 22; 101 | 2.50 | 37; 97; 98 | 5.19 | 39; 70; 97 | 3.31 |
| 23; 64; 129 | 5.02 | 40; 118; 139 | 2.16 | 123; 126; 127 | 2.96 | 44; 79; 151 | 2.50 | 51; 98; 148 | 5.19 | 40; 52; 102 | 3.31 |
| 50; 82; 109 | 5.02 | 18; 62; 100 | 2.16 | 47; 127; 133 | 2.96 | 5; 22; 133 | 2.50 | 17; 98; 146 | 5.19 | 98; 102; 120 | 3.31 |
| 17; 50; 114 | 5.02 | 18; 62; 99 | 2.16 | 60; 70; 123 | 2.96 | 22; 62; 68 | 2.50 | 14; 98; 130 | 5.19 | 39; 59; 102 | 3.31 |
| 15; 25; 69 | 5.02 | 18; 40; 150 | 2.16 | 30; 89; 134 | 2.96 | 22; 61; 150 | 2.50 | 98; 118; 126 | 5.19 | 27; 57; 102 | 3.31 |
| 13; 23; 62 | 5.02 | 18; 40; 151 | 2.16 | 30; 89; 123 | 2.96 | 42; 97; 138 | 2.50 | 27; 98; 148 | 5.19 | 20; 40; 127 | 3.31 |
| 11; 25; 50 | 5.02 | 18; 40; 148 | 2.16 | 50; 101; 127 | 2.96 | 15; 69; 82 | 2.50 | 76; 98; 118 | 5.19 | 18; 27; 138 | 3.31 |
| 31; 44; 62 | 5.02 | 75; 88; 133 | 2.16 | 89; 123; 137 | 2.96 | 42; 95; 138 | 2.50 | 63; 98; 108 | 5.19 | 39; 74; 127 | 3.31 |
| 49; 56; 99 | 5.02 | 40; 118; 128 | 2.16 | 68; 74; 135 | 2.96 | 22; 62; 84 | 2.50 | 84; 98; 119 | 5.19 | 39; 74; 102 | 3.31 |

| SKOR2_NPSR1 | | STC2_TLX1 | | | | | | Skeletal | | Smooth | |
|---|---|---|---|---|---|---|---|---|---|---|---|
| positive cells | | positive cells | | Satellite cells | | Schwann cells | | muscle cells | | muscle cells | |
| Clusters | Score | Clusters | Score | Clusters | Score | Clusters | Score | Clusters | Score | Clusters | Score |
| 34; 54; 118 | 3.12 | 69; 144; 149 | 6.00 | 64; 97; 145 | 7.83 | 8; 77; 114 | 8.66 | 10; 63; 101 | 8.28 | 72; 113; 145 | 11.74 |
| 9; 83; 146 | 3.12 | 119; 141; 144 | 6.00 | 74; 101; 145 | 6.62 | 4; 120; 146 | 8.66 | 55; 82; 101 | 8.28 | 121; 122; 141 | 11.74 |
| 9; 86; 146 | 3.12 | 6; 69; 144 | 6.00 | 63; 72; 145 | 6.62 | 72; 83; 114 | 8.66 | 20; 44; 101 | 8.28 | 53; 113; 145 | 11.74 |
| 9; 146; 147 | 3.12 | 36; 79; 144 | 6.00 | 53; 101; 145 | 6.62 | 81; 133; 149 | 8.66 | 20; 65; 101 | 8.28 | 9; 113; 145 | 11.74 |
| 41; 72; 118 | 3.12 | 62; 144; 149 | 6.00 | 69; 78; 144 | 6.62 | 90; 114; 149 | 7.43 | 7; 54; 101 | 8.28 | 48; 113; 145 | 11.74 |
| 9; 68; 146 | 3.12 | 61; 69; 144 | 6.00 | 98; 101; 145 | 6.62 | 68; 114; 145 | 7.43 | 7; 10; 101 | 8.28 | 45; 113; 145 | 11.74 |
| 9; 75; 146 | 3.12 | 36; 70; 144 | 6.00 | 25; 145; 150 | 6.62 | 125; 141; 145 | 7.43 | 10; 20; 101 | 8.28 | 82; 113; 145 | 10.50 |
| 42; 65; 118 | 3.12 | 141; 144; 147 | 6.00 | 90; 101; 145 | 6.62 | 80; 138; 150 | 7.43 | 10; 70; 101 | 7.01 | 55; 113; 145 | 10.50 |
| 41; 75; 118 | 3.12 | 141; 144; 146 | 6.00 | 75; 101; 145 | 6.62 | 80; 138; 149 | 7.43 | 22; 64; 101 | 7.01 | 33; 122; 145 | 10.50 |
| 9; 33; 146 | 3.12 | 120; 141; 144 | 6.00 | 54; 101; 145 | 6.62 | 80; 138; 148 | 7.43 | 55; 63; 101 | 7.01 | 121; 122; 145 | 10.50 |
| 58; 90; 127 | 3.12 | 69; 70; 144 | 6.00 | 63; 101; 145 | 6.62 | 4; 148; 149 | 7.43 | 10; 73; 101 | 7.01 | 37; 121; 149 | 10.50 |
| 65; 108; 146 | 3.12 | 6; 36; 144 | 6.00 | 38; 101; 145 | 6.62 | 17; 114; 149 | 7.43 | 22; 82; 101 | 7.01 | 60; 122; 145 | 10.50 |
| 34; 70; 118 | 3.12 | 69; 83; 144 | 6.00 | 77; 101; 145 | 6.62 | 83; 132; 149 | 7.43 | 10; 90; 101 | 7.01 | 29; 122; 145 | 10.50 |
| 58; 110; 127 | 3.12 | 6; 144; 149 | 6.00 | 83; 132; 149 | 6.62 | 8; 114; 141 | 7.43 | 53; 93; 101 | 7.01 | 72; 122; 145 | 10.50 |
| 9; 108; 146 | 3.12 | 36; 84; 144 | 6.00 | 83; 132; 145 | 6.62 | 90; 138; 145 | 7.43 | 10; 14; 101 | 7.01 | 106; 122; 145 | 10.50 |
| 9; 79; 146 | 3.12 | 62; 83; 144 | 6.00 | 29; 101; 145 | 6.62 | 63; 114; 149 | 7.43 | 75; 90; 101 | 7.01 | 10; 122; 145 | 10.50 |
| 95; 103; 127 | 2.04 | 62; 79; 144 | 6.00 | 14; 101; 145 | 6.62 | 68; 80; 145 | 7.43 | 10; 35; 101 | 7.01 | 121; 122; 144 | 10.50 |
| 5; 92; 108 | 2.04 | 62; 69; 144 | 6.00 | 67; 119; 144 | 6.62 | 68; 80; 138 | 7.43 | 54; 81; 101 | 7.01 | 83; 113; 145 | 10.50 |
| 63; 97; 127 | 2.04 | 62; 70; 144 | 6.00 | 81; 101; 145 | 6.62 | 90; 148; 149 | 7.43 | 14; 83; 101 | 7.01 | 85; 113; 145 | 10.50 |
| 4; 127; 142 | 2.04 | 36; 62; 144 | 6.00 | 61; 94; 138 | 6.62 | 61; 90; 114 | 7.43 | 7; 25; 101 | 7.01 | 9; 122; 145 | 10.50 |
| 65; 118; 127 | 2.04 | 62; 68; 144 | 6.00 | 5; 97; 144 | 6.62 | 4; 146; 149 | 7.43 | 70; 90; 101 | 7.01 | 64; 122; 145 | 10.50 |
| 45; 84; 118 | 2.04 | 68; 69; 144 | 6.00 | 62; 82; 145 | 6.62 | 90; 114; 142 | 7.43 | 8; 62; 101 | 7.01 | 13; 113; 145 | 10.50 |
| 33; 83; 127 | 2.04 | 6; 138; 144 | 4.86 | 62; 72; 145 | 6.62 | 77; 121; 141 | 7.43 | 61; 90; 101 | 7.01 | 62; 113; 145 | 10.50 |
| 55; 108; 118 | 2.04 | 79; 85; 144 | 4.86 | 65; 86; 145 | 6.62 | 6; 114; 145 | 7.43 | 7; 20; 101 | 7.01 | 6; 113; 145 | 10.50 |
| 58; 75; 127 | 2.04 | 54; 83; 144 | 4.86 | 62; 138; 145 | 6.62 | 25; 114; 149 | 7.43 | 1; 10; 101 | 7.01 | 38; 113; 145 | 10.50 |
| 102; 110; 127 | 2.04 | 8; 74; 144 | 4.86 | 55; 101; 145 | 6.62 | 129; 146; 149 | 7.43 | 82; 90; 101 | 7.01 | 56; 122; 145 | 10.50 |
| 44; 58; 127 | 2.04 | 68; 126; 144 | 4.86 | 66; 86; 145 | 6.62 | 69; 148; 149 | 7.43 | 10; 88; 101 | 7.01 | 63; 113; 145 | 10.50 |
| 33; 84; 127 | 2.04 | 68; 129; 144 | 4.86 | 56; 101; 145 | 6.62 | 68; 133; 149 | 7.43 | 20; 101; 134 | 7.01 | 114; 122; 145 | 10.50 |
| 9; 61; 118 | 2.04 | 10; 138; 144 | 4.86 | 56; 101; 144 | 6.62 | 83; 133; 149 | 7.43 | 7; 90; 101 | 7.01 | 22; 113; 145 | 10.50 |
| 4; 33; 127 | 2.04 | 68; 114; 144 | 4.86 | 101; 142; 145 | 6.62 | 8; 148; 149 | 7.43 | 10; 55; 101 | 7.01 | 5; 113; 145 | 10.50 |
| 45; 86; 118 | 2.04 | 114; 144; 149 | 4.86 | 101; 135; 145 | 6.62 | 68; 77; 138 | 7.43 | 83; 90; 101 | 7.01 | 122; 138; 141 | 10.50 |
| 90; 103; 127 | 2.04 | 79; 120; 144 | 4.86 | 101; 134; 145 | 6.62 | 90; 114; 145 | 7.43 | 20; 53; 101 | 7.01 | 42; 113; 145 | 10.50 |
| 44; 55; 118 | 2.04 | 68; 119; 144 | 4.86 | 79; 101; 145 | 6.62 | 97; 141; 146 | 7.43 | 20; 76; 101 | 7.01 | 47; 113; 145 | 10.50 |
| 45; 90; 128 | 2.04 | 68; 120; 144 | 4.86 | 49; 101; 144 | 6.62 | 83; 114; 145 | 7.43 | 25; 82; 101 | 7.01 | 76; 113; 145 | 10.50 |
| 48; 74; 127 | 2.04 | 68; 132; 144 | 4.86 | 7; 97; 145 | 5.49 | 6; 114; 150 | 7.43 | 76; 90; 101 | 7.01 | 4; 113; 145 | 10.50 |
| 9; 62; 118 | 2.04 | 54; 84; 144 | 4.86 | 73; 101; 144 | 5.49 | 69; 80; 138 | 7.43 | 53; 101; 129 | 7.01 | 122; 138; 145 | 10.50 |
| 5; 88; 118 | 2.04 | 6; 144; 146 | 4.86 | 73; 101; 145 | 5.49 | 114; 125; 141 | 7.43 | 20; 70; 101 | 7.01 | 8; 113; 145 | 10.50 |
| 13; 127; 142 | 2.04 | 6; 144; 147 | 4.86 | 42; 101; 145 | 5.49 | 96; 146; 148 | 7.43 | 10; 75; 101 | 7.01 | 60; 122; 144 | 10.50 |
| 39; 65; 97 | 2.04 | 69; 72; 144 | 4.86 | 27; 80; 144 | 5.49 | 96; 146; 149 | 7.43 | 6; 20; 101 | 7.01 | 113; 133; 145 | 10.50 |
| 9; 62; 127 | 2.04 | 79; 138; 144 | 4.86 | 66; 134; 145 | 5.49 | 80; 83; 138 | 7.43 | 7; 22; 101 | 7.01 | 44; 113; 145 | 10.50 |
| 60; 90; 127 | 2.04 | 25; 69; 144 | 4.86 | 42; 87; 145 | 5.49 | 96; 148; 149 | 7.43 | 10; 76; 101 | 7.01 | 120; 122; 145 | 10.50 |
| 9; 110; 127 | 2.04 | 53; 121; 144 | 4.86 | 42; 78; 145 | 5.49 | 96; 149; 150 | 7.43 | 22; 61; 101 | 7.01 | 45; 122; 145 | 10.50 |
| 58; 78; 127 | 2.04 | 79; 141; 144 | 4.86 | 66; 119; 144 | 5.49 | 5; 138; 142 | 7.43 | 20; 54; 101 | 7.01 | 7; 113; 145 | 10.50 |
| 7; 63; 127 | 2.04 | 69; 74; 144 | 4.86 | 69; 86; 145 | 5.49 | 53; 83; 114 | 7.43 | 22; 63; 101 | 7.01 | 54; 113; 145 | 10.50 |
| 5; 86; 127 | 2.04 | 69; 75; 144 | 4.86 | 74; 78; 144 | 5.49 | 5; 133; 145 | 7.43 | 7; 63; 101 | 7.01 | 20; 122; 145 | 10.50 |
| 5; 6; 127 | 2.04 | 69; 76; 144 | 4.86 | 72; 79; 145 | 5.49 | 80; 83; 145 | 7.43 | 20; 69; 101 | 7.01 | 67; 122; 145 | 10.50 |
| 44; 54; 127 | 2.04 | 54; 85; 144 | 4.86 | 88; 101; 145 | 5.49 | 4; 114; 145 | 7.43 | 55; 90; 101 | 7.01 | 67; 122; 144 | 10.50 |
| 39; 64; 128 | 2.04 | 68; 138; 144 | 4.86 | 27; 134; 145 | 5.49 | 80; 85; 149 | 7.43 | 10; 54; 101 | 7.01 | 86; 113; 145 | 10.50 |
| 20; 64; 127 | 2.04 | 6; 141; 144 | 4.86 | 66; 101; 145 | 5.49 | 10; 90; 114 | 7.43 | 76; 92; 101 | 7.01 | 7; 122; 145 | 10.50 |
| 65; 72; 104 | 2.04 | 79; 129; 144 | 4.86 | 41; 101; 145 | 5.49 | 70; 80; 145 | 7.43 | 10; 68; 101 | 7.01 | 10; 113; 145 | 10.50 |
| 39; 64; 118 | 2.04 | 68; 144; 149 | 4.86 | 66; 95; 145 | 5.49 | 72; 83; 146 | 7.43 | 10; 62; 101 | 7.01 | 107; 122; 145 | 9.30 |
| 13; 41; 89 | 2.04 | 68; 141; 144 | 4.86 | 87; 101; 145 | 5.49 | 72; 83; 148 | 7.43 | 84; 90; 101 | 7.01 | 71; 121; 145 | 9.30 |
| 7; 90; 127 | 2.04 | 68; 144; 146 | 4.86 | 87; 101; 144 | 5.49 | 70; 114; 145 | 7.43 | 10; 101; 107 | 7.01 | 6; 122; 144 | 9.30 |
| 74; 103; 127 | 2.04 | 79; 132; 144 | 4.86 | 107; 142; 145 | 5.49 | 53; 80; 149 | 7.43 | 10; 82; 101 | 7.01 | 72; 122; 142 | 9.30 |
| 72; 73; 108 | 2.04 | 68; 144; 147 | 4.86 | 74; 142; 145 | 5.49 | 85; 114; 148 | 7.43 | 10; 45; 101 | 7.01 | 6; 122; 145 | 9.30 |
| 83; 108; 127 | 2.04 | 8; 75; 144 | 4.86 | 27; 71; 145 | 5.49 | 53; 80; 148 | 7.43 | 10; 22; 101 | 7.01 | 7; 122; 141 | 9.30 |
| 5; 90; 127 | 2.04 | 68; 70; 144 | 4.86 | 57; 101; 145 | 5.49 | 69; 114; 145 | 7.43 | 6; 22; 101 | 7.01 | 47; 113; 144 | 9.30 |
| 5; 90; 118 | 2.04 | 41; 138; 144 | 4.86 | 89; 101; 145 | 5.49 | 90; 138; 142 | 7.43 | 54; 92; 101 | 7.01 | 113; 122; 144 | 9.30 |
| 48; 75; 127 | 2.04 | 114; 118; 144 | 4.86 | 90; 138; 145 | 5.49 | 29; 114; 149 | 7.43 | 10; 101; 129 | 7.01 | 66; 122; 145 | 9.30 |
| 7; 41; 118 | 2.04 | 68; 76; 144 | 4.86 | 90; 138; 142 | 5.49 | 77; 133; 148 | 7.43 | 54; 90; 101 | 7.01 | 39; 122; 145 | 9.30 |
| 39; 65; 112 | 2.04 | 1; 141; 144 | 4.86 | 90; 134; 145 | 5.49 | 114; 134; 145 | 7.43 | 10; 101; 126 | 7.01 | 43; 122; 144 | 9.30 |
| 20; 65; 127 | 2.04 | 68; 79; 144 | 4.86 | 72; 90; 145 | 5.49 | 83; 120; 145 | 7.43 | 10; 85; 101 | 7.01 | 77; 122; 142 | 9.30 |
| 33; 90; 127 | 2.04 | 1; 129; 144 | 4.86 | 56; 118; 144 | 5.49 | 77; 124; 149 | 7.43 | 10; 61; 101 | 7.01 | 14; 122; 145 | 9.30 |
| 39; 65; 118 | 2.04 | 6; 129; 144 | 4.86 | 90; 132; 145 | 5.49 | 76; 148; 149 | 7.43 | 10; 25; 101 | 7.01 | 122; 133; 145 | 9.30 |
| 5; 89; 127 | 2.04 | 1; 144; 146 | 4.86 | 56; 119; 144 | 5.49 | 77; 80; 114 | 7.43 | 10; 84; 101 | 7.01 | 41; 122; 145 | 9.30 |
| 63; 103; 127 | 2.04 | 68; 72; 144 | 4.86 | 90; 129; 145 | 5.49 | 70; 89; 145 | 7.43 | 10; 79; 101 | 7.01 | 61; 121; 149 | 9.30 |
| 39; 65; 128 | 2.04 | 79; 83; 144 | 4.86 | 44; 101; 145 | 5.49 | 6; 77; 138 | 7.43 | 53; 90; 101 | 7.01 | 85; 122; 145 | 9.30 |
| 65; 127; 142 | 2.04 | 53; 144; 146 | 4.86 | 63; 86; 145 | 5.49 | 125; 138; 141 | 7.43 | 7; 55; 101 | 7.01 | 85; 122; 144 | 9.30 |
| 9; 34; 118 | 2.04 | 53; 144; 147 | 4.86 | 44; 101; 144 | 5.49 | 78; 80; 145 | 7.43 | 20; 63; 101 | 7.01 | 60; 139; 144 | 9.30 |
| 9; 38; 81 | 2.04 | 1; 132; 144 | 4.86 | 26; 101; 145 | 5.49 | 5; 114; 145 | 7.43 | 10; 83; 101 | 7.01 | 75; 121; 142 | 9.30 |
| 45; 73; 118 | 2.04 | 79; 82; 144 | 4.86 | 72; 97; 145 | 5.49 | 3; 141; 148 | 7.43 | 10; 101; 150 | 7.01 | 43; 122; 145 | 9.30 |
| 25; 65; 118 | 2.04 | 53; 144; 149 | 4.86 | 44; 97; 144 | 5.49 | 1; 148; 149 | 7.43 | 61; 92; 101 | 5.82 | 23; 113; 145 | 9.30 |
| 28; 39; 118 | 2.04 | 68; 74; 144 | 4.86 | 56; 141; 145 | 5.49 | 89; 114; 149 | 7.43 | 55; 85; 101 | 5.82 | 34; 113; 129 | 9.30 |
| 63; 84; 127 | 2.04 | 68; 75; 144 | 4.86 | 72; 101; 145 | 5.49 | 72; 114; 149 | 7.43 | 10; 101; 148 | 5.82 | 10; 114; 144 | 9.30 |
| 39; 70; 118 | 2.04 | 41; 144; 146 | 4.86 | 72; 107; 145 | 5.49 | 6; 138; 145 | 7.43 | 19; 67; 101 | 5.82 | 22; 71; 144 | 9.30 |
| 44; 63; 127 | 2.04 | 1; 144; 149 | 4.86 | 33; 101; 145 | 5.49 | 6; 114; 120 | 7.43 | 63; 93; 101 | 5.82 | 41; 122; 144 | 9.30 |
| 45; 72; 126 | 2.04 | 8; 69; 144 | 4.86 | 72; 126; 145 | 5.49 | 90; 133; 145 | 7.43 | 10; 64; 101 | 5.82 | 71; 120; 144 | 9.30 |
| 13; 108; 127 | 2.04 | 54; 75; 144 | 4.86 | 72; 132; 145 | 5.49 | 80; 145; 149 | 7.43 | 52; 63; 101 | 5.82 | 23; 113; 144 | 9.30 |
| 45; 72; 147 | 2.04 | 53; 138; 144 | 4.86 | 72; 142; 145 | 5.49 | 6; 138; 149 | 7.43 | 76; 85; 101 | 5.82 | 66; 122; 144 | 9.30 |
| 58; 72; 127 | 2.04 | 68; 108; 144 | 4.86 | 67; 70; 144 | 5.49 | 133; 148; 149 | 7.43 | 1; 101; 150 | 5.82 | 113; 135; 144 | 9.30 |
| 5; 100; 128 | 2.04 | 10; 144; 149 | 4.86 | 10; 101; 145 | 5.49 | 7; 114; 146 | 7.43 | 55; 79; 101 | 5.82 | 85; 122; 141 | 9.30 |
| 5; 100; 127 | 2.04 | 79; 84; 144 | 4.86 | 10; 101; 144 | 5.49 | 80; 147; 149 | 7.43 | 14; 88; 101 | 5.82 | 72; 122; 144 | 9.30 |
| 9; 126; 127 | 2.04 | 54; 79; 144 | 4.86 | 108; 142; 145 | 5.49 | 5; 80; 138 | 7.43 | 92; 101; 129 | 5.82 | 6; 121; 149 | 9.30 |
| 20; 70; 127 | 2.04 | 114; 141; 144 | 4.86 | 28; 78; 144 | 5.49 | 80; 148; 150 | 7.43 | 22; 79; 101 | 5.82 | 36; 113; 145 | 9.30 |
| 45; 75; 118 | 2.04 | 8; 72; 144 | 4.86 | 65; 101; 144 | 5.49 | 77; 138; 149 | 7.43 | 10; 101; 138 | 5.82 | 5; 122; 145 | 9.30 |
| 73; 90; 127 | 2.04 | 68; 82; 144 | 4.86 | 76; 101; 145 | 5.49 | 80; 149; 150 | 7.43 | 53; 85; 101 | 5.82 | 72; 113; 144 | 9.30 |
| 83; 103; 127 | 2.04 | 68; 83; 144 | 4.86 | 61; 78; 144 | 5.49 | 90; 133; 149 | 7.43 | 92; 101; 126 | 5.82 | 85; 121; 149 | 9.30 |
| 80; 91; 110 | 2.04 | 68; 84; 144 | 4.86 | 85; 101; 145 | 5.49 | 10; 77; 114 | 7.43 | 81; 90; 101 | 5.82 | 72; 122; 141 | 9.30 |
| 13; 110; 127 | 2.04 | 68; 85; 144 | 4.86 | 65; 97; 144 | 5.49 | 90; 114; 129 | 7.43 | 1; 73; 101 | 5.82 | 12; 122; 144 | 9.30 |
| 28; 103; 127 | 2.04 | 54; 68; 144 | 4.86 | 17; 134; 145 | 5.49 | 78; 146; 149 | 7.43 | 8; 20; 101 | 5.82 | 107; 121; 142 | 9.30 |
| 45; 74; 118 | 2.04 | 69; 79; 144 | 4.86 | 65; 95; 145 | 5.49 | 8; 77; 138 | 7.43 | 67; 88; 101 | 5.82 | 22; 121; 142 | 9.30 |
| 7; 44; 127 | 2.04 | 8; 68; 144 | 4.86 | 61; 82; 145 | 5.49 | 89; 114; 145 | 7.43 | 47; 69; 101 | 5.82 | 61; 122; 146 | 9.30 |
| 44; 62; 127 | 2.04 | 54; 70; 144 | 4.86 | 17; 119; 145 | 5.49 | 8; 138; 149 | 7.43 | 22; 83; 101 | 5.82 | 61; 122; 145 | 9.30 |
| 6; 108; 127 | 2.04 | 54; 72; 144 | 4.86 | 61; 87; 144 | 5.49 | 120; 124; 141 | 7.43 | 44; 92; 120 | 5.82 | 61; 122; 144 | 9.30 |
| 45; 72; 118 | 2.04 | 70; 108; 144 | 4.86 | 37; 101; 145 | 5.49 | 89; 148; 149 | 7.43 | 61; 63; 101 | 5.82 | 61; 122; 141 | 9.30 |
| 74; 90; 127 | 2.04 | 120; 144; 149 | 4.86 | 28; 94; 141 | 5.49 | 89; 149; 150 | 7.43 | 10; 100; 101 | 5.82 | 122; 124; 145 | 9.30 |
| 33; 72; 147 | 2.04 | 120; 144; 146 | 4.86 | 17; 101; 145 | 5.49 | 80; 84; 145 | 7.43 | 52; 82; 101 | 5.82 | 36; 113; 144 | 9.30 |
| 9; 127; 142 | 2.04 | 121; 126; 144 | 4.86 | 28; 94; 149 | 5.49 | 84; 133; 149 | 7.43 | 6; 92; 101 | 5.82 | 82; 122; 141 | 9.30 |
| 45; 70; 118 | 2.04 | 70; 114; 144 | 4.86 | 84; 132; 149 | 5.49 | 80; 145; 147 | 7.43 | 22; 84; 101 | 5.82 | 33; 121; 142 | 9.30 |
| 9; 127; 141 | 2.04 | 70; 119; 144 | 4.86 | 10; 66; 145 | 5.49 | 80; 88; 149 | 7.43 | 10; 67; 101 | 5.82 | 73; 122; 145 | 9.30 |

| Squamous epithelial cells | | Stellate cells | | Stromal cells | | Sympathoblasts | | Trophoblast giant cells | | Unipolar brush cells | |
|---|---|---|---|---|---|---|---|---|---|---|---|
| Clusters | Score | Clusters | Score | Clusters | Score | Clusters | Score | Clusters | Score | Clusters | Score |
| 6; 31; 109 | 7.41 | 72; 116; 120 | 9.48 | 38; 72; 121 | 11.03 | 26; 101; 104 | 4.75 | 94; 109; 123 | 5.79 | 3; 39; 99 | 6.17 |
| 31; 109; 140 | 7.41 | 9; 116; 122 | 9.48 | 23; 121; 138 | 11.03 | 62; 101; 104 | 3.60 | 20; 57; 114 | 5.79 | 12; 66; 100 | 5.18 |
| 31; 61; 109 | 7.41 | 6; 116; 120 | 9.48 | 26; 121; 145 | 11.03 | 74; 101; 104 | 3.60 | 10; 25; 109 | 5.79 | 15; 52; 100 | 5.18 |
| 31; 63; 109 | 7.41 | 60; 116; 122 | 9.48 | 72; 82; 121 | 11.03 | 3; 100; 148 | 3.60 | 64; 109; 132 | 5.79 | 1; 84; 98 | 5.18 |
| 6; 82; 109 | 6.03 | 52; 122; 129 | 9.48 | 121; 123; 126 | 11.03 | 32; 101; 108 | 3.60 | 10; 53; 109 | 5.79 | 15; 23; 99 | 5.18 |
| 6; 109; 129 | 6.03 | 10; 116; 121 | 8.32 | 86; 121; 150 | 11.03 | 101; 104; 108 | 3.60 | 66; 109; 132 | 5.79 | 15; 64; 100 | 5.18 |
| 6; 109; 131 | 6.03 | 49; 117; 122 | 8.32 | 82; 121; 123 | 11.03 | 25; 44; 101 | 3.60 | 14; 109; 123 | 5.79 | 15; 64; 99 | 5.18 |
| 7; 8; 109 | 6.03 | 10; 16; 122 | 8.32 | 10; 121; 138 | 11.03 | 32; 38; 101 | 3.60 | 64; 71; 109 | 5.79 | 2; 26; 119 | 5.18 |
| 55; 78; 109 | 6.03 | 8; 116; 122 | 8.32 | 72; 121; 123 | 11.03 | 42; 97; 100 | 3.60 | 62; 71; 109 | 5.79 | 26; 96; 99 | 5.18 |
| 31; 70; 109 | 6.03 | 19; 117; 122 | 8.32 | 38; 85; 121 | 11.03 | 29; 101; 129 | 3.60 | 54; 69; 109 | 4.57 | 12; 26; 37 | 5.18 |
| 31; 82; 109 | 6.03 | 10; 116; 122 | 8.32 | 121; 144; 150 | 9.99 | 81; 101; 104 | 3.60 | 20; 25; 148 | 4.57 | 15; 96; 99 | 5.18 |
| 26; 34; 109 | 6.03 | 10; 116; 120 | 8.32 | 75; 121; 150 | 9.99 | 3; 100; 129 | 3.60 | 20; 25; 147 | 4.57 | 26; 99; 147 | 5.18 |
| 26; 62; 109 | 6.03 | 38; 63; 121 | 8.32 | 54; 121; 149 | 9.99 | 42; 84; 101 | 3.60 | 20; 25; 146 | 4.57 | 12; 63; 100 | 5.18 |
| 25; 75; 109 | 6.03 | 29; 116; 120 | 8.32 | 113; 121; 134 | 9.99 | 19; 97; 146 | 3.60 | 20; 25; 142 | 4.57 | 26; 81; 99 | 5.18 |
| 29; 109; 133 | 6.03 | 7; 116; 120 | 8.32 | 54; 121; 150 | 9.99 | 61; 101; 104 | 3.60 | 64; 123; 142 | 4.57 | 1; 56; 98 | 5.18 |
| 26; 30; 109 | 6.03 | 36; 116; 120 | 8.32 | 9; 121; 138 | 9.99 | 3; 64; 100 | 3.60 | 20; 25; 149 | 4.57 | 4; 26; 81 | 5.18 |
| 34; 75; 109 | 6.03 | 52; 122; 142 | 8.32 | 9; 121; 145 | 9.99 | 63; 72; 101 | 3.60 | 28; 31; 63 | 4.57 | 1; 83; 98 | 5.18 |
| 8; 82; 109 | 6.03 | 116; 120; 129 | 8.32 | 5; 121; 124 | 9.99 | 29; 94; 101 | 3.60 | 62; 109; 123 | 4.57 | 15; 65; 99 | 5.18 |
| 6; 7; 109 | 6.03 | 106; 116; 122 | 8.32 | 5; 121; 129 | 9.99 | 101; 104; 114 | 3.60 | 62; 109; 118 | 4.57 | 1; 98; 148 | 5.18 |
| 55; 109; 131 | 6.03 | 52; 120; 122 | 8.32 | 61; 72; 121 | 9.99 | 7; 88; 101 | 3.60 | 25; 57; 109 | 4.57 | 2; 27; 100 | 5.18 |
| 64; 99; 109 | 6.03 | 10; 122; 129 | 8.32 | 5; 121; 138 | 9.99 | 3; 33; 100 | 3.60 | 29; 109; 123 | 4.57 | 26; 77; 99 | 5.18 |
| 8; 108; 109 | 6.03 | 52; 118; 122 | 8.32 | 113; 121; 144 | 9.99 | 3; 84; 100 | 3.60 | 11; 109; 123 | 4.57 | 1; 98; 147 | 5.18 |
| 34; 109; 131 | 6.03 | 5; 116; 121 | 8.32 | 10; 121; 123 | 9.99 | 53; 63; 101 | 3.60 | 31; 70; 120 | 4.57 | 1; 79; 98 | 5.18 |
| 6; 26; 109 | 6.03 | 44; 116; 122 | 8.32 | 38; 79; 121 | 9.99 | 3; 28; 100 | 3.60 | 31; 71; 79 | 4.57 | 2; 26; 148 | 5.18 |
| 56; 109; 131 | 6.03 | 72; 122; 129 | 8.32 | 10; 90; 121 | 9.99 | 26; 32; 68 | 3.60 | 31; 71; 81 | 4.57 | 4; 15; 26 | 5.18 |
| 90; 109; 131 | 6.03 | 71; 72; 116 | 8.32 | 82; 121; 150 | 9.99 | 32; 85; 101 | 3.60 | 31; 71; 94 | 4.57 | 26; 95; 99 | 5.18 |
| 6; 88; 109 | 6.03 | 33; 116; 120 | 8.32 | 10; 121; 145 | 9.99 | 38; 101; 104 | 3.60 | 31; 71; 98 | 4.57 | 12; 75; 100 | 5.18 |
| 29; 62; 109 | 6.03 | 10; 71; 112 | 7.22 | 29; 121; 149 | 9.99 | 32; 76; 101 | 3.60 | 54; 66; 109 | 4.57 | 6; 26; 99 | 5.18 |
| 6; 10; 109 | 6.03 | 48; 121; 132 | 7.22 | 72; 90; 121 | 9.99 | 34; 94; 102 | 3.60 | 17; 31; 71 | 4.57 | 4; 26; 37 | 5.18 |
| 6; 42; 109 | 6.03 | 48; 121; 129 | 7.22 | 101; 123; 144 | 9.99 | 101; 104; 129 | 3.60 | 54; 66; 123 | 4.57 | 39; 100; 142 | 5.18 |
| 34; 79; 109 | 6.03 | 10; 71; 117 | 7.22 | 53; 121; 129 | 9.99 | 68; 101; 104 | 3.60 | 55; 109; 123 | 4.57 | 2; 26; 81 | 5.18 |
| 8; 59; 109 | 6.03 | 55; 120; 122 | 7.22 | 54; 108; 121 | 9.99 | 26; 32; 92 | 3.60 | 38; 64; 109 | 4.57 | 4; 15; 62 | 5.18 |
| 31; 62; 109 | 6.03 | 13; 121; 122 | 7.22 | 72; 121; 126 | 9.99 | 70; 101; 104 | 3.60 | 57; 80; 109 | 4.57 | 3; 95; 99 | 5.18 |
| 6; 33; 109 | 6.03 | 5; 120; 122 | 7.22 | 61; 108; 121 | 9.99 | 32; 44; 102 | 3.60 | 8; 109; 123 | 4.57 | 26; 94; 99 | 5.18 |
| 29; 66; 109 | 6.03 | 27; 121; 122 | 7.22 | 85; 121; 123 | 9.99 | 32; 100; 104 | 3.60 | 10; 63; 109 | 4.57 | 27; 100; 141 | 5.18 |
| 64; 109; 131 | 6.03 | 120; 122; 129 | 7.22 | 38; 83; 121 | 9.99 | 101; 104; 126 | 3.60 | 17; 20; 31 | 4.57 | 15; 80; 98 | 5.18 |
| 29; 109; 150 | 6.03 | 55; 122; 138 | 7.22 | 29; 121; 138 | 9.99 | 39; 94; 101 | 3.60 | 10; 64; 109 | 4.57 | 2; 39; 99 | 5.18 |
| 8; 33; 109 | 6.03 | 13; 63; 121 | 7.22 | 23; 121; 144 | 9.99 | 29; 101; 146 | 3.60 | 65; 109; 123 | 4.57 | 39; 100; 141 | 5.18 |
| 1; 31; 109 | 6.03 | 52; 83; 122 | 7.22 | 75; 121; 123 | 9.99 | 32; 94; 101 | 3.60 | 66; 75; 109 | 4.57 | 15; 26; 99 | 5.18 |
| 31; 44; 109 | 6.03 | 55; 122; 129 | 7.22 | 29; 121; 123 | 9.99 | 63; 94; 101 | 3.60 | 68; 109; 120 | 4.57 | 12; 54; 100 | 5.18 |
| 31; 109; 150 | 6.03 | 10; 122; 146 | 7.22 | 122; 123; 129 | 9.99 | 32; 88; 101 | 3.60 | 10; 66; 109 | 4.57 | 2; 100; 116 | 5.18 |
| 78; 109; 131 | 6.03 | 116; 122; 142 | 7.22 | 48; 121; 148 | 9.99 | 3; 100; 101 | 3.60 | 68; 109; 132 | 4.57 | 2; 100; 117 | 5.18 |
| 67; 109; 131 | 6.03 | 9; 117; 122 | 7.22 | 79; 121; 150 | 9.99 | 7; 32; 101 | 3.60 | 28; 31; 84 | 4.57 | 23; 100; 141 | 5.18 |
| 70; 109; 131 | 6.03 | 54; 118; 122 | 7.22 | 5; 108; 121 | 9.99 | 32; 101; 126 | 3.60 | 10; 69; 109 | 4.57 | 39; 100; 145 | 5.18 |
| 109; 131; 150 | 6.03 | 117; 120; 129 | 7.22 | 10; 121; 149 | 9.99 | 7; 94; 101 | 3.60 | 38; 66; 109 | 4.57 | 3; 15; 99 | 5.18 |
| 31; 72; 109 | 6.03 | 8; 90; 121 | 7.22 | 54; 121; 138 | 9.99 | 28; 101; 104 | 3.60 | 84; 94; 150 | 4.57 | 15; 28; 99 | 5.18 |
| 74; 109; 131 | 6.03 | 86; 116; 122 | 7.22 | 30; 95; 121 | 9.99 | 57; 101; 104 | 3.60 | 68; 94; 109 | 4.57 | 39; 93; 100 | 4.25 |
| 31; 66; 109 | 6.03 | 5; 122; 146 | 7.22 | 93; 121; 150 | 9.99 | 32; 101; 129 | 3.60 | 31; 90; 134 | 4.57 | 1; 68; 99 | 4.25 |
| 28; 55; 109 | 6.03 | 13; 38; 121 | 7.22 | 26; 121; 150 | 9.99 | 42; 101; 129 | 3.60 | 31; 90; 132 | 4.57 | 1; 68; 98 | 4.25 |
| 7; 41; 109 | 6.03 | 50; 120; 122 | 7.22 | 68; 72; 121 | 9.99 | 32; 101; 132 | 3.60 | 17; 25; 31 | 4.57 | 2; 26; 39 | 4.25 |
| 25; 31; 109 | 6.03 | 38; 120; 121 | 7.22 | 90; 121; 123 | 9.99 | 32; 42; 101 | 3.60 | 20; 25; 31 | 4.57 | 26; 79; 99 | 4.25 |
| 6; 84; 109 | 6.03 | 117; 121; 122 | 7.22 | 84; 121; 150 | 9.99 | 77; 101; 104 | 3.60 | 98; 109; 123 | 4.57 | 2; 26; 149 | 4.25 |
| 6; 94; 109 | 6.03 | 71; 85; 116 | 7.22 | 38; 69; 121 | 9.99 | 32; 33; 101 | 3.60 | 31; 84; 120 | 4.57 | 2; 26; 95 | 4.25 |
| 34; 63; 109 | 6.03 | 7; 122; 129 | 7.22 | 5; 26; 121 | 9.99 | 1; 101; 104 | 3.60 | 27; 71; 109 | 4.57 | 15; 61; 99 | 4.25 |
| 8; 109; 131 | 6.03 | 2; 121; 122 | 7.22 | 120; 123; 145 | 9.99 | 42; 101; 149 | 3.60 | 31; 61; 90 | 4.57 | 1; 68; 78 | 4.25 |
| 6; 14; 109 | 6.03 | 20; 116; 120 | 7.22 | 120; 123; 144 | 9.99 | 61; 72; 101 | 3.60 | 31; 61; 94 | 4.57 | 2; 26; 37 | 4.25 |
| 6; 68; 109 | 6.03 | 20; 116; 122 | 7.22 | 26; 63; 121 | 9.99 | 3; 100; 104 | 3.60 | 31; 62; 71 | 4.57 | 26; 49; 81 | 4.25 |
| 34; 72; 109 | 6.03 | 86; 122; 129 | 7.22 | 68; 121; 150 | 9.99 | 69; 101; 104 | 3.60 | 20; 30; 109 | 4.57 | 15; 83; 99 | 4.25 |
| 6; 57; 109 | 6.03 | 10; 73; 122 | 7.22 | 51; 121; 138 | 9.99 | 3; 70; 100 | 3.60 | 63; 109; 149 | 4.57 | 37; 38; 99 | 4.25 |
| 4; 64; 109 | 6.03 | 60; 104; 122 | 7.22 | 26; 121; 138 | 9.99 | 32; 82; 101 | 3.60 | 10; 31; 109 | 4.57 | 56; 100; 141 | 4.25 |
| 7; 31; 109 | 6.03 | 48; 121; 122 | 7.22 | 90; 121; 150 | 9.99 | 39; 84; 101 | 3.60 | 10; 31; 123 | 4.57 | 63; 100; 141 | 4.25 |
| 29; 75; 109 | 6.03 | 117; 120; 122 | 7.22 | 72; 121; 145 | 9.99 | 34; 100; 104 | 3.60 | 10; 31; 130 | 4.57 | 39; 80; 100 | 4.25 |
| 65; 109; 131 | 6.03 | 52; 61; 122 | 7.22 | 70; 72; 121 | 9.99 | 64; 101; 104 | 3.60 | 57; 69; 109 | 4.57 | 73; 100; 141 | 4.25 |
| 29; 34; 109 | 6.03 | 10; 71; 122 | 7.22 | 29; 83; 121 | 9.99 | 3; 25; 100 | 3.60 | 45; 61; 109 | 4.57 | 24; 100; 118 | 4.25 |
| 6; 63; 109 | 6.03 | 55; 118; 122 | 7.22 | 72; 121; 138 | 9.99 | 25; 101; 129 | 3.60 | 10; 31; 131 | 4.57 | 15; 99; 100 | 4.25 |
| 25; 109; 150 | 6.03 | 52; 117; 122 | 7.22 | 108; 121; 129 | 9.99 | 25; 61; 101 | 3.60 | 17; 76; 109 | 4.57 | 2; 26; 138 | 4.25 |
| 8; 31; 109 | 6.03 | 38; 86; 121 | 7.22 | 108; 121; 145 | 9.99 | 26; 101; 129 | 3.60 | 67; 109; 123 | 4.57 | 2; 26; 108 | 4.25 |
| 5; 31; 109 | 6.03 | 10; 72; 122 | 7.22 | 108; 121; 150 | 9.99 | 32; 101; 150 | 3.60 | 57; 70; 109 | 4.57 | 39; 52; 99 | 4.25 |
| 8; 74; 109 | 6.03 | 72; 122; 135 | 7.22 | 26; 121; 135 | 9.99 | 25; 101; 104 | 3.60 | 31; 63; 120 | 4.57 | 19; 51; 100 | 4.25 |
| 31; 79; 109 | 6.03 | 55; 117; 122 | 7.22 | 76; 121; 150 | 9.99 | 3; 67; 100 | 3.60 | 10; 31; 150 | 4.57 | 15; 52; 96 | 4.25 |
| 7; 82; 109 | 6.03 | 55; 116; 122 | 7.22 | 72; 121; 150 | 9.99 | 26; 94; 101 | 3.60 | 57; 66; 109 | 4.57 | 76; 100; 141 | 4.25 |
| 8; 61; 109 | 6.03 | 44; 116; 120 | 7.22 | 84; 121; 129 | 9.99 | 82; 101; 104 | 3.60 | 10; 31; 70 | 4.57 | 1; 69; 99 | 4.25 |
| 25; 34; 109 | 6.03 | 10; 72; 121 | 7.22 | 5; 121; 144 | 9.99 | 32; 101; 118 | 3.60 | 31; 57; 123 | 4.57 | 15; 29; 78 | 4.25 |
| 26; 31; 109 | 6.03 | 85; 116; 122 | 7.22 | 10; 72; 121 | 9.99 | 43; 97; 100 | 3.60 | 10; 31; 68 | 4.57 | 2; 26; 126 | 4.25 |
| 31; 83; 109 | 6.03 | 33; 86; 122 | 7.22 | 72; 73; 121 | 9.99 | 3; 86; 100 | 3.60 | 66; 84; 109 | 4.57 | 15; 98; 100 | 4.25 |
| 6; 41; 109 | 6.03 | 30; 118; 122 | 7.22 | 72; 75; 121 | 9.99 | 94; 101; 104 | 3.60 | 9; 31; 109 | 4.57 | 2; 26; 73 | 4.25 |
| 8; 63; 109 | 6.03 | 116; 121; 122 | 7.22 | 78; 121; 123 | 9.99 | 3; 69; 100 | 3.60 | 20; 31; 78 | 4.57 | 2; 26; 83 | 4.25 |
| 6; 8; 109 | 6.03 | 51; 94; 121 | 7.22 | 6; 121; 138 | 9.99 | 7; 101; 129 | 3.60 | 20; 31; 71 | 4.57 | 8; 99; 118 | 4.25 |
| 25; 29; 109 | 6.03 | 38; 75; 121 | 7.22 | 26; 38; 121 | 9.99 | 6; 32; 101 | 3.60 | 67; 89; 109 | 4.57 | 100; 135; 141 | 4.25 |
| 70; 99; 109 | 6.03 | 53; 117; 120 | 7.22 | 10; 121; 129 | 9.99 | 84; 101; 104 | 3.60 | 10; 30; 109 | 4.57 | 84; 100; 141 | 4.25 |
| 6; 36; 109 | 6.03 | 54; 122; 129 | 7.22 | 6; 121; 123 | 9.99 | 33; 61; 101 | 3.60 | 20; 94; 149 | 4.57 | 23; 43; 100 | 4.25 |
| 8; 41; 109 | 6.03 | 30; 116; 120 | 7.22 | 4; 121; 144 | 9.99 | 4; 100; 104 | 3.60 | 31; 57; 109 | 4.57 | 26; 79; 100 | 4.25 |
| 28; 31; 109 | 6.03 | 90; 121; 122 | 7.22 | 83; 121; 150 | 9.99 | 32; 35; 101 | 3.60 | 10; 31; 64 | 4.57 | 4; 26; 119 | 4.25 |
| 7; 74; 109 | 6.03 | 20; 95; 122 | 7.22 | 63; 121; 138 | 9.99 | 3; 63; 100 | 3.60 | 10; 31; 66 | 4.57 | 2; 26; 88 | 4.25 |
| 31; 84; 109 | 6.03 | 16; 30; 122 | 7.22 | 71; 123; 144 | 9.99 | 101; 104; 149 | 3.60 | 54; 61; 109 | 4.57 | 37; 56; 99 | 4.25 |
| 29; 55; 109 | 6.03 | 10; 61; 122 | 7.22 | 83; 121; 129 | 9.99 | 7; 25; 101 | 3.60 | 57; 71; 109 | 4.57 | 6; 12; 100 | 4.25 |
| 34; 84; 109 | 6.03 | 113; 116; 122 | 7.22 | 38; 53; 121 | 9.99 | 100; 101; 104 | 3.60 | 31; 66; 132 | 4.57 | 2; 15; 26 | 4.25 |
| 8; 42; 109 | 6.03 | 56; 116; 122 | 7.22 | 56; 83; 121 | 9.99 | 32; 72; 101 | 3.60 | 31; 66; 134 | 4.57 | 12; 62; 100 | 4.25 |
| 8; 99; 109 | 6.03 | 37; 90; 121 | 7.22 | 36; 121; 144 | 9.99 | 11; 100; 104 | 3.60 | 63; 79; 109 | 4.57 | 15; 57; 99 | 4.25 |
| 10; 31; 141 | 6.03 | 20; 72; 122 | 7.22 | 5; 29; 121 | 9.99 | 61; 94; 101 | 3.60 | 3; 109; 123 | 4.57 | 12; 87; 100 | 4.25 |
| 31; 69; 109 | 6.03 | 67; 116; 122 | 7.22 | 63; 108; 121 | 9.99 | 26; 63; 77 | 2.56 | 77; 109; 123 | 4.57 | 26; 98; 100 | 4.25 |
| 10; 31; 114 | 6.03 | 56; 116; 120 | 7.22 | 53; 121; 138 | 9.99 | 86; 88; 101 | 2.56 | 68; 71; 109 | 4.57 | 15; 69; 99 | 4.25 |
| 55; 109; 150 | 6.03 | 10; 63; 121 | 7.22 | 29; 72; 121 | 9.99 | 54; 87; 101 | 2.56 | 63; 71; 109 | 4.57 | 86; 100; 141 | 4.25 |
| 31; 75; 109 | 6.03 | 116; 122; 129 | 7.22 | 121; 129; 150 | 9.99 | 34; 100; 146 | 2.56 | 63; 68; 109 | 4.57 | 4; 39; 99 | 4.25 |
| 25; 66; 109 | 6.03 | 86; 94; 121 | 7.22 | 73; 121; 123 | 9.99 | 3; 77; 100 | 2.56 | 63; 66; 109 | 4.57 | 26; 82; 99 | 4.25 |
| 26; 69; 109 | 6.03 | 10; 33; 122 | 7.22 | 121; 123; 135 | 9.99 | 12; 32; 147 | 2.56 | 48; 109; 123 | 4.57 | 15; 84; 99 | 4.25 |
| 62; 109; 131 | 6.03 | 10; 92; 121 | 7.22 | 72; 84; 121 | 9.99 | 53; 94; 101 | 2.56 | 31; 68; 71 | 4.57 | 1; 63; 98 | 4.25 |
| 10; 31; 109 | 6.03 | 61; 94; 121 | 7.22 | 38; 90; 121 | 9.99 | 77; 88; 101 | 2.56 | 31; 68; 120 | 4.57 | 2; 15; 64 | 4.25 |
| 6; 74; 109 | 6.03 | 116; 120; 122 | 7.22 | 121; 123; 129 | 9.99 | 77; 100; 104 | 2.56 | 66; 79; 109 | 4.57 | 100; 141; 147 | 4.25 |
| 31; 70; 77 | 6.03 | 120; 122; 135 | 7.22 | 72; 83; 121 | 9.99 | 32; 68; 116 | 2.56 | 31; 94; 123 | 4.57 | 4; 26; 70 | 4.25 |

| Ureteric bud cells | | Vascular endothelial cells | | Visceral neurons | |
|---|---|---|---|---|---|
| Clusters | Score | Clusters | Score | Clusters | Score |
| 25; 34; 147 | 6.62 | 69; 124; 132 | 34.04 | 26; 68; 82 | 5.79 |
| 34; 35; 81 | 6.62 | 29; 124; 150 | 34.04 | 26; 75; 101 | 5.79 |
| 5; 106; 110 | 6.62 | 53; 81; 124 | 34.04 | 26; 63; 147 | 5.79 |
| 6; 107; 147 | 5.38 | 51; 124; 148 | 32.44 | 5; 100; 119 | 5.79 |
| 15; 106; 108 | 5.38 | 70; 74; 124 | 32.44 | 35; 44; 100 | 5.79 |
| 15; 35; 106 | 5.38 | 72; 124; 150 | 32.44 | 5; 26; 101 | 5.79 |
| 105; 106; 110 | 5.38 | 72; 81; 124 | 32.44 | 5; 97; 100 | 5.79 |
| 34; 35; 147 | 5.38 | 61; 72; 124 | 32.44 | 26; 68; 75 | 5.79 |
| 74; 107; 109 | 5.38 | 124; 142; 149 | 32.44 | 26; 63; 101 | 5.79 |
| 34; 35; 150 | 5.38 | 10; 83; 124 | 32.44 | 62; 100; 119 | 5.79 |
| 25; 74; 147 | 5.38 | 53; 124; 132 | 32.44 | 26; 68; 83 | 5.79 |
| 18; 107; 114 | 5.38 | 70; 75; 124 | 32.44 | 26; 63; 68 | 5.79 |
| 8; 106; 110 | 5.38 | 75; 124; 150 | 32.44 | 63; 72; 101 | 4.57 |
| 15; 62; 106 | 5.38 | 37; 61; 124 | 32.44 | 5; 82; 100 | 4.57 |
| 15; 84; 106 | 5.38 | 29; 37; 124 | 32.44 | 62; 70; 100 | 4.57 |
| 15; 70; 106 | 5.38 | 5; 81; 124 | 32.44 | 26; 84; 101 | 4.57 |
| 25; 33; 147 | 5.38 | 26; 124; 150 | 32.44 | 29; 68; 101 | 4.57 |
| 85; 107; 147 | 5.38 | 64; 124; 150 | 32.44 | 35; 68; 100 | 4.57 |
| 30; 32; 109 | 5.38 | 29; 124; 149 | 32.44 | 5; 83; 100 | 4.57 |
| 19; 106; 110 | 5.38 | 36; 124; 135 | 32.44 | 26; 70; 101 | 4.57 |
| 6; 15; 106 | 5.38 | 53; 61; 124 | 32.44 | 62; 83; 100 | 4.57 |
| 15; 69; 106 | 5.38 | 44; 75; 124 | 32.44 | 26; 82; 101 | 4.57 |
| 25; 75; 147 | 5.38 | 65; 72; 124 | 32.44 | 44; 53; 100 | 4.57 |
| 16; 107; 109 | 5.38 | 53; 68; 124 | 30.87 | 62; 100; 147 | 4.57 |
| 25; 35; 147 | 5.38 | 29; 38; 124 | 30.87 | 6; 62; 100 | 4.57 |
| 15; 74; 106 | 5.38 | 10; 84; 124 | 30.87 | 9; 100; 119 | 4.57 |
| 35; 81; 107 | 5.38 | 70; 124; 132 | 30.87 | 62; 64; 100 | 4.57 |
| 15; 18; 106 | 5.38 | 53; 65; 124 | 30.87 | 64; 92; 101 | 4.57 |
| 15; 85; 106 | 5.38 | 60; 124; 148 | 30.87 | 62; 82; 100 | 4.57 |
| 15; 81; 106 | 5.38 | 69; 72; 124 | 30.87 | 62; 100; 126 | 4.57 |
| 19; 85; 109 | 5.38 | 53; 124; 148 | 30.87 | 26; 68; 101 | 4.57 |
| 9; 34; 109 | 5.38 | 72; 124; 146 | 30.87 | 35; 87; 100 | 4.57 |
| 74; 81; 107 | 5.38 | 70; 124; 126 | 30.87 | 65; 100; 119 | 4.57 |
| 25; 147; 150 | 5.38 | 6; 72; 124 | 30.87 | 5; 10; 100 | 4.57 |
| 15; 83; 106 | 5.38 | 72; 75; 124 | 30.87 | 9; 100; 118 | 4.57 |
| 15; 79; 106 | 5.38 | 37; 79; 124 | 30.87 | 64; 97; 100 | 4.57 |
| 35; 107; 140 | 5.38 | 54; 81; 124 | 30.87 | 44; 75; 100 | 4.57 |
| 15; 65; 106 | 5.38 | 54; 85; 124 | 30.87 | 5; 35; 100 | 4.57 |
| 15; 106; 150 | 5.38 | 37; 82; 124 | 30.87 | 6; 100; 147 | 4.57 |
| 19; 109; 147 | 5.38 | 37; 83; 124 | 30.87 | 26; 72; 101 | 4.57 |
| 15; 106; 149 | 5.38 | 44; 124; 150 | 30.87 | 35; 70; 100 | 4.57 |
| 15; 106; 147 | 5.38 | 53; 73; 124 | 30.87 | 26; 74; 101 | 4.57 |
| 15; 64; 106 | 5.38 | 72; 124; 132 | 30.87 | 5; 100; 118 | 4.57 |
| 84; 107; 147 | 5.38 | 72; 124; 134 | 30.87 | 35; 61; 100 | 4.57 |
| 19; 35; 109 | 5.38 | 53; 85; 124 | 30.87 | 38; 62; 100 | 4.57 |
| 75; 107; 147 | 5.38 | 53; 84; 124 | 30.87 | 5; 100; 112 | 4.57 |
| 34; 35; 85 | 5.38 | 53; 79; 124 | 30.87 | 5; 6; 100 | 4.57 |
| 7; 106; 110 | 4.23 | 79; 81; 124 | 30.87 | 5; 92; 100 | 4.57 |
| 32; 37; 109 | 4.23 | 29; 124; 132 | 30.87 | 5; 92; 101 | 4.57 |
| 73; 81; 106 | 4.23 | 68; 72; 124 | 30.87 | 62; 68; 100 | 4.57 |
| 5; 8; 110 | 4.23 | 70; 124; 146 | 30.87 | 44; 100; 119 | 4.57 |
| 34; 35; 108 | 4.23 | 51; 124; 134 | 30.87 | 64; 100; 119 | 4.57 |
| 25; 84; 147 | 4.23 | 36; 53; 124 | 30.87 | 63; 94; 101 | 4.57 |
| 31; 85; 112 | 4.23 | 64; 124; 126 | 30.87 | 5; 90; 100 | 4.57 |
| 19; 109; 148 | 4.23 | 29; 83; 124 | 30.87 | 62; 90; 100 | 4.57 |
| 88; 106; 110 | 4.23 | 51; 124; 146 | 30.87 | 44; 100; 147 | 4.57 |
| 29; 106; 110 | 4.23 | 26; 70; 124 | 30.87 | 10; 68; 100 | 4.57 |
| 32; 34; 109 | 4.23 | 51; 124; 149 | 30.87 | 62; 84; 100 | 4.57 |
| 70; 104; 109 | 4.23 | 29; 84; 124 | 30.87 | 26; 73; 101 | 4.57 |
| 32; 74; 109 | 4.23 | 18; 124; 133 | 30.87 | 5; 44; 100 | 4.57 |
| 35; 133; 147 | 4.23 | 64; 124; 146 | 30.87 | 5; 38; 100 | 4.57 |
| 25; 34; 35 | 4.23 | 5; 75; 124 | 30.87 | 44; 70; 100 | 4.57 |
| 106; 110; 125 | 4.23 | 18; 124; 142 | 30.87 | 87; 100; 147 | 4.57 |
| 25; 81; 106 | 4.23 | 17; 124; 135 | 30.87 | 5; 100; 147 | 4.57 |
| 6; 17; 110 | 4.23 | 75; 124; 134 | 30.87 | 10; 87; 100 | 4.57 |
| 18; 106; 110 | 4.23 | 26; 124; 134 | 30.87 | 64; 100; 147 | 4.57 |
| 35; 107; 148 | 4.23 | 37; 124; 149 | 30.87 | 63; 100; 119 | 4.57 |
| 70; 103; 107 | 4.23 | 37; 124; 146 | 30.87 | 5; 70; 100 | 4.57 |
| 32; 103; 109 | 4.23 | 37; 124; 134 | 30.87 | 35; 82; 100 | 4.57 |
| 14; 109; 114 | 4.23 | 64; 85; 124 | 30.87 | 5; 62; 100 | 4.57 |
| 15; 66; 106 | 4.23 | 29; 124; 126 | 30.87 | 9; 97; 100 | 4.57 |
| 19; 109; 146 | 4.23 | 70; 124; 150 | 30.87 | 62; 97; 100 | 4.57 |
| 28; 106; 110 | 4.23 | 75; 79; 124 | 30.87 | 65; 100; 147 | 4.57 |
| 37; 81; 106 | 4.23 | 64; 81; 124 | 30.87 | 10; 44; 100 | 4.57 |
| 11; 106; 115 | 4.23 | 33; 69; 124 | 30.87 | 6; 100; 119 | 4.57 |
| 34; 35; 88 | 4.23 | 36; 72; 124 | 30.87 | 63; 100; 147 | 4.57 |
| 106; 110; 126 | 4.23 | 35; 124; 142 | 30.87 | 64; 90; 100 | 4.57 |
| 106; 107; 110 | 4.23 | 82; 124; 150 | 30.87 | 44; 63; 100 | 4.57 |
| 16; 34; 87 | 4.23 | 68; 124; 132 | 30.87 | 26; 64; 101 | 4.57 |
| 5; 76; 110 | 4.23 | 37; 124; 126 | 30.87 | 44; 84; 100 | 4.57 |
| 54; 107; 109 | 4.23 | 22; 124; 145 | 30.87 | 10; 62; 100 | 4.57 |
| 5; 33; 110 | 4.23 | 64; 108; 124 | 30.87 | 26; 63; 119 | 4.57 |
| 15; 88; 106 | 4.23 | 96; 124; 135 | 30.87 | 6; 35; 100 | 4.57 |
| 34; 35; 93 | 4.23 | 26; 72; 124 | 30.87 | 63; 75; 101 | 4.57 |
| 35; 107; 142 | 4.23 | 37; 77; 124 | 30.87 | 44; 61; 100 | 4.57 |
| 106; 110; 148 | 4.23 | 53; 70; 124 | 30.87 | 44; 82; 100 | 4.57 |
| 47; 106; 110 | 4.23 | 70; 72; 124 | 30.87 | 5; 64; 100 | 4.57 |
| 15; 28; 106 | 4.23 | 53; 124; 147 | 30.87 | 26; 101; 143 | 4.57 |
| 106; 110; 150 | 4.23 | 72; 83; 124 | 30.87 | 35; 65; 100 | 4.57 |
| 105; 106; 109 | 4.23 | 72; 84; 124 | 30.87 | 5; 68; 100 | 4.57 |
| 5; 17; 110 | 4.23 | 37; 72; 124 | 30.87 | 62; 85; 100 | 4.57 |
| 106; 110; 147 | 4.23 | 86; 124; 150 | 30.87 | 10; 100; 119 | 4.57 |
| 19; 109; 150 | 4.23 | 72; 85; 124 | 30.87 | 26; 68; 72 | 4.57 |
| 86; 107; 109 | 4.23 | 72; 79; 124 | 30.87 | 26; 68; 73 | 4.57 |
| 74; 84; 107 | 4.23 | 7; 124; 150 | 30.87 | 100; 101; 119 | 4.57 |
| 15; 87; 106 | 4.23 | 75; 83; 124 | 30.87 | 73; 87; 100 | 4.57 |
| 62; 106; 110 | 4.23 | 124; 142; 150 | 30.87 | 44; 79; 100 | 4.57 |
| 77; 107; 109 | 4.23 | 36; 124; 150 | 30.87 | 44; 93; 100 | 4.57 |
| 106; 110; 132 | 4.23 | 37; 53; 124 | 30.87 | 39; 68; 84 | 3.45 |
| 9; 78; 109 | 4.23 | 35; 44; 124 | 30.87 | 25; 72; 100 | 3.45 |

[0784] Various modifications and variations of the described methods, pharmaceutical compositions, and kits of the invention can be apparent to those skilled in the art without departing from the scope and spirit of the invention. Although the invention has been described in connection with specific embodiments, it can be understood that it is capable of further modifications and that the invention as claimed should not be unduly limited to such specific embodiments. Indeed, various modifications of the described modes for carrying out the invention that are obvious to those skilled in the art are intended to be within the scope of the invention. This application is intended to cover any variations, uses, or adaptations of the invention following, in general, the principles of the invention and including such departures from the present disclosure come within known customary practice within the art to which the invention pertains and may be applied to the essential features herein before set forth.

The application's sequence listing, which the Patent Office published only in electronic form, follows.

SEQUENCE LISTING (10809 sequences)

SEQ ID NO: 1 - DNA, 24 bp, synthetic construct
  misc_feature 1..24: note = Synthetic
  source 1..24: mol_type = other DNA
gacgataggttgtgagacgtagaa

SEQ ID NO: 2 - DNA, 24 bp, synthetic construct
  misc_feature 1..24: note = Synthetic
  source 1..24: mol_type = other DNA
atccctctggattgcgcataggac

SEQ ID NO: 3 - DNA, 24 bp, synthetic construct
  misc_feature 1..24: note = Synthetic
  source 1..24: mol_type = other DNA
tcgacgacgctcagcggcctatca

SEQ ID NO: 4 - DNA, 24 bp, synthetic construct
  misc_feature 1..24: note = Synthetic
  source 1..24: mol_type = other DNA
ggttggatcttgtagggagctcgt

SEQ ID NO: 5 - DNA, 24 bp, synthetic construct
  misc_feature 1..24: note = Synthetic
  source 1..24: mol_type = other DNA
ctttcttgcagtcgcaccgagctc

SEQ ID NO: 6 - DNA, 24 bp, synthetic construct
  misc_feature 1..24: note = Synthetic
  source 1..24: mol_type = other DNA
ggttagaaattcacgttcctatac

SEQ ID NO: 7 - DNA, 24 bp, synthetic construct
  misc_feature 1..24: note = Synthetic
  source 1..24: mol_type = other DNA
gacttgggaactccgcagagactg

SEQ ID NO: 8 - DNA, 24 bp, synthetic construct
  misc_feature 1..24: note = Synthetic
  source 1..24: mol_type = other DNA
gactagtatccttcatagctcctc

SEQ ID NO: 9 - DNA, 24 bp, synthetic construct
  misc_feature 1..24: note = Synthetic
  source 1..24: mol_type = other DNA
actccctccaaggtgagcgtcctt

SEQ ID NO: 10 - DNA, 24 bp, synthetic construct
  misc_feature 1..24: note = Synthetic
  source 1..24: mol_type = other DNA
acgctgaaatgacaatttccggaa

SEQ ID NO: 11 - DNA, 24 bp, synthetic construct
  misc_feature 1..24: note = Synthetic
  source 1..24: mol_type = other DNA
cgtatttcgcacccggaaagggtg

SEQ ID NO: 12 - DNA, 24 bp, synthetic construct
  misc_feature 1..24: note = Synthetic
  source 1..24: mol_type = other DNA
tcggccctgccatcacttcatagt

SEQ ID NO: 13 - DNA, 24 bp, synthetic construct
  misc_feature 1..24: note = Synthetic
  source 1..24: mol_type = other DNA
tgcaagagccacggagtttatgtc

SEQ ID NO: 14 - DNA, 24 bp, synthetic construct
  misc_feature 1..24: note = Synthetic
  source 1..24: mol_type = other DNA
gctaataagtgtccgagcactcac

SEQ ID NO: 15 - DNA, 24 bp, synthetic construct
  misc_feature 1..24: note = Synthetic
  source 1..24: mol_type = other DNA
cagtggaaacctgacatttactta

SEQ ID NO: 16 - DNA, 24 bp, synthetic construct
  misc_feature 1..24: note = Synthetic
  source 1..24: mol_type = other DNA
agcgctcgcacgcgcgtatccatc

SEQ ID NO: 17 - DNA, 24 bp, synthetic construct
  misc_feature 1..24: note = Synthetic
  source 1..24: mol_type = other DNA
ttccctgctgtcatgctcaccatg

SEQ ID NO: 18 - DNA, 24 bp, synthetic construct
  misc_feature 1..24: note = Synthetic
  source 1..24: mol_type = other DNA
actcagatactgggccttccttct

SEQ ID NO: 19 - DNA, 24 bp, synthetic construct
  misc_feature 1..24: note = Synthetic
  source 1..24: mol_type = other DNA
ggtaattattgggcgttatctcca

SEQ ID NO: 20 - DNA, 24 bp, synthetic construct
  misc_feature 1..24: note = Synthetic
  source 1..24: mol_type = other DNA
gacttgttacatcgttccataggc

SEQ ID NO: 21 - DNA, 24 bp, synthetic construct
  misc_feature 1..24: note = Synthetic
  source 1..24: mol_type = other DNA
tactggagccggctacagatgctc

SEQ ID NO: 22 - DNA, 24 bp, synthetic construct
  misc_feature 1..24: note = Synthetic
  source 1..24: mol_type = other DNA
ttccttatacgaacgccgattgat

SEQ ID NO: 23 - DNA, 24 bp, synthetic construct
  misc_feature 1..24: note = Synthetic
  source 1..24: mol_type = other DNA
gccgccactttcagcctccgacgc

SEQ ID NO: 24 - DNA, 24 bp, synthetic construct
  misc_feature 1..24: note = Synthetic
  source 1..24: mol_type = other DNA
atcacattgaagtcatttacacct

SEQ ID NO: 25 - DNA, 24 bp, synthetic construct
  misc_feature 1..24: note = Synthetic
  source 1..24: mol_type = other DNA
cgtgaacctcaagtcaagccaaac

SEQ ID NO: 26 - DNA, 24 bp, synthetic construct
  misc_feature 1..24: note = Synthetic
  source 1..24: mol_type = other DNA
ctagcccgaaggacacctattccc

SEQ ID NO: 27 - DNA, 24 bp, synthetic construct
  misc_feature 1..24: note = Synthetic
  source 1..24: mol_type = other DNA
tgggttgttccgttactcatgaag

SEQ ID NO: 28 - DNA, 24 bp, synthetic construct
  misc_feature 1..24: note = Synthetic
  source 1..24: mol_type = other DNA
tccgaaagccttgttattgaaatt

SEQ ID NO: 29 - DNA, 24 bp, synthetic construct
  misc_feature 1..24: note = Synthetic
  source 1..24: mol_type = other DNA
tagcggaagtctaactgacttcat

SEQ ID NO: 30 - DNA, 24 bp, synthetic construct
  misc_feature 1..24: note = Synthetic
  source 1..24: mol_type = other DNA
cgtttcttatacctccggccatgg

SEQ ID NO: 31 - DNA, 24 bp, synthetic construct
  misc_feature 1..24: note = Synthetic
  source 1..24: mol_type = other DNA
ggcgccgggtttgcaatttccctg

SEQ ID NO: 32 - DNA, 24 bp, synthetic construct
  misc_feature 1..24: note = Synthetic
  source 1..24: mol_type = other DNA
cgcatatcgatcctgatcccgagc

SEQ ID NO: 33 - DNA, 24 bp, synthetic construct
  misc_feature 1..24: note = Synthetic
  source 1..24: mol_type = other DNA
atctcctgggcccgaagttgacga

SEQ ID NO: 34 - DNA, 24 bp, synthetic construct
  misc_feature 1..24: note = Synthetic
  source 1..24: mol_type = other DNA
agtgtcgagctatatgcagccgaa

SEQ ID NO: 35 - DNA, 24 bp, synthetic construct
  misc_feature 1..24: note = Synthetic
  source 1..24: mol_type = other DNA
ttcatggtgctcatgtcgtatttc

SEQ ID NO: 36 - DNA, 24 bp, synthetic construct
  misc_feature 1..24: note = Synthetic
  source 1..24: mol_type = other DNA
aggccattattgggtcccgtgatt

SEQ ID NO: 37 - DNA, 24 bp, synthetic construct
  misc_feature 1..24: note = Synthetic
  source 1..24: mol_type = other DNA
tgcctgagttaaagacgcagctgc

SEQ ID NO: 38 - DNA, 24 bp, synthetic construct
  misc_feature 1..24: note = Synthetic
  source 1..24: mol_type = other DNA
agaagtccgaactatacttggatc

SEQ ID NO: 39 - DNA, 24 bp, synthetic construct
  misc_feature 1..24: note = Synthetic
  source 1..24: mol_type = other DNA
atggcttcgtgactgtgattatcg

SEQ ID NO: 40 - DNA, 24 bp, synthetic construct
  misc_feature 1..24: note = Synthetic
  source 1..24: mol_type = other DNA
ccttaatgatgcgaagggaaatat

SEQ ID NO: 41 - DNA, 24 bp, synthetic construct
  misc_feature 1..24: note = Synthetic
  source 1..24: mol_type = other DNA
agcaccaatgatcgccgctagatg

SEQ ID NO: 42 - DNA, 24 bp, synthetic construct
  misc_feature 1..24: note = Synthetic
  source 1..24: mol_type = other DNA
accgtaggagcacgttgcgatgaa

SEQ ID NO: 43 - DNA, 24 bp, synthetic construct
  misc_feature 1..24: note = Synthetic
  source 1..24: mol_type = other DNA
acatgaactattaaacgaaacgca

SEQ ID NO: 44 - DNA, 24 bp, synthetic construct
  misc_feature 1..24: note = Synthetic
  source 1..24: mol_type = other DNA
tccaggtcaccggcgcggcagaaa

SEQ ID NO: 45 - DNA, 24 bp, synthetic construct
  misc_feature 1..24: note = Synthetic
  source 1..24: mol_type = other DNA
gtggtgctaacatttagtcgctag

SEQ ID NO: 46 - DNA, 24 bp, synthetic construct
  misc_feature 1..24: note = Synthetic
  source 1..24: mol_type = other DNA
gctcacgcgggattaatgcgtcgt

SEQ ID NO: 47 - DNA, 24 bp, synthetic construct
  misc_feature 1..24: note = Synthetic
  source 1..24: mol_type = other DNA
tcgcacttcttattctgaggcccg

SEQ ID NO: 48 - DNA, 24 bp, synthetic construct
  misc_feature 1..24: note = Synthetic
  source 1..24: mol_type = other DNA
gctctttcatttcctagctcccga

SEQ ID NO: 49 - DNA, 24 bp, synthetic construct
  misc_feature 1..24: note = Synthetic
  source 1..24: mol_type = other DNA
gttatttggaagacattcaccttg

SEQ ID NO: 50 - DNA, 24 bp, synthetic construct
  misc_feature 1..24: note = Synthetic
  source 1..24: mol_type = other DNA
ttcaatccgttccctcgcacagtg

SEQ ID NO: 51 - DNA, 24 bp, synthetic construct
  misc_feature 1..24: note = Synthetic
  source 1..24: mol_type = other DNA
actggttcacgcagaaactggttc

SEQ ID NO: 52 - DNA, 24 bp, synthetic construct
  misc_feature 1..24: note = Synthetic
  source 1..24: mol_type = other DNA
aacggcgaacgagacagaccaacg

SEQ ID NO: 53 - DNA, 24 bp, synthetic construct
  misc_feature 1..24: note = Synthetic
  source 1..24: mol_type = other DNA
ataggcagaatctacgagaggcta

SEQ ID NO: 54 - DNA, 24 bp, synthetic construct
  misc_feature 1..24: note = Synthetic
  source 1..24: mol_type = other DNA
ctagccatcttccgcaatgggacc

SEQ ID NO: 55 - DNA, 24 bp, synthetic construct
  misc_feature 1..24: note = Synthetic
  source 1..24: mol_type = other DNA
cgaattatatttgattaactgtct

SEQ ID NO: 56 - DNA, 24 bp, synthetic construct
  misc_feature 1..24: note = Synthetic
  source 1..24: mol_type = other DNA
tcgagcagaaggtgagtgtcggac

SEQ ID NO: 57 - DNA, 24 bp, synthetic construct
  misc_feature 1..24: note = Synthetic
  source 1..24: mol_type = other DNA
acgcttggactgcacacggagcgt

SEQ ID NO: 58 - DNA, 24 bp, synthetic construct
  misc_feature 1..24: note = Synthetic
  source 1..24: mol_type = other DNA
gacgaatgaaacgcaggaccgaga

SEQ ID NO: 59 - DNA, 24 bp, synthetic construct
  misc_feature 1..24: note = Synthetic
  source 1..24: mol_type = other DNA
gatacgtggtcacgtcgtcccaca

SEQ ID NO: 60 - DNA, 24 bp, synthetic construct
  misc_feature 1..24: note = Synthetic
  source 1..24: mol_type = other DNA
ggacgccaacacctactgtcatag

SEQ ID NO: 61 - DNA, 24 bp, synthetic construct
  misc_feature 1..24: note = Synthetic
  source 1..24: mol_type = other DNA
gcttcataaactagtatcggcaga

SEQ ID NO: 62 - DNA, 24 bp, synthetic construct
  misc_feature 1..24: note = Synthetic
  source 1..24: mol_type = other DNA
gaccgttgctggttgtacatgcgc

SEQ ID NO: 63 - DNA, 24 bp, synthetic construct
  misc_feature 1..24: note = Synthetic
  source 1..24: mol_type = other DNA
ctgagacacgtactccgggttcac

SEQ ID NO: 64 - DNA, 24 bp, synthetic construct
  misc_feature 1..24: note = Synthetic
  source 1..24: mol_type = other DNA
agtaacttcagtgatttaacattc

SEQ ID NO: 65 - DNA, 24 bp, synthetic construct
  misc_feature 1..24: note = Synthetic
  source 1..24: mol_type = other DNA
tcacaaaccggagactgagatctt

SEQ ID NO: 66 - DNA, 24 bp, synthetic construct
  misc_feature 1..24: note = Synthetic
  source 1..24: mol_type = other DNA
ccatcagatcctacgccctcgctc

SEQ ID NO: 67 - DNA, 24 bp, synthetic construct
  misc_feature 1..24: note = Synthetic
  source 1..24: mol_type = other DNA
agcgcggcgcacaacatgctaact

SEQ ID NO: 68 - DNA, 24 bp, synthetic construct
  misc_feature 1..24: note = Synthetic
  source 1..24: mol_type = other DNA
agcatgacatagtaccggaagcca

SEQ ID NO: 69 - DNA, 24 bp, synthetic construct
  misc_feature 1..24: note = Synthetic
  source 1..24: mol_type = other DNA
attatagcacatccgctacttagt

SEQ ID NO: 70 - DNA, 24 bp, synthetic construct
  misc_feature 1..24: note = Synthetic
  source 1..24: mol_type = other DNA
gagtcctcgtaatgcgacacagtc

SEQ ID NO: 71 - DNA, 24 bp, synthetic construct
  misc_feature 1..24: note = Synthetic
  source 1..24: mol_type = other DNA
cttattatgctattcgcctgaaag

SEQ ID NO: 72 - DNA, 24 bp, synthetic construct
  misc_feature 1..24: note = Synthetic
  source 1..24: mol_type = other DNA
cgtaggcagttagggctgtctaga

SEQ ID NO: 73 - DNA, 24 bp, synthetic construct
  misc_feature 1..24: note = Synthetic
  source 1..24: mol_type = other DNA
agagttgttgagctgtcatgtgca

SEQ ID NO: 74 - DNA, 24 bp, synthetic construct
  misc_feature 1..24: note = Synthetic
  source 1..24: mol_type = other DNA
gtgcgatactacatgtaccgtata

SEQ ID NO: 75 - DNA, 24 bp, synthetic construct
  misc_feature 1..24: note = Synthetic
  source 1..24: mol_type = other DNA
agtagtcatcttatctgttcagtc

SEQ ID NO: 76 - DNA, 24 bp, synthetic construct
  misc_feature 1..24: note = Synthetic
  source 1..24: mol_type = other DNA
acagaaggtccgccatcgtgcata

SEQ ID NO: 77 - DNA, 24 bp, synthetic construct
  misc_feature 1..24: note = Synthetic
  source 1..24: mol_type = other DNA
ggtccgttacaaatccgatctccc

SEQ ID NO: 78 - DNA, 24 bp, synthetic construct
  misc_feature 1..24: note = Synthetic
  source 1..24: mol_type = other DNA
tgtgacgtttaatcgtagaagaca

SEQ ID NO: 79 - DNA, 24 bp, synthetic construct
  misc_feature 1..24: note = Synthetic
  source 1..24: mol_type = other DNA
ctatcgagtgttggtgatgacttg

SEQ ID NO: 80 - DNA, 24 bp, synthetic construct
  misc_feature 1..24: note = Synthetic
  source 1..24: mol_type = other DNA
gatctagcgcgagactccgaacat

SEQ ID NO: 81 - DNA, 24 bp, synthetic construct
  misc_feature 1..24: note = Synthetic
  source 1..24: mol_type = other DNA
cgtgggaccagggatatagggcca

SEQ ID NO: 82 - DNA, 24 bp, synthetic construct
  misc_feature 1..24: note = Synthetic
  source 1..24: mol_type = other DNA
aaccttaggtaaagggcctacagc

SEQ ID NO: 83 - DNA, 24 bp, synthetic construct
  misc_feature 1..24: note = Synthetic
  source 1..24: mol_type = other DNA
taaacagggaaagtaattcggtgt

SEQ ID NO: 84 - DNA, 24 bp, synthetic construct
  misc_feature 1..24: note = Synthetic
  source 1..24: mol_type = other DNA
gtaaggtagttggatccaaatgag

SEQ ID NO: 85 - DNA, 24 bp, synthetic construct
  misc_feature 1..24: note = Synthetic
  source 1..24: mol_type = other DNA
aatcgaggtagccaacgtatcggg

SEQ ID NO: 86 - DNA, 24 bp, synthetic construct
  misc_feature 1..24: note = Synthetic
  source 1..24: mol_type = other DNA
aggagacctccactgccatgcatt

SEQ ID NO: 87 - DNA, 24 bp, synthetic construct
  misc_feature 1..24: note = Synthetic
  source 1..24: mol_type = other DNA
accttggcagacctatggtgagag

SEQ ID NO: 88 - DNA, 24 bp, synthetic construct
  misc_feature 1..24: note = Synthetic
  source 1..24: mol_type = other DNA
attcggtttggtggatctccggac

SEQ ID NO: 89 - DNA, 24 bp, synthetic construct
  misc_feature 1..24: note = Synthetic
  source 1..24: mol_type = other DNA
attatctccgcgaggaccgaatgg

SEQ ID NO: 90 - DNA, 24 bp, synthetic construct
  misc_feature 1..24: note = Synthetic
  source 1..24: mol_type = other DNA
cgaggttgtgacctcctgggaaca

SEQ ID NO: 91 - DNA, 1904 bp, Homo sapiens
  source 1..1904: mol_type = genomic DNA
accgccaccatgcggcccgcagccggcgcagccaggagaccgaggtgctgtaccagctggctcacacgctgcccttcgcccgcggcgtcagcgcccacctggacaaggcctctatcatgcgcctcaccatcagctacctgcgcatgcaccgcctctgcgccgcagctggagctcattggacacagcatctttgatttcatccacccctgtgaccaagaggagcttcaggacgccctgaccccccagcagaccctgtccaggaggaaggtggaggcccccacggagcggtgcttctccttgcgcatgaagagtacactcaccagccgcgggcgcaccctcaacctcaaggcggccacctggaaggtgctgaactgctctggacatatgagggcctacaagccacctgcgcagacttctccagctgggagccctgactcagagcccccgctgcagtgcctggtgctcatctgcgaagccatcccccacccaggcagcctggagcccccactgggccgaggggccttcctcagccgccacagcctggacatgaagttcacctactgtgacgacaggattgcagaagtggctggctatagtcccgatgacctgatcggctgttccgcctacgagtacatccacgcgctggactccgatgcggtcagcaagagcatccacaccttgctgagcaagggccaggcagtaacagggcagtatcgcttcctggcccggagtggtggctacctgtggacccagacccaggccacagtggtgtcagggggacggggcccccagtcggagagtatcgtctgtgtccattttttaatcagccaggtggaagagaccggagtggtgctgtccctggagcaaacggagcaacactctcgcagacccattcagcggggcgccccctctcagaaggacacccctaaccctggggacagccttgacacccctggcccccggatccttgccttcctgcacccgccttccctgagcgaggctgccctggccgctgacccccgccgtttctgcagccctgacctccgtcgcctcctgggacccatcctggatggggcttcagtagcagccactcccagcaccccgctggccacacggcacccccaaagtcctctttcggctgatctcccagatgaactacctgtgggcaccgagaatgtgcacagactcttcacctccgggaaagacactgaggcagtggagacagatttagatatagctcaggatgctgatgctctggatttggagatgctggccccctacatctccatggatgatgacttccagctcaacgccagcgagcagctacccagggcctaccacagacctctgggggctgtcccccggccccgtgctcggagcttccatggcctgtcacctccagcccttgagccctccctgctaccccgctgggggagtgacccccggctgagctgctccagcccttccagaggggacccctcagcatcctctcccatggctggggctcggaagaggaccctggcccagagctcagaggacgaggacgagggagtggagctgctgggagtgagacctcccaaaaggtcccccagcccagaacacgaaaactttctgctctttcctctcagcctgagtttccttctgacaggaggaccagccccagggagcctgcaggaccccagcaccccactcctgaacctgaatgagcccctgggcctgggcccctcactgctctctccgtactcagacgaggacactacccagcccgggggccccttccagccaagggcaggctcagcccaggctgactagtaatgaactagtccgtaacttgaaagtatttcgatttcttggctttatatatcttgtggaaaggacgaagtcaagaccctcgggctctgtgg

SEQ ID NO: 92 - DNA, 1454 bp, Homo sapiens
  source 1..1454: mol_type = genomic DNA
accgccaccatgcggcccgcagccggcgcagccaggagaccgaggtgctgtaccagctggctcacacgctgcccttcgcccgcggcgtcagcgcccacctggacaaggcctctatcatgcgcctcaccatcagctacctgcgcatgcaccgcctctgcgccgcagctggagctcattggacacagcatctttgatttcatccacccctgtgaccaagaggagcttcaggacgccctgaccccccagcagaccctgtccaggaggaaggtggaggcccccacggagcggtgcttctccttgcgcatgaagagtacactcaccagccgcgggcgcaccctcaacctcaaggcggccacctggaaggtgctgaactgctctggacatatgagggcctacaagccacctgcgcagacttctccagctgggagccctgactcagagcccccgctgcagtgcctggtgctcatctgcgaagccatcccccacccaggcagcctggagcccccactgggccgaggggccttcctcagccgccacagcctggacatgaagttcacctactgtgacgacaggattgcagaagtggctggctatagtcccgatgacctgatcggctgttccgcctacgagtacatccacgcgctggactccgatgcggtcagcaagagcatccacaccttgctgagcaagggccaggcagtaacagggcagtatcgcttcctggcccggagtggtggctacctgtggacccagacccaggccacagtggtgtcagggggacggggcccccagtcggagagtatcgtctgtgtccattttttaatcagccaggtggaagagaccggagtggtgctgtccctggagcaaacggagcaacactctcgcagacccattcagcggggcgccccctctcagaaggacacccctaaccctggggacagccttgacacccctggcccccggatccttgccttcctgcacccgccttccctgagcgaggctgccctggccgctgacccccgccgtttctgcagccctgacctccgtcgcctcctgggacccatcctggatggggcttcagtagcagccactcccagcaccccgctggccacacggcacccccaaagtcctctttcggctgatctcccagatgaactacctgtgggcaccgagaatgtgcacagactcttcacctccgggaaagacactgaggcagtggagacagatttagatatagctcaggaccccagcaccccactcctgaacctgaatgagcccctgggttttcactttgtcacccagtctggagtgcagtggcacaaacacagctcaccgcagcctcgacctcctgggctcaagtagtaatgaactagtccgtaacttgaaagtatttcgatttcttggctttatatatcttgtggaaaggacgacaattacaccacgtctgcctacta

SEQ ID NO: 93 - DNA, 2105 bp, Homo sapiens
  source 1..2105: mol_type = genomic DNA
accgccaccatggactggcaagaccacaggtcgaccacggagctgcgcaaggaaaagtcccgggatgcggcccgcagccggcgcagccaggagaccgaggtgctgtaccagctggctcacacgctgcccttcgcccgcggcgtcagcgcccacctggacaaggcctctatcatgcgcctcaccatcagctacctgcgcatgcaccgcctctgcgccgcaggggagtggaaccaggtgggagcagggggagaaccactggatgcctgctacctgaaggccctggagggcttcgtcatggtgctcaccgccgagggagacatggcttacctgtcggagaatgtcagcaaacacctgggcctcagtcagctggagctcattggacacagcatctttgatttcatccacccctgtgaccaagaggagcttcaggacgccctgaccccccagcagaccctgtccaggaggaaggtggaggcccccacggagcggtgcttctccttgcgcatgaagagtacactcaccagccgcgggcgcaccctcaacctcaaggcggccacctggaaggtgctgaactgctctggacatatgagggcctacaagccacctgcgcagacttctccagctgggagccctgactcagagcccccgctgcagtgcctggtgctcatctgcgaagccatcccccacccaggcagcctggagcccccactgggccgaggggccttcctcagccgccacagcctggacatgaagttcacctactgtgacgacaggattgcagaagtggctggctatagtcccgatgacctgatcggctgttccgcctacgagtacatccacgcgctggactccgatgcggtcagcaagagcatccacaccttgctgagcaagggccaggcagtaacagggcagtatcgcttcctggcccggagtggtggctacctgtggacccagacccaggccacagtggtgtcagggggacggggcccccagtcggagagtatcgtctgtgtccattttttaatcagccaggtggaagagaccggagtggtgctgtccctggagcaaacggagcaacactctcgcagacccattcagcggggcgccccctctcagaaggacacccctaaccctggggacagccttgacacccctggcccccggatccttgccttcctgcacccgccttccctgagcgaggctgccctggccgctgacccccgccgtttctgcagccctgacctccgtcgcctcctgggacccatcctggatggggcttcagtagcagccactcccagcaccccgctggccacacggcacccccaaagtcctctttcggctgatctcccagatgaactacctgtgggcaccgagaatgtgcacagactcttcacctccgggaaagacactgaggcagtggagacagatttagatatagctcaggatgctgatgctctggatttggagatgctggccccctacatctccatggatgatgacttccagctcaacgccagcgagcagctacccagggcctaccacagacctctgggggctgtcccccggccccgtgctcggagcttccatggcctgtcacctccagcccttgagccctccctgctaccccgctgggggagtgacccccggctgagctgctccagcccttccagaggggacccctcagcatcctctcccatggctggggctcggaagaggaccctggcccagagctcagaggacgaggacgagggagtggagctgctgggagtgagacctcccaaaaggtcccccagcccagaacacgaaaactttctgctctttcctctcagcctgagtttccttctgacaggaggaccagccccagggagcctgcaggaccccagcaccccactcctgaacctgaatgagcccctgggcctgggcccctcactgctctctccgtactcagacgaggacactacccagcccgggggccccttccagccaagggcaggctcagcccaggctgactagtaatgaactagtccgtaacttgaaagtatttcgatttcttggctttatatatcttgtggaaaggacgattcagacgtttcgcgcctggagct

SEQ ID NO: 94 - DNA, 1886 bp, Homo sapiens
  source 1..1886: mol_type = genomic DNA
accgccaccatgcggcccgcagccggcgcagccaggagaccgaggtgctgtaccagctggctcacacgctgcccttcgcccgcggcgtcagcgcccacctggacaaggcctctatcatgcgcctcaccatcagctacctgcgcatgcaccgcctctgcgccgcagctggagctcattggacacagcatctttgatttcatccacccctgtgaccaagaggagcttcaggacgccctgaccccccagcagaccctgtccaggaggaaggtggaggcccccacggagcggtgcttctccttgcgcatgaagagtacactcaccagccgcgggcgcaccctcaacctcaaggcggccacctggaaggtgctgaactgctctggacatatgagggcctacaagccacctgcgcagacttctccagctgggagccctgactcagagcccccgctgcagtgcctggtgctcatctgcgaagccatcccccacccaggcagcctggagcccccactgggccgaggggccttcctcagccgccacagcctggacatgaagttcacctactgtgacgacaggattgcagaagtggctggctatagtcccgatgacctgatcggctgttccgcctacgagtacatccacgcgctggactccgatgcggtcagcaagagcatccacaccttgctgagcaagggccaggcagtaacagggcagtatcgcttcctggcccggagtggtggctacctgtggacccagacccaggccacagtggtgtcagggggacggggcccccagtcggagagtatcgtctgtgtccattttttaatcagccaggtggaagagaccggagtggtgctgtccctggagcaaacggagcaacactctcgcagacccattcagcggggcgccccctctcagaaggacacccctaaccctggggacagccttgacacccctggcccccggatccttgccttcctgcacccgccttccctgagcgaggctgccctggccgctgacccccgccgtttctgcagccctgacctccgtcgcctcctgggacccatcctggatggggcttcagtagcagccactcccagcaccccgctggccacacggcacccccaaagtcctctttcggctgatctcccagatgaactacctgtgggcaccgagaatgtgcacagactcttcacctccgggaaagacactgaggcagtggagacagatttagatatagctcaggatgctgatgctctggatttggagatgctggccccctacatctccatggatgatgacttccagctcaacgccagcgagcagctacccagggcctaccacagacctctgggggctgtcccccggccccgtgctcggagcttccatggcctgtcacctccagcccttgagccctccctgctaccccgctgggggagtgacccccggctgagctgctccagcccttccagaggggacccctcagcatcctctcccatggctggggctcggaagaggaccctggcccagagctcagaggacgaggacgagggagtggagctgctgggagtgagacctcccaaaaggtcccccagcccagaacacgaaaactttctgctctttcctctcagcctgagtttccttctgacaggaggaccagccccagggagcctgcaggaccccagcaccccactcctgaacctgaatgagcccctgggttttcactttgtcacccagtctggagtgcagtggcacaaacacagctcaccgcagcctcgacctcctgggctcaagtagtaatgaactagtccgtaacttgaaagtatttcgatttcttggctttatatatcttgtggaaaggacgagataacgctaaccacaaggtattt

SEQ ID NO: 95 - DNA, 2111 bp, Homo sapiens
  source 1..2111: mol_type = genomic DNA
accgccaccatggcgctggggctgcagcgcgcaaggtcgaccacggagctgcgcaaggaaaagtcccgggatgcggcccgcagccggcgcagccaggagaccgaggtgctgtaccagctggctcacacgctgcccttcgcccgcggcgtcagcgcccacctggacaaggcctctatcatgcgcctcaccatcagctacctgcgcatgcaccgcctctgcgccgcaggggagtggaaccaggtgggagcagggggagaaccactggatgcctgctacctgaaggccctggagggcttcgtcatggtgctcaccgccgagggagacatggcttacctgtcggagaatgtcagcaaacacctgggcctcagtcagctggagctcattggacacagcatctttgatttcatccacccctgtgaccaagaggagcttcaggacgccctgaccccccagcagaccctgtccaggaggaaggtggaggcccccacggagcggtgcttctccttgcgcatgaagagtacactcaccagccgcgggcgcaccctcaacctcaaggcggccacctggaaggtgctgaactgctctggacatatgagggcctacaagccacctgcgcagacttctccagctgggagccctgactcagagcccccgctgcagtgcctggtgctcatctgcgaagccatcccccacccaggcagcctggagcccccactgggccgaggggccttcctcagccgccacagcctggacatgaagttcacctactgtgacgacaggattgcagaagtggctggctatagtcccgatgacctgatcggctgttccgcctacgagtacatccacgcgctggactccgatgcggtcagcaagagcatccacaccttgctgagcaagggccaggcagtaacagggcagtatcgcttcctggcccggagtggtggctacctgtggacccagacccaggccacagtggtgtcagggggacggggcccccagtcggagagtatcgtctgtgtccattttttaatcagccaggtggaagagaccggagtggtgctgtccctggagcaaacggagcaacactctcgcagacccattcagcggggcgccccctctcagaaggacacccctaaccctggggacagccttgacacccctggcccccggatccttgccttcctgcacccgccttccctgagcgaggctgccctggccgctgacccccgccgtttctgcagccctgacctccgtcgcctcctgggacccatcctggatggggcttcagtagcagccactcccagcaccccgctggccacacggcacccccaaagtcctctttcggctgatctcccagatgaactacctgtgggcaccgagaatgtgcacagactcttcacctccgggaaagacactgaggcagtggagacagatttagatatagctcaggatgctgatgctctggatttggagatgctggccccctacatctccatggatgatgacttccagctcaacgccagcgagcagctacccagggcctaccacagacctctgggggctgtcccccggccccgtgctcggagcttccatggcctgtcacctccagcccttgagccctccctgctaccccgctgggggagtgacccccggctgagctgctccagcccttccagaggggacccctcagcatcctctcccatggctggggctcggaagaggaccctggcccagagctcagaggacgaggacgagggagtggagctgctgggagtgagacctcccaaaaggtcccccagcccagaacacgaaaactttctgctctttcctctcagcctgagtttccttctgacaggaggaccagccccagggagcctgcaggaccccagcaccccactcctgaacctgaatgagcccctgggcctgggcccctcactgctctctccgtactcagacgaggacactacccagcccgggggccccttccagccaagggcaggctcagcccaggctgactagtaatgaactagtccgtaacttgaaagtatttcgatttcttggctttatatatcttgtggaaaggacgaccacgcgagctagacgatcgatga

SEQ ID NO: 96 - DNA, 4733 bp, Homo sapiens
  source 1..4733: mol_type = genomic DNA
accgccaccatgtatgcagcagtggaacatgggcctgtgctttgcagcgattccaacatcctgtgcctgtcctggaaggggcgtgtccccaagagtgagaaggagaagcctgtgtgcaggagacgctactatgaggaaggctggctggccacgggcaacgggcgaggagtggttggggtgactttcacctctagtcactgtcgcagggacaggagtactccacagaggataaatttcaacctccggggccacaatagcgaggttgtgctggtgaggtggaatgagccctaccagaaactggccacgtgcgatgcggacggaggcatattcgtgtggattcagtacgagggcaggtggtctgtggagctggtcaacgaccgcggggcgcaggtgagtgatttcacgtggagccatgatggaactcaagcacttatttcctatcgagatgggtttgtcctggttgggtctgtcagtggacaaagacactggtcatccgaaatcaacttggaaagtcaaattacgtgtggcatatggactcctgacgaccaacaggtgctgtttggcacggccgatgggcaggtgattgtcatggattgccacggcagaatgctggcccacgtcctcttgcacgagtcagacggtgtcctcggcatgtcctggaactacccgatcttcctggtggaggacagcagcgagagcgacacggactcagatgactacgcccctccccaagatggtccggcagcatatcccatcccagtgcagaacatcaagcctctgctcaccgtcagcttcacctcgggagacatcagcttaatgaacaactacgatgacttgtctcccacggtcatccgctcagggctgaaagaggtggtagcccagtggtgcacacagggggacttgctggcagtcgctgggatggaacggcagacccagcttggtgagcttcccaatggtccccttctgaagagtgccatggtcaagttctacaatgttcgtggggagcacatcttcacactggacactctcgtgcagcgccccatcatctccatctgctggggtcaccgggattcgaggctgttgatggcatcaggaccagccctgtacgtggtgcgtgtggagcaccgggtgtccagcctgcagctgctgtgccagcaggccatcgccagcaccttgcgtgaggacaaggacgtcagcaagctgactctgcccccccgcctctgctcctacctctccactgccttcatccccaccatcaagcccccaattccagatccgaacaacatgagagactttgtcagctacccatcagccggcaacgagcggctgcactgcaccatgaagcgcacagaggacgacccggaggtgggcggcccgtgctacacgctctacctggagtacctgggcgggcttgtgcccatcctcaaagggcggcgcatcagcaagctgcggccagagttcgtcatcatggacccgcggacagatagcaaaccagatgaaatctatgggaacagcttgatttctactgtgatcgacagctgcaactgctcagactccagtgacattgagctgagtgatgactgggctgccaagaaatctcccaaaatctccagagctagcaaatcacccaaactcccaaggatcagcattgaggcccgcaagtcacccaagctgccccgggctgctcaggagctctcccggtccccacggttgcccctgcgcaagccctctgtgggctcgcccagcctgactcggagagagtttccttttgaagacatcactcagcacaactatcttgctcaggtcacgtctaatatctggggaaccaaatttaagattgtgggcttggctgctttcctgccaaccaacctcggtgcagtaatctataaaaccagcctcctgcatctccagccgcggcagatgaccatttatctcccagaagttcggaaaatttccatggactatattaatttacctgtcttcaacccaaatgttttcagtgaagatgaagatgatttaccagtgacaggagcatctggtgtccctgagaacagcccaccttgtaccgtgaacatccctattgcaccgatccacagctcggctcaggctatgtcccccacgcagagcatagggctggtgcagtccctactggccaatcagaatgtgcagctagatgtcctgaccaaccagacgacagctgtagggacagcagaacatgcaggtgacagtgccacccagtacccagtctccaaccggtactccaatcctggacaggtgattttcggaagcgtggaaatgggccgcatcattcagaacccccctccactgtccctgcctcccccgccgcaggggcccatgcagctgtccacggtgggccatggagaccgagaccacgaacacctgcagaagtcagccaaggccctgcggccaacaccgcagctggcagctgagggggacgcagtggtctttagtgccccccaggaggtccaggtgacgaagataaaccctccacccccgtacccaggaaccatccccgctgcccccaccacagcagcacccccgccccctctgccgcccccacagcccccagtggatgtgtgcttgaagaagggcgacttctccctctaccccacgtcagtgcactaccagacccccctgggctatgagaggatcaccaccttcgacagcagtggcaacgtggaggaggtgtgccggccccgcacccggatgctgtgctcccagaacacgtacaccctccccggcccgggtagctctgccaccttgaggctcacggccactgagaagaaggtccctcagccctgcagcagtgccaccctgaaccgcctgaccgtccctcgctactccatccccaccggggacccacccccgtatcctgaaattgccagccagctggcccaggggcggggggctgcccagaggtccgacaatagcctcatccacgctaccctgcggaggaacaaccgtgaggctacgctcaagatggcccagctggccgacagcccgcgggcccccctgcagcccctggccaagtccaagggcgggcccgggggggtggtgacacagctcccagcgcggcccccacctgccctgtacacctgcagtcagtgcagtggcacagggcccagctcacagcccggagcctccctggcccataccgccagcgcctccccgttggcctcccagtcctcctacagcctcctgagcccacccgacagcgcccgcgaccgcaccgactacgtcaactcggccttcacggaggacgaggccctgtcccagcactgtcagcttgagaagcccttgaggcaccctcccctgcctgaagctgctgtcaccctgaaacggccacccccttaccagtgggaccccatgctgggtgaggatgtttgggttcctcaagaaaggacagcacagacttcagggcccaaccccttaaaactgtcctctctgatgctgagtcagggccagcacctggacgtgtcccgactgcccttcatctcccccaagtctcctgccagccccactgccactttccaaacaggctatgggatgggagtgccatatccaggaagctataacaacccccctttgcctggagtgcaggctccctgctctcccaaagatgccctgtccccaacgcagtttgcacaacaggagcctgctgtggtccttcagccgctgtacccacccagcctctcctattgcaccctgccccccatgtacccaggaagcagcacgtgctctagtttacagctgccacctgtcgccttgcatccatggagttcctacagcgcctgcccgcccatgcagaacccccagggcactctccccccaaagccacacttggtggtggagaagccccttgtgtccccaccacctgccgacctccaaagccacttgggcacagaggtgatggtagagactgcagacaacttccaggaagtcctctccctgaccgaaagcccagtcccccagcggacagaaaaatttggaaagaagaaccggaagcgcctggacagccgagcagaagaaggcagcgttcaggccatcactgagggcaaagtgaagaaggaggctaggactttgagtgactttaattccctaatctccagcccacacctggggagagagaagaagaaagtgaagagtcagaaagaccaactgaagtcaaagaagttgaataagacaaacgagttccaggacagctccgagagcgagcctgagctgttcatcagcggggatgagctcatgaaccagagccagggcagcagaaagggctggaaaagcaagcgctccccacgggccgccggcgagctggaggaggccaagtgccggcgggccagtgagaaggaggacgggcggctgggcagccaaggcttcgtgtacgtgatggccaacaagcagccgctgtggaacgaggccacccaggtctaccagctggacttcggggggcgggtgacccaggagtccgccaagaacttccagattgagttagaggggcggcaggtgatgcagtttggacggattgatggcagtgcgtacattctagacttccagtatccgttctcagccgtgcaggcctttgcagttgccctggccaacgtgactcagcgcctcaaatagtaatgaactagtccgtaacttgaaagtatttcgatttcttggctttatatatcttgtggaaaggacgataacacagtgcggcgctcccgcgt

SEQ ID NO: 97 - DNA, 2138 bp, Homo sapiens
  source 1..2138: mol_type = genomic DNA
accgccaccatgtatgcagcagtggaacatgggcctgtgctttgcagcgattccaacatcctgtgcctgtcctggaaggggcgtgtccccaagagtgagaaggagaagcctgtgtgcaggagacgctactatgaggaaggctggctggccacgggcaacgggcgaggagtggttggggtgactttcacctctagtcactgtcgcagggacaggagtactccacagaggataaatttcaacctccggggccacaatagcgaggttgtgctggtgaggtggaatgagccctaccagaaactggccacgtgcgatgcggacggaggcatattcgtgtggattcagtacgagggcaggtggtctgtggagctggtcaacgaccgcggggcgcaggtgagtgatttcacgtggagccatgatggaactcaagcacttatttcctatcgagatgggtttgtcctggttgggtctgtcagtggacaaagacactggtcatccgaaatcaacttggaaagtcaaattacgtgtggcatatggactcctgacgaccaacaggtgctgtttggcacggccgatgggcaggtgattgtcatggattgccacggcagaatgctggcccacgtcctcttgcacgagtcagacggtgtcctcggcatgtcctggaactacccgatcttcctggtggaggacagcagcgagagcgacacggactcagatgactacgcccctccccaagatggtccggcagcatatcccatcccagtgcagaacatcaagcctctgctcaccgtcagcttcacctcgggagacatcagcttaatgaacaactacgatgacttgtctcccacggtcatccgctcagggctgaaagaggtggtagcccagtggtgcacacagggggacttgctggcagtcgctgggatggaacggcagacccagcttggtgagcttcccaatggtccccttctgaagagtgccatggtcaagttctacaatgttcgtggggagcacatcttcacactggacactctcgtgcagcgccccatcatctccatctgctggggtcaccgggattcgaggctgttgatggcatcaggaccagccctgtacgtggtgcgtgtggagcaccgggtgtccagcctgcagctgctgtgccagcaggccatcgccagcaccttgcgtgaggacaaggacgtcagcaagctgactctgcccccccgcctctgctcctacctctccactgccttcatccccaccatcaagcccccaattccagatccgaacaacatgagagactttgtcagctacccatcagccggcaacgagcggctgcactgcaccatgaagcgcacagaggacgacccggaggtgggcggcccgtgctacacgctctacctggagtacctgggcgggcttgtgcccatcctcaaagggcggcgcatcagcaagctgcggccagagttcgtcatcatggacccgcggacagatagcaaaccagatgaaatctatgggaacagcttgatttctactgtgatcgacagctgcaactgctcagactccagtgacattgagctgagtgatgactgggctgccaagaaatctcccaaaatctccagagctagcaaatcacccaaactcccaaggatcagcattgaggcccgcaagtcacccaagctgccccgggctgctcaggagctctcccggtccccacggttgcccctgcgcaagccctctgtgggctcgcccagcctgactcggagagagtttccttttgaagacatcactcagcacaactatcttgctcaggtcacgtctaatatctggggaaccaaatttaagattgtgggcttggctgctttcctgccaaccaacctcggtgcagtaatctataaaaccagcctcctgcatctccagccgcggcagatgaccatttatctcccagaagttcggaaaatttccatggactatattaatttacctgtcttcaacccaaatgttttcagtgaagatgaagatgatttaccaggtgatgcagtttggacggattagtaatgaactagtccgtaacttgaaagtatttcgatttcttggctttatatatcttgtggaaaggacgagctcatgtgagcaaacgtggtttg

SEQ ID NO: 98 - DNA, 2027 bp, Homo sapiens
  source 1..2027: mol_type = genomic DNA
accgccaccatggactcagtggtctttgaggatgtggctgtgaacttcacccaggaggagtgggctttgctgggtccctctcagaagaaactctacagagatgtgatgcaagaaacctttgttaacttggcctctataggggaaaactgggaggagaagaacattgaagatcacaaaaatcaggggagaaagctaagaagtcatatggtagagaggctctgtgaaaggaaagaaggtagtcagtttggagaaaccatcagtcagactccaaatcctaaaccaaacaagaaaacttttactagagtaaaaccatatgaatgtagtgtgtgtggaaaggactatatgtgtcattcatctcttaataggcacatgagatctcatactgaacatagatcatatgaatatcacaaatatggagagaaatcatatgaatgtaaggaatgtgggaaaagattcagctttcgaagttcatttcgaatacatgaaagaactcacactggagagaaaccctataaatgtaaacagtgtggtaaggctttcagttggcccagttcctttcaaatacatgaaagaactcatactggagagaaaccttatgaatgtaaggaatgtgggaaggccttcatttatcacacaacctttcgaggacacatgagaatgcacacaggggagaaaccctataaatgtaaagaatgcgggaaaacgttcagtcatcccagttcttttcgaaatcatgaaagaactcactctggagagaaaccctatgaatgtaaacaatgtggaaaagctttcagatattaccaaacttttcaaatacatgaaaggactcacactggggaaaaaccctatcagtgtaagcaatgtggtaaagctcttagttgtcccacatcctttcgaagtcatgaaaggattcacactggagaaaaaccctataaatgtaaaaaatgtgggaaagccttcagttttcctagttcctttagaaaacatgaaagaattcatacaggagagaaaccctatgattgtaaggaatgtgggaaagcattcatttctcttccaagctatcgaagacatatgataatgcacactggaaatggaccttataaatgcaaggaatgtgggaaagcctttgattgtcctagttcttttcaaatccatgaacgaactcacactggagagaaaccctatgaatgtaaacagtgtggtaaagccttcagttgttccagttcctttcgaatgcatgaaagaactcacactggagagaaaccccatgaatgtaaacaatgtggtaaagccttcagttgttccagttctgttcgaatacatgaaaggactcacactggagagaaaccctatgaatgtaaacagtgtggtaaagccttcagttgttccagttcctttcgaatgcatgaaagaattcacactggagagaaaccctatgaatgtaaacagtgtggtaaagcctttagtttttctagttcctttcggatgcatgaaaggactcacactggagagaaaccctatgaatgtaaacaatgtggtaaagccttcagttgttccagttcctttcgaatgcatgaaaggactcacactggggagaaaccctatgaatgtaaacagtgtggtaaggcgtttagttgttccagttccattcgaatacatgaaaggactcacactggagagaaaccttatgagtgtaaacaatgtggtaaggccttcagttgttctagttctgttcgaatgcatgaaaggactcacactggagtgaaaccctatgaatgtaaacaatgtgacaaagccttcagttgctcacgttcctttcgaatccatgaacgaactcacactggagagaaaccctatgcatgtcaacaatgtggtaaagccttcaagtgttcccgttcctttcgaatacatgaaagagttcatagtggagagtagtaatgaactagtccgtaacttgaaagtatttcgatttcttggctttatatatcttgtggaaaggacgataccacgtgtgcaggatccgcggg

SEQ ID NO: 99 - DNA, 1793 bp, Homo sapiens
  source 1..1793: mol_type = genomic DNA
accgccaccatgggaccattgacatttatggatgtggccatagaattctctctggaggagtggcagtgcctggacacagcacagcagaatttatataggaatgtcatgttagagaattatagaaacctggtattcctgggtattgctgtgtctaatttagacctgatcacctgtctggagcaaggaaaagagccctggaatatgaagagacacgagatggcagccaaacccccagctatgtgttctcattttgccaaagaccttaggccagagcaatatataaaaaattctttccaacaagtgatactgagaagatatggaaaatgtggatatcagaaaggctgtaaaagtgtggatgagcataagttgcacaaaggaggtcacaagggacttaaccggtgtgtgacaactacccagagcaaaatagttcagtgtgacaaatacgtgaaagtctttcataaatattcaaatgcaaagagacataagataagacatactggaaaaaatcctttcaaatgtaaagaatgtggcaaatcattttgcatgctttcacaactaactcaacatgagataattcatactggagaaaaaccctacaaatgtgaagaatgtggcaaagcttttaaaaagtcctcaaaccttacgaatcataagataattcatactggagagaaaccctacaaatgtgaagaatgtggaaaagcttttaaccagtcctcaactcttactagacataagataattcatactggagagaaactctacaaatgtgaagaatgtggcaaagcttttaaccggtcctcaaaccttactaaacataagatagttcatactggagagaaaccctacaaatgtgaagaatgtggcaaagcttttaaacagtcctcaaaccttactaatcacaagaaaattcatactggagagaaaccctacaaatgtggagaatgtggcaaagcctttaccctatcttcacaccttactacacataagaggattcatactggtgagaaaccctacaaatgtgaagaatgtggcaaagcttttagtgtattttcaacccttactaaacataagataattcatactgaagagaaaccctacaaatgtgaagaatgtggcaaagcttttaaccggtcctcacaccttactaatcataaggtaattcatactggagagaaaccctacaaatgtgaagaatgtggtaaagcctttaccaagtcctcaactcttacttatcataaggtaattcatactggaaagaaaccctacaaatgtgaagaatgtggtaaagcctttagtatattctcaatccttactaaacataaagtaattcatactgaagacaaaccctacaaatgtgaagaatgtggcaaaacttttaactactcctcaaattttactaatcataaaaaaattcatactggagagaaaccctataagtgtgaagaatgtggcaaaagctttattctgtcctctcatcttactacacataagataattcatactggagagaaaccctacaaatgtaaagaatgtggcaaagcttttaaccagtcctcaacccttatgaaacataagataattcatactggagagaaaccctacaaatgtgaagaatgtggcaaagcctttaaccagtccccaaaccttactaaacataagagaattcataccaaagagaaaccctacaaatgtaaatagtaatgaactagtccgtaacttgaaagtatttcgatttcttggctttatatatcttgtggaaaggacgatcgcctcgcgcacttggcccgatc

SEQ ID NO: 100 - DNA, 1793 bp, Homo sapiens
  source 1..1793: mol_type = genomic DNA
accgccaccatggcaaggaggttgctgccagcccatgtacaggagtccgtgacgttcagggatgtggccgtgttcttcagccaggacgagtggttgcacctggactctgcccagagagccttgtaccgggaggtgatgctggagaactacagcatcctggtctcactggggattctcttttccaagccaaaggtcatctcccagttagagcaaggagaagacccctggatggtggagagtggagttccccaaggcgcacatctcggatgggaaagcttgtttggaaccatagtttctaaagaagaaaatcaggaagtcatgaaaaaactcataattgatggcacatttgacttcaagttggagaagacctacataaatgaagataagttagagaagcaacaaggcaaaaagaacagacttttcagtaaagtgttagttaccatcaaaaaagtctacatgaaggagaggagctttaaaggtgttgaatttgggaaaaatcttggtctaaaatcatcgcttattagaaaaccgagaatagtttccagaggaaggagaccccgttcacagcagtattcagttctctttaaacaactgggggtcaacacagtgcgtaaatgttataaatgtaatatctgtgggaaaatcttcctccacagttcctccctgagtaaacaccagagaatccacactggagagaagctctataaatgtaaggaatgtaggaaagccttcagccaaagctcatccctaactcagcacttgagggttcatacaggagagaaaccttatatatgtagtgaatgtggaaaagccttcagtttcaccacatctcttattggacaccagagaatgcatactggagagagaccttataaatgcaaggaatgtggaaaaacatttaaaggtagttcatctcttaataatcaccagcgaattcacacaggagagaagccctataagtgtaatgaatgtgggagggccttcagtcagtgctcatctctcattcagcaccacagaattcatactggggagaaaccgtatgaatgtactcagtgtgggaaagccttcacttcaatatcgcggctaagtaggcaccatcgaattcatactggagagaaaccctttcattgtaacgagtgtggaaaagtattcagctatcactcagcccttatcatacatcagagaattcacactggtgagaaaccatatgcatgcaaagaatgtgggaaagccttcagccaaagctcagctctcatacaacatcaaagaattcacactggagaaaaaccctacaaatgtaatgaatgtgggaaagccttctcttggatttcacggcttaatatacatcacagaattcacactggagagaaaccatataattgtaaggaatgtggaaaagccttcagttcccactcaggcgttaatactcatcgaaaaattcatactggagaaaaaccttataaatgtaatgactgtgagaaagccttcaaccaaagctcagctctaattcagcaccagagaattcatactggagagaaaccatataattgtaaagtgtgtgggaaagccttcagacagagttcatcccttatgacacacatgagaattcatacaggggaaaaaccttataaatgtaaagaatgtgggaaggcttttagtcagagctcatctcttactaatcatcaaaggactcataattagtaatgaactagtccgtaacttgaaagtatttcgatttcttggctttatatatcttgtggaaaggacgacactaggcttgtcatttatacagc

SEQ ID NO: 101 - DNA, 1697 bp, Homo sapiens
  source 1..1697: mol_type = genomic DNA
accgccaccatggattcggtggcctttgaggatgtggctgtgaacttcacccaggaggagtgggctttgctggatccttcccagaaaaatctctacagggaagtgatgcaggaaaccttgaggaacctgacctccataggaaaaaaatggaacaaccagtacattgaagatgagcaccaaaatcctaggagaaacctaagaagacttataggggagagactctctgaaagtaaagaaagtcatcagcatggagaagttttgacacaggttccagatgacacactgaagaagaaaactcctggagtacaatcatatgaaagcagtgtgtgtggagaaatcggcataggtctttcatcccttaataggcacctcagagcctttagttattccagtagccttgcaatacatggaagaactcacactggggaaaagccttatgaatgtaaggaatgtgggaaagcattcaggtttcccagttctgttcgtagacatgaaagaatccactctgcaaaaaaaccctatgaatgtaagcagtgtgggaaagcattcagttttcccagttctgttcgtagacatgaaagaatccactctgcaaaaaaaccctatgaatgtaagcagtgtgggaaagcattatcttatcttgtaagctttcagacacacatgagaatgcacactggagagagacctcataaatgtaacatatgtgggaaagcctttttttctcccagttcgttaaaaagacacgagaaaagtcacactggagagaaacgctataaatgcaagcaatgtgataaagccttcaattgtcccagttcctttcaatatcatgaaaggactcacagtggagagaaaccctatgagtgtacacaatgtaggaaagccttcagatctgtcaagtacctgcgagtacatgaaagaaaacacactggagagaaaccctatgagtgtaagctatgtggtaagggatttatttcttccacttcctttcgctatcatgaaaagactcacactggagagaaaccttatgaatgtaaaaaatgtgtgaaagccttcagttttgtcaaggatcttcgaatacatgaaaggacacacactggagagaaaccctttgaatgtaaacaatgtgggaaaaccttcacttcttccaattcctttcactatcatgaaaggactcacactggagagaaaccctatgagtgtaagcaatgtgggaaagccttcagatctgcctcagtccttcaaaagcacatacgaactcacacaggagagaaaccctatggatgtaagcaatgtggtaaagtctttagagttgcctcacaacttaaaatgcatgaaaggactcacacaggagagaaaccctatgagtgtaagcaatgtggaaaagccttcatttcttctaattctattcgctatcataaaaggactcacactggagagaaaccctataaatgtaaacagtgtgggaaagccttcatttcttccaactcttttctctaccatgaaaggattcatactggagagaaaccctatgagtgtaagcaatgtggtaaagcctttagatctgcctcaatccttcaaaagcatgtaaggactcacgctggctagtaatgaactagtccgtaacttgaaagtatttcgatttcttggctttatatatcttgtggaaaggacgaacgcaaccctctcaacagtaaggt

SEQ ID NO: 102 - DNA, 2339 bp, Homo sapiens
  source 1..2339: mol_type = genomic DNA
accgccaccatgccctgctgtagtcacaggagctgtagagaggaccccggtacatctgaaagccgggaaatgatgtttcaggacccagtggcctttgaggatgtggctgtgaacttcacccaggaagagtggacattgctggatatttcccagaagaatctcttcagggaagtgatgctggaaactttcaggaacctgacctctataggaaaaaaatggagtgaccagaacattgaatatgagtaccaaaaccccagaagaagcttcaggagtctcatagaagagaaagtcaatgaaattaaagaagacagtcattgtggagaaacttttacccaggttccagatgacagactgaacttccaggagaagaaagcttctcctgaagtaaaatcatgtgacagctttgtgtgtgcagaagttggcataggtaactcatcttttaatatgagcatcagaggtgacactggacacaaggcatatgagtatcaggaatatggaccaaagccatataagtgtcaacaacctaaaaataagaaagccttcaggtatcgcccatccattagaacacaagaaagggatcacactggagagaaaccctatgcttgtaaagtctgtggaaaaacctttattttccattcaagcattcgaagacacatggtaatgcacagtggggatggaacttataaatgtaaattttgtgggaaagccttccattctttcagtttatatcttatccatgaaagaactcacactggagagaaaccatatgaatgtaaacaatgtggtaaatcctttacttattctgctacccttcaaatacatgaaagaactcacactggggagaagccctatgaatgtagcaaatgtgataaagcatttcatagttctagttcctatcatagacatgaaagaagtcacatgggagagaagccttatcaatgcaaagaatgtggaaaagcatttgcatataccagttctcttcgtagacatgaaaggacccactctgggaaaaaaccgtatgaatgtaagcaatatggggaaggcttatcctatcttataagttttcaaacacacataagaatgaactctggagaaagaccttataaatgtaagatatgtgggaaaggcttttattctgccaagtcatttcaaacacatgaaaaaactcacactggagagaaacgctataaatgcaagcaatgtggtaaagccttcaatctttccagttcctttcgatatcatgaaaggattcacactggagagaaaccctatgagtgtaagcagtgtgggaaagccttcagatctgcctcacagcttcgagtgcacggtgggactcacactggagagaaaccctatgaatgtaaggaatgtgggaaagccttcagatctacctcacaccttcgagtgcatggtaggactcatactggagagaaaccctatgaatgtaaggaatgtgggaaagccttcagatatgtgaagcaccttcaaattcatgaaaggacagaaaaacacataagaatgccctctggagaaagaccttataaatgtagtatatgtgagaaaggcttttattctgccaagtcatttcaaacacatgaaaaaactcacactggagagaaaccctatgaatgcaaccaatgtggtaaagccttcagatgttgcaattcccttcgatatcatgaaaggactcacactggagagaaaccctatgagtgtaagcaatgtgggaaagccttcagatctgcctcacaccttcgaatgcatgaaaggactcacactggagagaaaccctatgagtgtaagcaatgtgggaaagccttcagttgtgcctcaaaccttcgaaagcatggtaggactcacactggagagaaaccctatgagtgtaagcaatgtgggaaagccttcagatctgcctcaaaccttcagatgcatgaaaggactcacactggagagaaaccctatgaatgtaaggaatgcgaaaaagcattctgtaaattctcttcttttcaaatacatgaaaggaagcacagaggagagaagccctatgaatgtaagcattgtgggaatggattcacatctgccaagattcttcaaatacatgcaagaacacacattggagagaaacactatgaatgtaaggaatgcggaaaagcattcaattatttttcttccttgcatatacacgcaaggactcatatgggagagaagccatatgaatgtaaggattgtgggaaagcattcagctagtaatgaactagtccgtaacttgaaagtatttcgatttcttggctttatatatcttgtggaaaggacgaaaagataagtctaccattgctcct

SEQ ID NO: 103 - DNA, 2330 bp, Homo sapiens
  source 1..2330: mol_type = genomic DNA
accgccaccatgccctgctgtagtcacaggagctgtagagaggaccccggtacatctgaaagccgggaaatggacccagtggcctttgaggatgtggctgtgaacttcacccaggaagagtggacattgctggatatttcccagaagaatctcttcagggaagtgatgctggaaactttcaggaacctgacctctataggaaaaaaatggagtgaccagaacattgaatatgagtaccaaaaccccagaagaagcttcaggagtctcatagaagagaaagtcaatgaaattaaagaagacagtcattgtggagaaacttttacccaggttccagatgacagactgaacttccaggagaagaaagcttctcctgaagtaaaatcatgtgacagctttgtgtgtgcagaagttggcataggtaactcatcttttaatatgagcatcagaggtgacactggacacaaggcatatgagtatcaggaatatggaccaaagccatataagtgtcaacaacctaaaaataagaaagccttcaggtatcgcccatccattagaacacaagaaagggatcacactggagagaaaccctatgcttgtaaagtctgtggaaaaacctttattttccattcaagcattcgaagacacatggtaatgcacagtggggatggaacttataaatgtaaattttgtgggaaagccttccattctttcagtttatatcttatccatgaaagaactcacactggagagaaaccatatgaatgtaaacaatgtggtaaatcctttacttattctgctacccttcaaatacatgaaagaactcacactggggagaagccctatgaatgtagcaaatgtgataaagcatttcatagttctagttcctatcatagacatgaaagaagtcacatgggagagaagccttatcaatgcaaagaatgtggaaaagcatttgcatataccagttctcttcgtagacatgaaaggacccactctgggaaaaaaccgtatgaatgtaagcaatatggggaaggcttatcctatcttataagttttcaaacacacataagaatgaactctggagaaagaccttataaatgtaagatatgtgggaaaggcttttattctgccaagtcatttcaaacacatgaaaaaactcacactggagagaaacgctataaatgcaagcaatgtggtaaagccttcaatctttccagttcctttcgatatcatgaaaggattcacactggagagaaaccctatgagtgtaagcagtgtgggaaagccttcagatctgcctcacagcttcgagtgcacggtgggactcacactggagagaaaccctatgaatgtaaggaatgtgggaaagccttcagatctacctcacaccttcgagtgcatggtaggactcatactggagagaaaccctatgaatgtaaggaatgtgggaaagccttcagatatgtgaagcaccttcaaattcatgaaaggacagaaaaacacataagaatgccctctggagaaagaccttataaatgtagtatatgtgagaaaggcttttattctgccaagtcatttcaaacacatgaaaaaactcacactggagagaaaccctatgaatgcaaccaatgtggtaaagccttcagatgttgcaattcccttcgatatcatgaaaggactcacactggagagaaaccctatgagtgtaagcaatgtgggaaagccttcagatctgcctcacaccttcgaatgcatgaaaggactcacactggagagaaaccctatgagtgtaagcaatgtgggaaagccttcagttgtgcctcaaaccttcgaaagcatggtaggactcacactggagagaaaccctatgagtgtaagcaatgtgggaaagccttcagatctgcctcaaaccttcagatgcatgaaaggactcacactggagagaaaccctatgaatgtaaggaatgcgaaaaagcattctgtaaattctcttcttttcaaatacatgaaaggaagcacagaggagagaagccctatgaatgtaagcattgtgggaatggattcacatctgccaagattcttcaaatacatgcaagaacacacattggagagaaacactatgaatgtaaggaatgcggaaaagcattcaattatttttcttccttgcatatacacgcaaggactcatatgggagagaagccatatgaatgtaaggattgtgggaaagcattcagctagtaatgaactagtccgtaacttgaaagtatttcgatttcttggctttatatatcttgtggaaaggacgatcaagcgatgccgacgaatcatgc

SEQ ID NO: 104 - DNA, 1217 bp, Homo sapiens
  source 1..1217: mol_type = genomic DNA
accgccaccatggacatggcccaggagccagtgaccttcagggacgtggccatctacttctcaagggaggagtgggcgtgtctggaacccagccagagggccctctaccgggacgtgatgctggacaacttcagcagtgtggctgctctgggattttgcagccccagaccagacctcgtctctcgcctggaacagtgggaggagccgtgggttgaagaccgggagagacctgagttccaggcagtgcagaggggaccccggccaggggcaaggaagtctgcagaccccaagagaccttgtgatcatccagcttgggctcacaagaaaacccacgtgcggcgagaaagagccagggaaggaagcagctttaggaagggcttcaggctggacacggatgacgggcagcttcccagagctgctccagaaaggacagacgccaagcccacggctttcccgtgtcaggtgctcacgcagcgttgtgggcggcggccgggccgcagagagcgccggaagcagcgcgcagtagagctgtcattcatctgcggcacgtgcgggaaggcgctcagctgccacagccggctgctcgctcaccagacggtgcacacgggaaccaaggccttcgagtgccccgagtgcggccagaccttccggtgggcttcaaacctgcagcgccaccagaagaaccacacgcgcgagaagcccttctgctgcgaggcctgcgggcaggcgttcagcctgaaggaccgcctggctcagcaccgcaaggtccacaccgagcacaggccctactcgtgtggcgactgtgggaaagccttcaagcagaagtccaaccttctcagacaccagctggtgcacaccggggagcggccgttctactgcgcggactgcggcaaagccttccggaccaaggagaacctcagccaccaccagagggtccacagcggggagaagccctacacctgtgccgagtgcggcaagtccttccggtggcccaagggcttcagcatccaccggaggctgcacctgacgaagaggttctacgagtgcggccactgtgggaaaggcttccgtcacctggggttcttcacgcggcatcagaggactcacaggcacggggaggtgtagtaatgaactagtccgtaacttgaaagtatttcgatttcttggctttatatatcttgtggaaaggacgagagcgtaataatggtacaactcgt

SEQ ID NO: 105 - DNA, 719 bp, Homo sapiens
  source 1..719: mol_type = genomic DNA
accgccaccatgccgagcaagaagaagaagtacaacgcgcggttcccgccggcgcggatcaagaagatcatgcagacggacgaagagattgggaaggtggcggcggcggtgcctgtcatcatctcccgggcgctcgagctcttcctagagtcgctgttgaagaaggcctgccaggtgacccagtcgcggaacgcgaagaccatgaccacatcccacctgaagcagtgcatcgagctggagcagcagtttgacttcttgaaggacctggtggcatctgttcccgacatgcagggggacggggaagacaaccacatggatggggacaagggcgcccgcaggggccggaagccaggcagcggcggccggaagaacggtgggatgggaacgaaaagcaaggacaagaagctgtccgggacagactcggagcaggaggatgaatctgaggacacagatactgatggggaagaggagacatcacaacccccaccccaggccagccacccctctgcccactttcagagccccccgacacccttcctgcccttcgcctctactctgcctttgcccccagcgcccccgggcccctcagcacctgatgaagaggacgaagaagattacgactcctagtaatgaactagtccgtaacttgaaagtatttcgatttcttggctttatatatcttgtggaaaggacgactgtgtggctttcatgcctacagc

SEQ ID NO: 106 - DNA, 1553 bp, Homo sapiens
  source 1..1553: mol_type = genomic DNA
accgccaccatgtcctatccgcagggctacttgtaccagccgtccgcctcgctggcgctctactcgtgcccggcgtacagcaccagcgtcatttcggggccccgcacggatgagctcggccgctcttcttcgggctccgcgttctcgccctacgctggctcgactgccttcacggcgccctcgccgggctacaactcgcacctccagtacggcgccgaccccgcggccgccgccgccgccgccttctcctcgtacgtgggctctccctacgaccacacacccggcatggcgggctccttggggtaccatccttacgcggcgcccctgggatcgtacccttacggggacccagcgtaccggaagaacgccacaagggacgccacggctaccctcaaggcctggctcaacgagcaccgcaagaacccctaccccaccaagggcgagaagatcatgctggccatcatcaccaagatgaccctcacccaggtgtccacctggttcgccaacgcgcgccggcgcctcaagaaagagaataaaatgacgtggacgccgcggaaccgcagcgaggacgaggaagaggaggagaacattgacctggagaagaacgacgaggacgagccccagaagcccgaggacaagggcgaccccgagggccccgaagcaggaggagctgagcagaaggcggcttcgggctgcgaacggcttcagggaccacccacccctgcaggcaaggagacggagggcagcctcagcgactcggattttaaggagccgccctcggagggccgcctcgacgcgctgcagggccccccccgcaccggcgggccctccccggctgggccagcggcggcgcggctggcggaggacccggcccctcactaccccgccggagcgccggcgcccggcccgcatccagccgcgggcgaggtgcctccgggtcccggcgggccctcggttatccattcgccgcctccgccgccgcctcctgcggtgctcgccaagcccaaactgtggtctttggcagagatcgccacatcgtcggacaaggtcaaggacgggggcggcgggaacgagggctctccatgcccaccgtgtcccgggcccatagccgggcaagccctaggaggcagccgggcgtcgccggccccggcgccgtcacgctcgccctcggcgcagtgtccttttccaggcgggacggtgctgtcccggcctctctactacaccgcgcccttctatcccggctacacgaactatggctccttcggacaccttcatggccacccggggcccgggccaggccccacaaccggtccggggtctcatttcaatggattaaaccagaccgtgttgaaccgagcggacgctttggctaaagacccgaaaatgttgcggagccagtctcagctagacctgtgcaaagactctccctatgaattgaagaaaggtatgtccgacatttagtaatgaactagtccgtaacttgaaagtatttcgatttcttggctttatatatcttgtggaaaggacgattgtgttacactaagccagtgatg

SEQ ID NO: 107 - DNA, 1550 bp, Homo sapiens
  source 1..1550: mol_type = genomic DNA
accgccaccatgtcctatccgcagggctacttgtaccagccgtccgcctcgctggcgctctactcgtgcccggcgtacagcaccagcgtcatttcggggccccgcacggatgagctcggccgctcttcttcgggctccgcgttctcgccctacgctggctcgactgccttcacggcgccctcgccgggctacaactcgcacctccagtacggcgccgaccccgcggccgccgccgccgccgccttctcctcgtacgtgggctctccctacgaccacacacccggcatggcgggctccttggggtaccatccttacgcggcgcccctgggatcgtacccttacggggacccagcgtaccggaagaacgccacaagggacgccacggctaccctcaaggcctggctcaacgagcaccgcaagaacccctaccccaccaagggcgagaagatcatgctggccatcatcaccaagatgaccctcacccaggtgtccacctggttcgccaacgcgcgccggcgcctcaagaaagagaataaaatgacgtggacgccgcggaaccgcagcgaggacgaggaagaggaggagaacattgacctggagaagaacgacgaggacgagccccagaagcccgaggacaagggcgaccccgagggccccgaagcaggagctgagcagaaggcggcttcgggctgcgaacggcttcagggaccacccacccctgcaggcaaggagacggagggcagcctcagcgactcggattttaaggagccgccctcggagggccgcctcgacgcgctgcagggccccccccgcaccggcgggccctccccggctgggccagcggcggcgcggctggcggaggacccggcccctcactaccccgccggagcgccggcgcccggcccgcatccagccgcgggcgaggtgcctccgggtcccggcgggccctcggttatccattcgccgcctccgccgccgcctcctgcggtgctcgccaagcccaaactgtggtctttggcagagatcgccacatcgtcggacaaggtcaaggacgggggcggcgggaacgagggctctccatgcccaccgtgtcccgggcccatagccgggcaagccctaggaggcagccgggcgtcgccggccccggcgccgtcacgctcgccctcggcgcagtgtccttttccaggcgggacggtgctgtcccggcctctctactacaccgcgcccttctatcccggctacacgaactatggctccttcggacaccttcatggccacccggggcccgggccaggccccacaaccggtccggggtctcatttcaatggattaaaccagaccgtgttgaaccgagcggacgctttggctaaagacccgaaaatgttgcggagccagtctcagctagacctgtgcaaagactctccctatgaattgaagaaaggtatgtccgacatttagtaatgaactagtccgtaacttgaaagtatttcgatttcttggctttatatatcttgtggaaaggacgaatcccgaccgcccggatcgtccgg

SEQ ID NO: 108 - DNA, 1739 bp, Homo sapiens
  source 1..1739: mol_type = genomic DNA
accgccaccatgtcctacccgcagtttggatacccctactcctcggctccccagttcttgatggccaccaactccctgagcacgtgctgcgagtccggaggccgcacgctggcggactccgggcccgccgcctcggcccaggcgccggtctactgcccggtctacgagagccggctgctggccaccgcgcgccacgagctcaactcggccgcggcgctgggcgtctatgggggtccctatggcggatcgcagggctatggcaactacgtgacctacggctcggaggcgtccgccttctactcgctgaacagctttgattccaaggatggttcgggatctgcgcatgggggcctggcaccagccgctgccgcctactacccttacgagccagctctgggccagtacccctatgacaggatcaaacggctaggcggtcatccccataaaggaattggcctggacctctctggcttgggaaggagcccaggctccctgtatggaaccatggacagcggcacgcggcgcaagaacgccacgcgcgagaccaccagcacgctcaaggcctggctgcaggagcaccgcaagaacccctaccccaccaagggcgagaagatcatgctggccatcatcaccaagatgaccctcacacaggtctccacctggttcgccaacgcgcgccggcgcctcaagaaggagaacaagatgacgtggccgccgcggaacaagtgcgcagacgagaagcggccctacgcggagggcgaggaggaggaggggggcgaggaggaggcgcgggaggagcccctcaagagctccaagaacgcagagcccgtgggcaaagaggagaaggagctggagcttagtgacttggacgacttcgacccgctggaagcagagccgccggcgtgcgagctgaagccgcccttccactccctggacggcggtctggagcgcgtccccgccgcgcccgacggcccggtcaaggaggcctcaggcgcgctccggatgtctctggccgcgggtggcggagctgctctggacgaggacctggagagggcccggagctgtctccgcagcgcggcggccgggccggagccactgccgggcgcagagggcggccctcaggtctgcgaggccaagctggggtttgtgccggcgggggcgtcggcaggcctggaggctaagccgcgcatctggtccctggcccacacagccaccgccgccgccgccgccgccacctccctgagccagactgagtttccgtcgtgcatgctcaagcgccaaggtcccgcggcccctgcggctgtgtcctccgcgcccgccacgtccccgtctgtggcccttccccactctggcgccctggacaggcaccaggactccccggtaaccagtctcagaaactgggtggacggggtcttccacgaccccatcctcaggcacagcactttgaaccaggcctgggccaccgccaagggcgccctcctggaccccgggcctctgggacgctcgctgggggcgggcgcgaacgtgctgactgcacccctggcccgcgcctttccgcctgccgtgccccaggacgccccagctgcaggcgccgccagggagctgctcgccctgcccaaggccggcggcaaacccttctgcgcctagtaatgaactagtccgtaacttgaaagtatttcgatttcttggctttatatatcttgtggaaaggacgatagctgctgaacatatgacaccag

SEQ ID NO: 109 - DNA, 1661 bp, Homo sapiens
  source 1..1661: mol_type = genomic DNA
accgccaccatgtcctacccgcagtttggatacccctactcctcggctccccagttcttgatggccaccaactccctgagcacgtgctgcgagtccggaggccgcacgctggcggactccgggcccgccgcctcggcccaggcgccggtctactgcccggtctacgagagccggctgctggccaccgcgcgccacgagctcaactcggccgcggcgctgggcgtctatgggggtccctatggcggatcgcagggctatggcaactacgtgacctacggctcggaggcgtccgccttctactcgctgaacagctttgattccaaggatggttcgggatctgcgcatgggggcctggcaccagccgctgccgcctactacccttacgagccagctctgggccagtacccctatgacaggtatggaaccatggacagcggcacgcggcgcaagaacgccacgcgcgagaccaccagcacgctcaaggcctggctgcaggagcaccgcaagaacccctaccccaccaagggcgagaagatcatgctggccatcatcaccaagatgaccctcacacaggtctccacctggttcgccaacgcgcgccggcgcctcaagaaggagaacaagatgacgtggccgccgcggaacaagtgcgcagacgagaagcggccctacgcggagggcgaggaggaggaggggggcgaggaggaggcgcgggaggagcccctcaagagctccaagaacgcagagcccgtgggcaaagaggagaaggagctggagcttagtgacttggacgacttcgacccgctggaagcagagccgccggcgtgcgagctgaagccgcccttccactccctggacggcggtctggagcgcgtccccgccgcgcccgacggcccggtcaaggaggcctcaggcgcgctccggatgtctctggccgcgggtggcggagctgctctggacgaggacctggagagggcccggagctgtctccgcagcgcggcggccgggccggagccactgccgggcgcagagggcggccctcaggtctgcgaggccaagctggggtttgtgccggcgggggcgtcggcaggcctggaggctaagccgcgcatctggtccctggcccacacagccaccgccgccgccgccgccgccacctccctgagccagactgagtttccgtcgtgcatgctcaagcgccaaggtcccgcggcccctgcggctgtgtcctccgcgcccgccacgtccccgtctgtggcccttccccactctggcgccctggacaggcaccaggactccccggtaaccagtctcagaaactgggtggacggggtcttccacgaccccatcctcaggcacagcactttgaaccaggcctgggccaccgccaagggcgccctcctggaccccgggcctctgggacgctcgctgggggcgggcgcgaacgtgctgactgcacccctggcccgcgcctttccgcctgccgtgccccaggacgccccagctgcaggcgccgccagggagctgctcgccctgcccaaggccggcggcaaacccttctgcgcctagtaatgaactagtccgtaacttgaaagtatttcgatttcttggctttatatatcttgtggaaaggacgacttacgagaacggctatagtattt

SEQ ID NO: 110 - DNA, 1442 bp, Homo sapiens
  source 1..1442: mol_type = genomic DNA
accgccaccatgtccttcccacactttggacacccgtaccgcggcgcttcccagtttctggcgtcggcaagttccagcaccacatgctgcgaatctacccaacgctctgtctcagatgtggcatcaggctccaccccagcgcccgctctctgctgcgcaccctacgatagtcgactgctgggcagtgcgcgaccggagctgggcgccgccttgggcatctatggagcaccctatgcggccgctgcagctgcccagagctaccctggctacctgccctatagcccagagcccccctcactgtatggggcactgaatccacagtatgaatttaaggaggctgcagggagttttacatccagcctggcacaaccaggagcctattatccctatgagcggactctggggcagtaccaatatgaacggtatggcgcagtggaattgagtggcgccggtcgccgaaagaacgcgacccgggagaccaccagtacactcaaggcctggctcaacgagcaccgcaaaaacccctaccccactaagggtgagaagatcatgctggccatcatcaccaagatgaccctcacccaggtgtccacctggttcgccaacgcacgccggcgcctcaagaaagagaacaaaatgacatgggcgcccaagaacaaaggtggggaggagaggaaggcagagggaggagaggaggactcactaggctgcctaactgctgacaccaaagaagttactgctagccaggaggcccgggggctccggctgagtgacctggaagacctggaggaagaggaggaggaggaggaggaagctgaagacgaggaggtagtggccacagctggggacaggctgacggagttccgaaagggcgcgcagtcactgcctgggccgtgcgctgcagctcgagagggccgattggagcgcagggagtgcggcctggctgcgccccgcttctccttcaatgacccttccggatcggaagaagctgacttcctctcggcggagacaggcagccctaggttgaccatgcactacccatgcttggagaaaccgcgcatctggtctctggcgcacaccgcgacagccagcgctgttgaaggtgcacccccagcccggcctaggccacgaagtcctgagtgccgtatgattcctggacagcctcctgcctctgcccggcgactctcagtccccagagactccgcgtgcgacgagtcttcctgcatacccaaagcctttggaaaccccaagtttgccctgcagggactaccgctgaactgtgcgccgtgcccgcggaggagcgagcctgtagtgcagtgccagtacccgtctggagcagaagcaggttagtaatgaactagtccgtaacttgaaagtatttcgatttcttggctttatatatcttgtggaaaggacgaccgtcagaatcctacggttacagc

SEQ ID NO: 111 - DNA, 1544 bp, Homo sapiens
  source 1..1544: mol_type = genomic DNA
accgccaccatgtccttcccgcagctgggctacccgcagtacctgagcgccgcggggccgggcgcctacggcggcgagcgcccgggggtgctggccgcggccgctgcggcggctgccgccgcctcgtcgggccgaccgggggccgcggagctgggcggcggggcaggcgcggctgcagtcacctcggtgctgggcatgtacgcggcggcggggccgtacgcgggcgcgcccaactacagcgccttcctgccctacgccgcggatctcagcctcttctcgcagatgggctcgcagtatgaactgaaggacaaccctggggtgcaccccgccaccttcgcagcccacacggcgccggcttattacccctacggccagttccaatacggggaccccgggcggcccaagaacgccacccgcgagagcaccagcacgctcaaggcctggctcaacgagcaccgcaagaatccctaccccaccaagggcgagaagatcatgctggccatcatcaccaagatgaccctcacgcaggtctccacctggttcgccaacgcgcgccggcgcctcaagaaggagaacaaggtgacatggggagcgcgcagcaaggaccaggaagatggagcgctcttcggcagcgacaccgagggcgacccggagaaggccgaggacgacgaggagatcgacctggaaagcatcgacattgacaagatcgacgagcacgatggcgaccagagcaacgaggatgacgaggacaaggccgaggctccgcacgcgcccgcagccccttctgctcttgcccgggaccaaggctcgccgctggcagcagccgacgttctcaagccccaggactcgcccttgggcctggcaaaggaggccccagagccgggcagcacgcgcctgctgagccccggcgctgcagcgggcggcctgcagggtgcgccgcacggcaagcccaagatctggtcgctggcggagacagccacgagccccgacggtgcgcccaaggcttcgccaccaccacccgcgggccaccccggcgcgcacgggccctccgccggggcgccgctgcaacaccccgccttcctgcctagccacggactgtacacctgccacatcggcaagttctccaactggaccaacagcgcattcctcgcacagggctccctgctcaacatgcgctccttcctgggcgttggcgctccccacgccgcgccccatggccctcaccttcctgcacctccaccaccgcagccgccggtcgctattgccccgggggcactcaatggagacaaggcctcggtccgcagcagccccacgctcccagagagagacctcgtccccaggccagattcgccggcacagcagttaaagtcgcccttccagccggtacgcgacaactctctggccccgcaggagggaacgccgcggatcctagcagccctcccgtccgcctagtaatgaactagtccgtaacttgaaagtatttcgatttcttggctttatatatcttgtggaaaggacgatggtttccggactgtcgctaactg

SEQ ID NO: 112 - DNA, 1607 bp, Homo sapiens
  source 1..1607: mol_type = genomic DNA
accgccaccatgtccttcccccagctgggataccaatacatccgcccgctttacccgtccgagcgcccgggggccgctggcggcagcggcggcagcgcgggggcccggggcggcctgggtgccggagcctcggagctgaacgcctcggggtccctgtccaacgtgctctcgtccgtgtacggggcgccctacgccgcggccgctgcggccgccgccgcccaaggctacggcgccttcctgccctacgccgcggagctgcccatcttcccgcagctgggcgcgcagtatgagctgaaggacagccccggggtgcagcatccggccgcggctgccgcgtttccgcacccgcaccccgccttctacccgtatggccagtaccagttcggggacccgtcccgtcccaagaacgccaccagggagagcaccagcacgctgaaggcctggctcaacgagcaccgcaagaacccctaccccaccaagggcgagaagatcatgctggccatcatcaccaagatgaccctcacccaggtgtccacctggttcgccaacgcgcgccggcgcctcaagaaggagaataagatgacttgggcgcctcgcagccgcactgacgaggagggaaacgcttatgggagcgagcgcgaggaggaagacgaagaggaggacgaggaggacggcaaacgcgagctagagctggaggaggaggagctcgggggggaggaggaggacacggggggcgagggcctggctgacgacgacgaggacgaggagatcgatttggagaacttagacggcgcggccaccgagcctgagctgtccctggctggggcggcgcgcagggatggcgacctaggcctgggacccatttcggactccaaaaatagcgactcggaagatagctctgagggcttagaggaccggccactaccggtcctgagtctggctccagcgccaccaccagtggccgtggcctcgccgtctctgccgtcgccccccgtgagcctggacccctgcgctcccgcaccagcccccgcctccgccctgcagaagcccaagatctggtccctcgcggagactgccacaagcccggacaacccgcgccgctcgcctcccggcgcgggggggtctccaccgggggcagcggtcgcgccttccgccctgcagctctctccggccgccgccgccgccgccgctcacagactggtctcagcgccgctgggcaagttcccggcttggaccaaccggccgtttccaggcccaccgcccggcccccgcctgcacccgctctccctgctgggctctgcccctccgcacctgctgggacttcccggagccgcgggccacccggctgccgccgccgccttcgctcggccagcggagcccgaaggcggaacagatcgctgtagtgccttggaagtggagaaaaagttactcaagacagctttccagcccgtgcccaggcggccccagaaccatctggacgccgccctggtcttatcggctctctcctcatcctagtaatgaactagtccgtaacttgaaagtatttcgatttcttggctttatatatcttgtggaaaggacgacccgaattactaccgtaagagtgg

SEQ ID NO: 113 - DNA, 1517 bp, Homo sapiens
  source 1..1517: mol_type = genomic DNA
accgccaccatgtcctacccgcagggctacctgtaccaggcgcccggctcgctggcgctctactcgtgcccggcctacggcgcgtcggctttggcggctccgcgcagcgaggagctggcgcgctcggcgtcgggctcggcgttcagcccctacccgggctcggcggccttcacggcgcaggcggccaccggcttcgggagcccgctgcagtactcggccgacgccgccgccgccgccgccggcttcccgtcctacatgggcgcaccctacgacgcgcacaccaccggcatgaccggcgccatcagctaccacccgtacggcagcgcggcctacccgtaccagctcaacgaccccgcgtaccgcaagaacgccacgcgggacgccacggccactctcaaggcctggctcaacgagcaccgcaagaacccctaccccaccaagggcgagaagatcatgctagccatcatcaccaagatgaccctcacccaggtctccacctggttcgccaacgcgcgccggcgcctcaagaaggagaacaagatgacctgggccccgagaaacaaaagcgaagatgaggacgaggacgagggcgacgctaccagaagcaaggacgagagtcccgacaaggcgcaggagggcacggagacctcggcagaggacgaagggatcagcctgcacgtggactcgctcacggatcactcgtgctcggccgagtcggacggggagaagcttccgtgccgcgccggggaccccctgtgcgaatcgggctcggagtgcaaggacaagtatgacgacctggaggacgacgaggacgacgacgaggagggcgagcggggcctggcgccgcccaagcccgtgacctcgtcgccgcttaccggcttggaggcgccgctgctgagccccccgcccgaggccgcgccccgcggtggccgcaagacgccccagggcagccggacgtctccgggcgcgccgccccccgccagcaagcccaagctgtggtcgctggccgagatcgccacgtcggacctcaagcagccgagcctgggcccgggctgcgggccaccggggctgcccgcggccgccgcgccggcctcaaccggggcaccgccaggaggctcgccctaccctgcctcgccgctgctgggccgccccctctactacacgtcgcccttctacggcaactacacaaactacgggaacttgaacgcggcgctgcagggccagggtctcctgcggtacaactctgcggccgcggcccccggcgaggccctgcacaccgcgccaaaggcggccagcgacgcgggcaaggcgggcgcgcacccgctcgagtcccactaccggtccccgggcggcggctacgagcccaagaaagatgccagcgagggctgcaccgtggttggcgggggcgtccagccctacctatagtaatgaactagtccgtaacttgaaagtatttcgatttcttggctttatatatcttgtggaaaggacgactattgaagcaggcaatagctctt

SEQ ID NO: 114 - DNA, 1313 bp, Homo sapiens
  source 1..1313: mol_type = genomic DNA
accgccaccatgaagttggaggtgttcgtccctcgcgcggcccacggggacaagcagggcagtgacctggagggcgcgggcggcagcgacgcgccgtccccgctgtcggcggcgggagacgactccctgggctcagatggggactgcgcggccaacagcccggccgcgggcggcggcgccagagatacgcagggcgacggcgaacagagtgcgggaggcgggccgggcgcggaggaggcgatcccggcagcagctgctgcagcggtggtggcggagggcgcggaggccggggcggcggggccaggcgcgggcggcgcggggagcggcgagggtgcacgcagcaagccatatacgcggcggcccaagcccccctactcgtacatcgcgctcatcgccatggccatccgcgactcggcgggcgggcgcttgacgctggcggagatcaacgagtacctcatgggcaagttcccctttttccgcggcagctacacgggctggcgcaactccgtgcgccacaacctttcgctcaacgactgcttcgtcaaggtgctgcgcgacccctcgcggccctggggcaaggacaactactggatgctcaaccccaacagcgagtacaccttcgccgacggggtcttccgccgccgccgcaagcgcctcagccaccgcgcgccggtccccgcgcccgggctgcggcccgaggaggccccgggcctccccgccgccccgccgcccgcgcccgccgccccggcctcgccccgcatgcgctcgcccgcccgccaggaggagcgcgccagccccgcgggcaagttctccagctccttcgccatcgacagcatcctgcgcaagcccttccgcagccgccgcctcagggacacggcccccgggacgacgcttcagtggggcgccgcgccctgcccgccgctgcccgcgttccccgcgctcctccccgcggcgccctgcagggccctgctgccgctctgcgcgtacggcgcgggcgagccggcgcggctgggcgcgcgcgaggccgaggtgccaccgaccgcgccgcccctcctgcttgcacctctcccggcggcggcccccgccaagccactccgaggcccggcggccggcggcgcgcacctgtactgccccctgcggctgcccgcagccctgcaggcggcctcagtccgccgccctggcccgcacctgccgtacccggtggagacgctcctagcctagtaatgaactagtccgtaacttgaaagtatttcgatttcttggctttatatatcttgtggaaaggacgaaagagtattcattgcagcaagcag

SEQ ID NO: 115 - DNA, 3914 bp, Homo sapiens
  source 1..3914: mol_type = genomic DNA
accgccaccatgggtgacgttaaaaattttctgtatgcctggtgtggcaaaaggaagatgaccccatcctatgaaattagagcagtggggaacaaaaacaggcagaaattcatgtgtgaggttcaggtggaaggttataattacactggcatgggaaattccaccaataaaaaagatgcacaaagcaatgctgccagagactttgttaactatttggttcgaataaatgaaataaagagtgaagaagttccagcttttggggtagcatctccgcccccacttactgatactcctgacactacagcaaatgctgaaggagatttaccaacaaccatgggaggacctcttcctccacatctggctctcaaagcagaaaataattctgaggtaggggcctctggctatggtgttcctgggcccacctgggaccgaggagccaacttgaaggattactactcaagaaaggaagaacaagaagtgcaagcgactctagaatcagaagaagtggatttaaatgctgggcttcatggaaactggaccttggaaaatgctaaagctcgtctaaaccaatattttcagaaagaaaagatccaaggagaatataagtacacccaagtgggtcctgatcacaacaggagctttattgcagaaatgaccatttatatcaagcagctgggcagaaggatttttgcacgagaacatggatcaaataagaaattggcagcacagtcctgtgccctgtcacttgtcagacaactgtaccatcttggagtggttgaagcttactccggacttacaaagaagaaggaaggagagacagtggagccttacaaagtaaacctctctcaagatttagagcatcagctgcaaaacatcattcaagagctaaatcttgagattttgcccccgcctgaagatccttctgtgccagttgcactcaacattggcaaattggctcagttcgaaccatctcagcgacaaaaccaagtgggtgtggttccttggtcacctccacaatccaactggaatccttggactagtagcaacattgatgaggggcctctggcttttgctactccagagcaaataagcatggacctcaagaatgaattgatgtaccagttggaacaggatcatgatttgcaagcaatcttgcaggagagagagttactgcctgtgaagaaatttgaaagtgagattctggaagcaatcagccaaaattcagttgtcattattagaggggctactggatgtgggaaaaccacacaggttccccagttcattctagatgactttatccagaatgaccgagcagcagagtgtaacatcgtagtaactcagcccagaagaatcagtgcggtttctgtggcagagcgagttgcatttgaaagaggagaagagcctggaaaaagctgtggctacagcgttcgatttgagtctatacttcctcgtcctcatgccagtataatgttttgtactgtaggtgtgctcctgagaaaattagaagcaggcattcgaggaatcagtcatgtaattgtagatgaaatacatgaaagagatattaatactgacttccttttggtagtactgcgtgatgttgttcaggcttatcctgaagttcgcattgttcttatgtctgctactattgataccagcatgttttgtgaatatttcttcaattgccccatcattgaagtttatgggaggacttacccagttcaagaatattttctggaagactgcattcagatgacccactttgttcctccaccaaaagacaaaaagaagaaggataaggatgatgatggtggtgaggatgatgatgcaaattgcaacttgatctgtggtgatgaatatggtccagaaacaaggttgagcatgtctcaattgaacgaaaaggaaactccttttgaactcatcgaggctctacttaagtacattgaaacccttaatgttcctggagctgtgttggtttttttgcctggctggaatctgatttatactatgcagaagcatttggaaatgaatccacattttggaagccatcggtatcagattctacccctgcattctcagattcctcgagaggaacagcgcaaagtgtttgatccagtaccagttggagtaaccaaggttattttgtccacaaatattgctgaaacaagcattaccataaacgatgttgtttatgtcattgactcctgcaagcagaaagtgaaactcttcactgctcacaacaatatgaccaactatgctaccgtatgggcatcaaaaacaaaccttgagcaacggaaagggcgagctggccgagtacggcctggattctgctttcacctgtgcagccgagctcgttttgagagacttgaaacccacatgacaccagagatgttccgaacaccattgcatgaaattgctcttagcataaaacttctgcgtctaggaggaattggccaatttctggccaaagcaattgaacctccccctttggatgctgtgattgaagcagaacacactcttagagagcttgatgcattagatgccaatgatgagttgactcctttgggacgaatcctggctaaactccccattgagcctcgttttggcaaaatgatgataatggggtgtattttctacgtgggagatgctatctgtaccattgctgctgctacctgctttccagagcctttcatcaatgaaggaaagcggctgggctatatccatcgaaattttgctggaaacagattttctgatcacgtagcccttttatcagtattccaagcctgggatgatgctagaatgggtggagaagaagcagagatacgtttttgtgagcacaaaagacttaatatggctacactaagaatgacttgggaagccaaagttcagctcaaagagattttgattaattctgggtttccagaagattgtttgttgacacaagtgtttactaacactggaccagataataatttggatgttgttatctccctcctggcctttggtgtgtaccccaatgtatgctatcataaggaaaagaggaagattctcaccactgaagggcgtaatgcacttatccacaaatcatctgttaattgtccttttagtagccaagacatgaagtacccatctcccttctttgtatttggtgaaaagattcgaactcgagccatctctgctaaaggcatgactttagtcacccccctgcagttgcttctctttgcctccaagaaagtccaatctgatgggcagattgtgcttgtagatgactggattaaactgcaaatatctcatgaagctgctgcctgtatcactggtctccgggcagccatggaggctttggttgttgaagtaaccaaacaacctgctatcatcagccagttggaccccgtaaatgaacgtatgctgaacatgatccgtcagatctctagaccctcagctgctggtatcaaccttatgattggcagtacacggtatggagatggtccacgtcctcccaagatggcccgatacgacaatggaagcggatatagaaggggaggttctagttacagtggtggaggctatggcggtggctatagcagtggaggctatggtagcggaggctatggtggcagcgccaactcctttcgggcaggatatggtgcaggtgttggtggaggctatagaggagtttcccgaggtggctttagaggcaactctggaggagactacagagggcctagtggaggctacagaggatctgggggattccagcgaggaggtggtaggggggcctatggaactggctactttggacagggaagaggaggtggcggctattagtaatgaactagtccgtaacttgaaagtatttcgatttcttggctttatatatcttgtggaaaggacgaacccgacacgacgcgggcattcac

SEQ ID NO: 116 - DNA, 2150 bp, Homo sapiens
  source 1..2150: mol_type = genomic DNA
accgccaccatgacgaagtctaaggaggcagtgacattcaaggacgtggctgtggtcttctctgaggaggagctgcaactgctggaccttgcccagaggaagctgtaccgagatgtgatgctggagaacttcaggaatgtggtctcagtggggcatcagtccacaccagatggcctaccacagttagagagagaagaaaagctgtggatgatgaagatggcaacccagagagataactcctcaggagccaagaatctaaaagagatggagactcttcaagaagtaggattaaggtacctgcctcatgaagagcttttctgctcccagatctggcaacagattacaagagagttaatcaagtatcaagattctgtggtaaatattcaaagaacaggctgccagttggaaaaacgagatgatttgcactataaagatgagggattcagtaatcagagttcccatcttcaagttcacagagtccacactggtgaaaaaccctacaaaggagaacattgtgtgaaaagtttcagctggagctctcatcttcaaattaaccaaagggctcatgcaggagagaagccctacaaatgtgaaaaatgtgataatgccttccgtcggttttcaagtcttcaagcccatcagagagtccacagtagagcaaaatcatacacaaatgatgcaagttacaggagttttagtcagaggtcacatcttccccatcatcagagagttcccactggagagaatccatacaaatatgaagagtgtgggaggaatgttgggaaaagctcacattgtcaagctcctctgatagttcatacgggagagaaaccctataaatgtgaggagtgtggggtgggcttcagtcagagatcatatcttcaagttcatctgaaagttcacactggaaagaaaccatataagtgtgaagagtgtgggaagagcttcagttggcgttcacgactgcaggctcatgagcgaatccacactggcgagaaaccatacaaatgcaatgcatgtggcaagagctttagttacagctcacaccttaatattcattgtagaatccacacaggagagaaaccctataagtgtgaggagtgtgggaaaggtttcagtgtgggttcacaccttcaggcccatcagataagccacactggagagaagccatacaaatgtgaggagtgtgggaaaggcttctgccgggcctcaaatctgctggaccatcaaagaggccatactggagagaaaccgtatcagtgtgatgcatgtggtaagggcttcagtcgtagctcagattttaacattcattttagagtccatacaggggaaaaaccctataaatgtgaggagtgtggcaagggcttcagccaggcctcaaatcttctggcccatcaaagaggccacactggagagaaaccctacaaatgtggtacatgtgggaagggcttcagtcggagctcagatcttaatgtacactgtagaatccacacaggagagaaaccctataaatgcgagaggtgtggtaaggccttcagtcagttctccagccttcaggtgcatcagagagttcacactggagagaaaccatatcagtgtgcagagtgtgggaagggcttcagtgtaggttcacagcttcaagcccatcagaggtgccacactggagagaaaccctatcaatgtgaggagtgtgggaagggcttctgtcgggcctccaattttctggcacatcgtggagtccacacaggagaaaaaccataccgatgtgatgtgtgtggtaagcgcttcagacagagatcctaccttcaagcccaccagagggtccacacaggagagagaccatacaaatgtgaggaatgtgggaaagtcttcagctggagctcataccttcaagcccatcaaagagttcacaccggagaaaaaccatacaaatgtgaggagtgtgggaagggcttcagttggagctcaagtcttatcattcatcagcgagtccatgctgatgatgagggtgacaaggactttccttcatcagaggattcacacaggaaaactcgatagtaatgaactagtccgtaacttgaaagtatttcgatttcttggctttatatatcttgtggaaaggacgagtgaatcgagagagaagctcattt

SEQ ID NO: 117 - DNA, 2093 bp, Homo sapiens
  source 1..2093: mol_type = genomic DNA
accgccaccatggccctgtgttatggaactttctggggctaccctaagatgctggaagctgccaatctcatggagggcctagtggatatcggcccttgggtcactcttcccagaggacagcctgaggtgttggagtggggcctcccaaaggatcaggactcagtggcctttgaggatgtggctgtgaacttcacccatgaggagtgggctttgctgggtccatcacagaagaatctctacagagatgtgatgcgagaaaccattaggaacctgaactgtataggaatgaaatgggaaaaccagaacattgatgatcagcaccaaaatctcaggagaaatccaaggtgtgatgtggtagagagatttggtaaaagtaaagatggtagtcagtgtggagaaaccttaagccagattcgaaatagtattgtaaacaagaacactcccgccagagtagatgcatgtggaagcagtgtgaatggagaagtcataatgggtcattcatccctgaattgctacatcagagttgatactggacacaaacaccgggagtgtcatgaatatgcagagaagtcatatacacataagcagtgtgggaaaggcttaagttatcgccactcctttcaaacatgtgaaaggcctcacactggaaagaaaccctatgattgtaaggaatgtggaaaaaccttcagttctcctggaaaccttcgaagacatatggtagtaaaaggtggagatggaccttataaatgtgaattgtgtgggaaagcctttttttggcccagtttattacgtatgcatgaaagaactcacactggagagaaaccatatgaatgtaagcagtgttctaaagccttccctgtttacagttcctatctaagacatgaaaaaatacacactggggagaaaccgtatgaatgtaagcagtgttctaaagccttccctgattacagttcatatctaagacatgaaagaactcacactggagagaaaccctacaaatgtaaacaatgtgggaaagccttcagtgtttccggttcccttcgagtacatgaaagaattcacactggagagaaaccctatacatgtaaacagtgtgggaaagcgttttgtcatcttggaagctttcaaagacacatgataatgcacagtggagatggacctcataaatgtaagatatgtgggaaaggctttgattttcctggttcagcacgaattcatgaaggaactcacactctagagaaaccctatgaatgtaagcaatgtgggaaattgttatctcatcgctcaagctttcgaagacacatgatggcacacactggagatggccctcataaatgcacagtatgtgggaaagcctttgattctcctagtgtatttcaaagacatgaaaggactcacactggagagaaaccctatgaatgcaagcaatgtgggaaagccttccgtacttccagttcccttcgaaaacatgaaacaacacacactggagagcaaccctataaatgtaaatgtggaaaagcttttagtgatttattttcctttcaaagtcatgaaacaacacacagtgaagaggagccttatgaatgtaaggagtgtgggaaagcatttagttcttttaaatacttttgtcgccatgaaaggactcacagtgaagaaaaatcttatgagtgtcaaatttgtggcaaagccttcagtcgtttcagttacttaaaaactcatgaaaggactcacacggcagagaagccatatgaatgtaagcaatgcaggaaagcattcttttggccctctttccttctaagacatgaaaggactcacactggagaaagaccctatgaatgtaaacactgtggtaaagccttcagtcgttccagtttctgtcgagaacatgaaagaactcacactggagagaagccctatgaatgtaaggaatgtgggaaagccttcagttctctcagttcctttaatagacataaaaggacacactggaaggatattctatagtaatgaactagtccgtaacttgaaagtatttcgatttcttggctttatatatcttgtggaaaggacgactgcagattgagcgggacaaacaa

SEQ ID NO: 118 - DNA, 1949 bp, Homo sapiens
  source 1..1949: mol_type = genomic DNA
accgccaccatggactcagtggcctttgaggatgtggctgtgaacttcacccatgaggagtgggctttgctgggtccatcacagaagaatctctacagagatgtgatgcgagaaaccattaggaacctgaactgtataggaatgaaatgggaaaaccagaacattgatgatcagcaccaaaatctcaggagaaatccaaggtgtgatgtggtagagagatttggtaaaagtaaagatggtagtcagtgtggagaaaccttaagccagattcgaaatagtattgtaaacaagaacactcccgccagagtagatgcatgtggaagcagtgtgaatggagaagtcataatgggtcattcatccctgaattgctacatcagagttgatactggacacaaacaccgggagtgtcatgaatatgcagagaagtcatatacacataagcagtgtgggaaaggcttaagttatcgccactcctttcaaacatgtgaaaggcctcacactggaaagaaaccctatgattgtaaggaatgtggaaaaaccttcagttctcctggaaaccttcgaagacatatggtagtaaaaggtggagatggaccttataaatgtgaattgtgtgggaaagcctttttttggcccagtttattacgtatgcatgaaagaactcacactggagagaaaccatatgaatgtaagcagtgttctaaagccttccctgtttacagttcctatctaagacatgaaaaaatacacactggggagaaaccgtatgaatgtaagcagtgttctaaagccttccctgattacagttcatatctaagacatgaaagaactcacactggagagaaaccctacaaatgtaaacaatgtgggaaagccttcagtgtttccggttcccttcgagtacatgaaagaattcacactggagagaaaccctatacatgtaaacagtgtgggaaagcgttttgtcatcttggaagctttcaaagacacatgataatgcacagtggagatggacctcataaatgtaagatatgtgggaaaggctttgattttcctggttcagcacgaattcatgaaggaactcacactctagagaaaccctatgaatgtaagcaatgtgggaaattgttatctcatcgctcaagctttcgaagacacatgatggcacacactggagatggccctcataaatgcacagtatgtgggaaagcctttgattctcctagtgtatttcaaagacatgaaaggactcacactggagagaaaccctatgaatgcaagcaatgtgggaaagccttccgtacttccagttcccttcgaaaacatgaaacaacacacactggagagcaaccctataaatgtaaatgtggaaaagcttttagtgatttattttcctttcaaagtcatgaaacaacacacagtgaagaggagccttatgaatgtaaggagtgtgggaaagcatttagttcttttaaatacttttgtcgccatgaaaggactcacagtgaagaaaaatcttatgagtgtcaaatttgtggcaaagccttcagtcgtttcagttacttaaaaactcatgaaaggactcacacggcagagaagccatatgaatgtaagcaatgcaggaaagcattcttttggccctctttccttctaagacatgaaaggactcacactggagaaagaccctatgaatgtaaacactgtggtaaagccttcagtcgttccagtttctgtcgagaacatgaaagaactcacactggagagaagccctatgaatgtaaggaatgtgggaaagccttcagttctctcagttcctttaatagacataaaaggacacactggaaggatattctatagtaatgaactagtccgtaacttgaaagtatttcgatttcttggctttatatatcttgtggaaaggacgagcctacgggactttcccatcctac

SEQ ID NO: 119 - DNA, 2558 bp, Homo sapiens
  source 1..2558: mol_type = genomic DNA
accgccaccatgcccggacatcctggaagctgggaaatgggaccattgacatttatggatgtggccatagaattctgtctggaggagtggcaatgcctggacattgcacagcagaatttatataggaatgtgatgttagagaactacagaaacctggtcttcctgggtattgctgtctctaagccagacctgatcacctgtctggagcaagaaaaagagccttgggagcctatgaggagacatgaaatggtagccaaacccccagttatgtgttctcattttacccaagacttttggccagagcagcatataaaagatcctttccaaaaagcgacactgagaagatataaaaactgtgaacataaaaatgtacatttaaaaaaagaccataaaagtgtggatgagtgtaaggtgcacagaggaggttataatggatttaaccaatgtttgccagctacccagagcaaaatatttctatttgataaatgtgtgaaagcctttcataaattttcaaattcaaacagacataagataagccatactgaaaaaaaacttttcaaatgcaaagaatgtggcaaatcattttgcatgcttccacatctagctcaacataaaataattcataccagagtgaatttctgcaaatgtgaaaaatgtggaaaagcttttaactgcccttcaatcatcactaaacataagagaattaatactggagagaaaccctacacatgtgaagaatgtggcaaagtctttaattggtcctcacgccttactacacataaaaaaaattatactagatacaaactctacaaatgtgaagaatgtggcaaagcttttaacaagtcctcaatccttactacccataagataattcgcactggagagaaattctacaaatgtaaagaatgtgccaaagcttttaaccaatcctcaaaccttactgaacataagaaaattcatcctggagagaaaccttacaaatgtgaagaatgtggcaaagcctttaactggccctcaactcttactaaacataagagaattcatactggagagaaaccctacacatgtgaagaatgtggcaaagcctttaaccagttctcaaaccttactacacataagagaatccatactgcagagaaattctataaatgtacagaatgtggtgaagcttttagccggtcctcaaaccttactaaacataagaaaattcatactgaaaagaaaccctacaaatgtgaagaatgtggcaaagcttttaagtggtcctcaaagcttactgaacataagttaactcatactggagagaaaccctacaaatgtgaagaatgtggcaaagcctttaactggccctcaacccttactaaacataacagaattcatactggagagaaaccctacaaatgtgaagtatgtggcaaagcctttaaccagttctcaaaccttactacacataagagaattcatactgcagaaaaaccgtacaaatgtgaagaatgtggcaaagcttttagccggtcctcaaaccttactaaacataagaaaattcacattgaaaagaaaccctacaaatgtgaagaatgtggcaaagcttttaagtggtcctcaaagcttactgaacataagataactcatactggagagaaaccctacaaatgtgaagaatgtggcaaagcttttaaccatttctcaatccttaccaaacataagaggattcatactggagagaaaccctacaagtgtgaagaatgtggcaaagcttttacccaatcctcaaaccttactacacataagaaaattcatactggagagaaattctacaaatgtgaagaatgtggcaaagcttttacccaatcttcaaaccttactacacataaaaaaattcatactggaggaaaaccctacaaatgtgaagaatgtggcaaagcttttaaccagttctcaactcttactaaacataagataattcacactgaggagaaaccctacaaatgtgaagaatgtggcaaagcctttaagtggtcctcaacccttactaaacataagataattcatactggagagaaaccctacaaatgtgaagaatgtggcaaagcttttaaactgtcctcaaccctttctacacataagattattcatactggagagaaaccctacaaatgtgaaaaatgtggcaaagcttttaaccgatcctcaaaccttattgaacataagaaaattcatactggagagcaaccctacaaatgtgaagaatgtggcaaagcatttaactattcctcacaccttaatacacataagagaattcatactaaagagcaaccctacaaatgtaaagaatgtggcaaagctttcaaccaatattcaaaccttactacacataacaaaattcatactggagagaaactctacaaacctgaagatgtgacagtgattttgacaacacctcaaactttttcaaacataaaatagtaatgaactagtccgtaacttgaaagtatttcgatttcttggctttatatatcttgtggaaaggacgacggccaatcagcgagcactcttcc

SEQ ID NO: 120 - DNA, 2531 bp, Homo sapiens
  source 1..2531: mol_type = genomic DNA
accgccaccatgggaccattgacatttatggatgtggccatagaattctgtctggaggagtggcaatgcctggacattgcacagcagaatttatataggaatgtgatgttagagaactacagaaacctggtcttcctgggtattgctgtctctaagccagacctgatcacctgtctggagcaagaaaaagagccttgggagcctatgaggagacatgaaatggtagccaaacccccagttatgtgttctcattttacccaagacttttggccagagcagcatataaaagatcctttccaaaaagcgacactgagaagatataaaaactgtgaacataaaaatgtacatttaaaaaaagaccataaaagtgtggatgagtgtaaggtgcacagaggaggttataatggatttaaccaatgtttgccagctacccagagcaaaatatttctatttgataaatgtgtgaaagcctttcataaattttcaaattcaaacagacataagataagccatactgaaaaaaaacttttcaaatgcaaagaatgtggcaaatcattttgcatgcttccacatctagctcaacataaaataattcataccagagtgaatttctgcaaatgtgaaaaatgtggaaaagcttttaactgcccttcaatcatcactaaacataagagaattaatactggagagaaaccctacacatgtgaagaatgtggcaaagtctttaattggtcctcacgccttactacacataaaaaaaattatactagatacaaactctacaaatgtgaagaatgtggcaaagcttttaacaagtcctcaatccttactacccataagataattcgcactggagagaaattctacaaatgtaaagaatgtgccaaagcttttaaccaatcctcaaaccttactgaacataagaaaattcatcctggagagaaaccttacaaatgtgaagaatgtggcaaagcctttaactggccctcaactcttactaaacataagagaattcatactggagagaaaccctacacatgtgaagaatgtggcaaagcctttaaccagttctcaaaccttactacacataagagaatccatactgcagagaaattctataaatgtacagaatgtggtgaagcttttagccggtcctcaaaccttactaaacataagaaaattcatactgaaaagaaaccctacaaatgtgaagaatgtggcaaagcttttaagtggtcctcaaagcttactgaacataagttaactcatactggagagaaaccctacaaatgtgaagaatgtggcaaagcctttaactggccctcaacccttactaaacataacagaattcatactggagagaaaccctacaaatgtgaagtatgtggcaaagcctttaaccagttctcaaaccttactacacataagagaattcatactgcagaaaaaccgtacaaatgtgaagaatgtggcaaagcttttagccggtcctcaaaccttactaaacataagaaaattcacattgaaaagaaaccctacaaatgtgaagaatgtggcaaagcttttaagtggtcctcaaagcttactgaacataagataactcatactggagagaaaccctacaaatgtgaagaatgtggcaaagcttttaaccatttctcaatccttaccaaacataagaggattcatactggagagaaaccctacaagtgtgaagaatgtggcaaagcttttacccaatcctcaaaccttactacacataagaaaattcatactggagagaaattctacaaatgtgaagaatgtggcaaagcttttacccaatcttcaaaccttactacacataaaaaaattcatactggaggaaaaccctacaaatgtgaagaatgtggcaaagcttttaaccagttctcaactcttactaaacataagataattcacactgaggagaaaccctacaaatgtgaagaatgtggcaaagcctttaagtggtcctcaacccttactaaacataagataattcatactggagagaaaccctacaaatgtgaagaatgtggcaaagcttttaaactgtcctcaaccctttctacacataagattattcatactggagagaaaccctacaaatgtgaaaaatgtggcaaagcttttaaccgatcctcaaaccttattgaacataagaaaattcatactggagagcaaccctacaaatgtgaagaatgtggcaaagcatttaactattcctcacaccttaatacacataagagaattcatactaaagagcaaccctacaaatgtaaagaatgtggcaaagctttcaaccaatattcaaaccttactacacataacaaaattcatactggagagaaactctacaaacctgaagatgtgacagtgattttgacaacacctcaaactttttcaaacataaaatagtaatgaactagtccgtaacttgaaagtatttcgatttcttggctttatatatcttgtggaaaggacgattccggatggtgccaacctataca

SEQ ID NO: 121 - DNA, 2513 bp, Homo sapiens
  source 1..2513: mol_type = genomic DNA
accgccaccatggatgtggccatagaattctgtctggaggagtggcaatgcctggacattgcacagcagaatttatataggaatgtgatgttagagaactacagaaacctggtcttcctgggtattgctgtctctaagccagacctgatcacctgtctggagcaagaaaaagagccttgggagcctatgaggagacatgaaatggtagccaaacccccagttatgtgttctcattttacccaagacttttggccagagcagcatataaaagatcctttccaaaaagcgacactgagaagatataaaaactgtgaacataaaaatgtacatttaaaaaaagaccataaaagtgtggatgagtgtaaggtgcacagaggaggttataatggatttaaccaatgtttgccagctacccagagcaaaatatttctatttgataaatgtgtgaaagcctttcataaattttcaaattcaaacagacataagataagccatactgaaaaaaaacttttcaaatgcaaagaatgtggcaaatcattttgcatgcttccacatctagctcaacataaaataattcataccagagtgaatttctgcaaatgtgaaaaatgtggaaaagcttttaactgcccttcaatcatcactaaacataagagaattaatactggagagaaaccctacacatgtgaagaatgtggcaaagtctttaattggtcctcacgccttactacacataaaaaaaattatactagatacaaactctacaaatgtgaagaatgtggcaaagcttttaacaagtcctcaatccttactacccataagataattcgcactggagagaaattctacaaatgtaaagaatgtgccaaagcttttaaccaatcctcaaaccttactgaacataagaaaattcatcctggagagaaaccttacaaatgtgaagaatgtggcaaagcctttaactggccctcaactcttactaaacataagagaattcatactggagagaaaccctacacatgtgaagaatgtggcaaagcctttaaccagttctcaaaccttactacacataagagaatccatactgcagagaaattctataaatgtacagaatgtggtgaagcttttagccggtcctcaaaccttactaaacataagaaaattcatactgaaaagaaaccctacaaatgtgaagaatgtggcaaagcttttaagtggtcctcaaagcttactgaacataagttaactcatactggagagaaaccctacaaatgtgaagaatgtggcaaagcctttaactggccctcaacccttactaaacataacagaattcatactggagagaaaccctacaaatgtgaagtatgtggcaaagcctttaaccagttctcaaaccttactacacataagagaattcatactgcagaaaaaccgtacaaatgtgaagaatgtggcaaagcttttagccggtcctcaaaccttactaaacataagaaaattcacattgaaaagaaaccctacaaatgtgaagaatgtggcaaagcttttaagtggtcctcaaagcttactgaacataagataactcatactggagagaaaccctacaaatgtgaagaatgtggcaaagcttttaaccatttctcaatccttaccaaacataagaggattcatactggagagaaaccctacaagtgtgaagaatgtggcaaagcttttacccaatcctcaaaccttactacacataagaaaattcatactggagagaaattctacaaatgtgaagaatgtggcaaagcttttacccaatcttcaaaccttactacacataaaaaaattcatactggaggaaaaccctacaaatgtgaagaatgtggcaaagcttttaaccagttctcaactcttactaaacataagataattcacactgaggagaaaccctacaaatgtgaagaatgtggcaaagcctttaagtggtcctcaacccttactaaacataagataattcatactggagagaaaccctacaaatgtgaagaatgtggcaaagcttttaaactgtcctcaaccctttctacacataagattattcatactggagagaaaccctacaaatgtgaaaaatgtggcaaagcttttaaccgatcctcaaaccttattgaacataagaaaattcatactggagagcaaccctacaaatgtgaagaatgtggcaaagcatttaactattcctcacaccttaatacacataagagaattcatactaaagagcaaccctacaaatgtaaagaatgtggcaaagctttcaaccaatattcaaaccttactacacataacaaaattcatactggagagaaactctacaaacctgaagatgtgacagtgattttgacaacacctcaaactttttcaaacataaaatagtaatgaactagtccgtaacttgaaagtatttcgatttcttggctttatatatcttgtggaaaggacgagcctcatccagttggcgaagtgtt

SEQ ID NO: 122 - DNA, 719 bp, Homo sapiens
  source 1..719: mol_type = genomic DNA
accgccaccatggcggcagcggctgggggcgcggcgagccgccggggtgccgggcggccctgccccttctccatcgagcacatcctctccagcctgcccgagcggagcctcccggcccgggccgcctgcccaccgcagcccgccggtcgccagagccccgcgaagccagaggagcccggggcgcccgaggctgcgccctgcgcctgctgctgctgctgcggcccccgcgcggcgccctgcgggcccccagaggcggccgccgggctgggcgctcgtctggcgtggccgctgaggctgggaccggcggtgcccttgtctctgggtgcgccagccggaggttccggggcgctcccgggcgcggtcggcccgggttcgcagcggcgcacgaggcgccaccgcaccatcttcagcgaagagcagctgcaggcgctcgaggcgcttttcgtgcagaaccagtatcctgacgtgagtacgcgcgagcgcctggccggccgcatccgccttcgcgaggagcgcgtggaggtctggttcaagaaccgccgggccaaatggcgacaccagaagcgcgcgtcggcttccgcgaggctcctgcccggcgtcaagaagtccccgaaggggagctgctagtaatgaactagtccgtaacttgaaagtatttcgatttcttggctttatatatcttgtggaaaggacgatctcagccacggtccagcaaatgc

SEQ ID NO: 123 - DNA, 2438 bp, Homo sapiens
  source 1..2438: mol_type = genomic DNA
accgccaccatggatgaaatgacagctgtggtgaaaattgaaaaaggagttggtggcaataatgggggcaatggtaatggtggtggtgccttttcacaggctcgaagtagcagcacaggcagtagcagcagcactggaggaggagggcaggagtcccagccatcccctttggctctgctggcagcaacttgcagcagaattgagtcacccaatgagaacagcaacaactcccagggcccgagtcagtcagggggaacaggtgagcttgacctcacagccacacaactttcacagggtgccaatggctggcagatcatctcttcctcctctggggctacccctacctcaaaggaacagagtggcagcagtaccaatggcagcaatggcagtgagtcttccaagaatcgcacagtctctggtgggcagtatgttgtggctgccgctcccaacttacagaaccagcaagttctgacaggactacctggagtgatgcctaatattcagtatcaagtaatcccacagttccagaccgttgatgggcaacagctgcagtttgctgccactggggcccaagtgcagcaggatggttctggtcaaatacagatcataccaggtgcaaaccaacagattatcacaaatcgaggaagtggaggcaacatcattgctgctatgccaaacctactccagcaggctgtccccctccaaggcctggctaataatgtactctcaggacagactcagtatgtgaccaatgtaccagtggccctgaatgggaacatcaccttgctacctgtcaacagcgtttctgcagctaccttgactcccagctctcaggcagtcacgatcagcagctctgggtcccaggagagtggctcacagcctgtcacctcagggactaccatcagttctgccagcttggtatcatcacaagccagttccagctcctttttcaccaatgccaatagctactcaactactactaccaccagcaacatgggaattatgaactttactaccagtggatcatcagggaccaactctcaaggccagacaccccagagggtcagtgggctacaggggtctgatgctctgaacatccagcaaaaccagacatctggaggctcattgcaagcaggccagcaaaaagaaggagagcaaaaccagcagacacagcagcaacaaattcttatccagcctcagctagttcaagggggacaggccctccaggccctccaagcagcaccattgtcagggcagacctttacaactcaagccatctcccaggaaaccctccagaacctccagcttcaggctgttccaaactctggtcccatcatcatccggacaccaacagtggggcccaatggacaggtcagttggcagactctacagctgcagaacctccaagttcagaacccacaagcccaaacaatcaccttagccccaatgcagggtgtttccttggggcagaccagcagcagcaacaccactctcacacccattgcctcagctgcttccattcctgctggcacagtcactgtgaatgctgctcaactctcctccatgccaggcctccagaccattaacctcagtgcattgggtacttcaggaatccaggtgcacccaattcaaggcctgccgttggctatagcaaatgccccaggtgatcatggagctcagcttggtctccatggggctggtggtgatggaatacatgatgacacagcaggtggagaggaaggagaaaacagcccagatgcccaaccccaagccggtcggaggacccggcgggaagcatgcacctgcccctactgtaaagacagtgaaggaaggggctcgggggatcctggcaaaaagaaacagcatatttgccacatccaaggctgtgggaaagtgtatggcaagacctctcacctgcgggcacacttgcgctggcatacaggcgagaggccatttatgtgtacctggtcatactgtgggaaacgcttcacacgttcggatgagctacagaggcacaaacgtacacacacaggtgagaagaaatttgcctgccctgagtgtcctaagcgcttcatgaggagtgaccacctgtcaaaacatatcaagacccaccagaataagaagggaggcccaggtgtagctctgagtgtgggcactttgcccctggacagtggggcaggttcagaaggcagtggcactgccactccttcagcccttattaccaccaatatggtagccatggaggccatctgtccagagggcattgcccgtcttgccaacagtggcatcaacgtcatgcaggtggcagatctgcagtccattaatatcagtggcaatggcttctagtaatgaactagtccgtaacttgaaagtatttcgatttcttggctttatatatcttgtggaaaggacgactttatatttcggcggccgagcag

SEQ ID NO: 124 - DNA, 1943 bp, Homo sapiens
  source 1..1943: mol_type = genomic DNA
accgccaccatgagcgatccacagaccagcatggctgccactgctgctgtgagtcccagtgactacctgcagcctgccgcctccaccacccaggactcccagccatctcccttagccctgcttgctgcaacatgtagcaaaattggccctccagcagttgaagctgctgtgacacctcctgctcccccacagcccacaccgcggaaacttgtccctatcaaacctgcccctctccctctcagccccggcaagaatagctttggaatcttgtcctccaaaggaaatatacttcagattcaggggtcacaactgagcgcctcctatcctggagggcagctggtgttcgctatccagaatcccaccatgatcaacaaagggacccgatcaaatgccaatatccagtaccaggcggtccctcagattcaggcaagcaattcccaaaccatccaagtacagcccaatctcaccaaccagatccagatcatccctggcaccaaccaagccatcatcaccccctcaccgtccagtcacaagcctgtccccatcaagccagcccccatccagaagtcgagtacgaccaccacccccgtgcagagcggggccaatgtggtgaagctgacaggtgggggcggcaatgtgacgctcactctgcccgtcaacaaccttgtgaacgccagtgacaccggggcccctactcagctcctcactgaaagccccccaaccccgctgtctaagactaacaagaaagcaaggaagaagagccttcctgcctcccagccccctgtggctgtggctgagcaggtggagacggtgctgatcgagaccaccgcggacaacatcatccaggcaggaaataacctgctcattgttcagagccctggtgggggccagccagctgtggtccagcaggtccaggtggtgccccccaaggccgagcagcagcaggtggtacagatcccccagcaggctctgcgggtggtgcaggcggcatctgccaccctccccactgtaccccagaagccctcccagaactttcagatccaggcagctgagccgacacctactcaggtctacatccgcacgccttccggtgaggtgcagacagtccttgtccaggacagccccccagcaacagctgcagccacctctaacaccacctgtagcagccctgcatcccgtgctccccatctgagtgggaccagcaaaaagcactcagctgcaattctccgaaaagagcgtcccctgccaaagattgccccagccgggagcatcatcagcctgaatgcagcccagttggcggcagctgcccaggcaatgcagaccatcaacatcaatggtgtccaggtccagggcgtgcctgtcaccatcaccaacacaggcgggcagcagcagctgacagtgcagaatgtttctgggaacaacctgaccatcagtgggctgagccccacccagatccagctgcaaatggaacaagccctggccggagagacccagcccggggagaagcggcgccgcatggcctgcacgtgtcccaactgcaaggatggggagaagaggtctggagagcagggcaagaagaagcacgtgtgccacatccccgactgtggcaagacgttccgtaagacgtccttgctgcgtgcccatgtgcgcctgcacactggcgagcggccctttgtctgcaactggttcttctgtgggaagaggttcacacggagtgacgagctccaacggcatgctcgcacccacacaggggacaaacgcttcgagtgcgcccagtgtcagaagcgcttcatgaggagtgaccacctcaccaagcattacaagacccacctggtcacgaagaacttgtagtaatgaactagtccgtaacttgaaagtatttcgatttcttggctttatatatcttgtggaaaggacgaggtatagtccatatttaatctctt

SEQ ID NO: 125 - DNA, 2447 bp, Homo sapiens
  source 1..2447: mol_type = genomic DNA
accgccaccatgaccgctcccgaaaagcccgtgaaacaagaggaaatggctgccttggacgtggatagcggcggcggcggtggcggcggcggcggccacggcgagtatctgcagcagcagcaacagcacggaaacggtgcggtggcggcggcagcggcggcccaggacactcagccgtcaccgctcgctctgctggccgctacctgcagcaagatagggccgccatcgccgggcgacgacgaggaggaggcggccgccgcagccggggcccccgccgccgccggagcgacaggtgatttggcttctgcacagttaggaggagcaccaaaccgatgggaggttttgtcagccacacctacaactataaaagatgaagctggtaatctagtccagattccaagtgctgctacttcaagtgggcagtatgttcttccccttcagaatttgcagaatcaacaaatattttccgttgcaccaggatcagattcatcaaatggtacagtgtccagtgttcaatatcaagtgataccacagatccagtcagcagatggtcagcaggttcaaattggtttcacaggctcttcagataatgggggtataaatcaagaaagcagtcaaattcagatcattcctggctctaatcaaaccttacttgcctctggaacaccttctgctaacatccagaatctcataccacagactggtcaagtccaggttcagggagttgcaattggtggttcatcttttcctggtcaaacccaagtagttgctaatgtgcctcttggtctgccaggaaatattacgtttgtaccaatcaatagtgtcgatctagattctttgggactctcgggcagttctcagacaatgactgcaggcattaatgccgacggacatttgataaacacaggacaagctatggatagttcagacaattcagaaaggactggtgagcgggtttctcctgatattaatgaaactaatactgatacagatttatttgtgccaacatcctcttcatcacagttgcctgttacgatagatagtacaggtatattacaacaaaacacaaatagcttgactacatctagtgggcaggttcattcttcagatcttcagggaaattatatccagtcgcctgtttctgaagagacacaggcacagaatattcaggtttctacagcacagcctgttgtacagcatctacaacttcaagagtctcagcagccaaccagtcaagcccaaattgtgcaaggtattacaccacagacaatccatggtgtgcaagccagtggtcaaaatatatcacaacaggctttgcaaaatcttcagttgcagctgaatcctggaacctttttaattcaggcacagacagtgaccccttctggacaggtaacttggcaaacgtttcaagtacaaggggtccagaacttgcagaatttgcaaatacagaatactgctgcccaacaaataactttgacgcctgttcaaaccctcacacttggtcaagttgcggcaggtggagccttcacttcaactccagttagtctaagcactggtcagttgccaaatctacaaacagttacagtgaactctatagattctgctggtatacagctacatccaggagagaatgctgacagtcctgcagatattaggatcaaggaagaagaacctgatcctgaagagtggcagctcagtggtgattctaccttgaataccaatgacctaacacacttaagagtacaggtggtagatgaagaaggggaccaacaacatcaagaaggaaaaagacttcggagggtagcttgcacctgtcccaactgtaaagaaggtggtggaagaggtaccaatcttgggaaaaagaagcaacacatttgtcatataccaggatgtggtaaagtctatgggaagacctcacatctgagagctcatctgcgttggcattctggagaacgcccttttgtttgtaactggatgtactgtggtaaaagatttactcgaagtgatgaattacagaggcacagaagaacacatacaggtgagaagaaatttgtttgtccagaatgttcaaaacgctttatgagaagtgaccaccttgccaaacatattaaaacacaccagaataaaaaaggtattcactctagcagtacagtgctggcatctgtggaagctgcgcgagatgatactttgattactgcaggaggaacaacgcttatccttgcaaatattcaacaaggttctgtttcagggataggaactgttaatacttccgccaccagcaatcaagatatccttaccaacactgaaatacctttacagcttgtcacagtttctggaaatgagacaatggagtagtaatgaactagtccgtaacttgaaagtatttcgatttcttggctttatatatcttgtggaaaggacgagtagaccggtagatctaccatctg

SEQ ID NO: 126 - DNA, 2243 bp, Homo sapiens
  source 1..2243: mol_type = genomic DNA
accgccaccatagggccgccatcgccgggcgacgacgaggaggaggcggccgccgcagccggggcccccgccgccgccggagcgacaggtgatttggcttctgcacagttaggaggagcaccaaaccgatgggaggttttgtcagccacacctacaactataaaagatgaagctggtaatctagtccagattccaagtgctgctacttcaagtgggcagtatgttcttccccttcagaatttgcagaatcaacaaatattttccgttgcaccaggatcagattcatcaaatggtacagtgtccagtgttcaatatcaagtgataccacagatccagtcagcagatggtcagcaggttcaaattggtttcacaggctcttcagataatgggggtataaatcaagaaagcagtcaaattcagatcattcctggctctaatcaaaccttacttgcctctggaacaccttctgctaacatccagaatctcataccacagactggtcaagtccaggttcagggagttgcaattggtggttcatcttttcctggtcaaacccaagtagttgctaatgtgcctcttggtctgccaggaaatattacgtttgtaccaatcaatagtgtcgatctagattctttgggactctcgggcagttctcagacaatgactgcaggcattaatgccgacggacatttgataaacacaggacaagctatggatagttcagacaattcagaaaggactggtgagcgggtttctcctgatattaatgaaactaatactgatacagatttatttgtgccaacatcctcttcatcacagttgcctgttacgatagatagtacaggtatattacaacaaaacacaaatagcttgactacatctagtgggcaggttcattcttcagatcttcagggaaattatatccagtcgcctgtttctgaagagacacaggcacagaatattcaggtttctacagcacagcctgttgtacagcatctacaacttcaagagtctcagcagccaaccagtcaagcccaaattgtgcaaggtattacaccacagacaatccatggtgtgcaagccagtggtcaaaatatatcacaacaggctttgcaaaatcttcagttgcagctgaatcctggaacctttttaattcaggcacagacagtgaccccttctggacaggtaacttggcaaacgtttcaagtacaaggggtccagaacttgcagaatttgcaaatacagaatactgctgcccaacaaataactttgacgcctgttcaaaccctcacacttggtcaagttgcggcaggtggagccttcacttcaactccagttagtctaagcactggtcagttgccaaatctacaaacagttacagtgaactctatagattctgctggtatacagctacatccaggagagaatgctgacagtcctgcagatattaggatcaaggaagaagaacctgatcctgaagagtggcagctcagtggtgattctaccttgaataccaatgacctaacacacttaagagtacaggtggtagatgaagaaggggaccaacaacatcaagaaggaaaaagacttcggagggtagcttgcacctgtcccaactgtaaagaaggtggtggaagaggtaccaatcttgggaaaaagaagcaacacatttgtcatataccaggatgtggtaaagtctatgggaagacctcacatctgagagctcatctgcgttggcattctggagaacgcccttttgtttgtaactggatgtactgtggtaaaagatttactcgaagtgatgaattacagaggcacagaagaacacatacaggtgagaagaaatttgtttgtccagaatgttcaaaacgctttatgagaagtgaccaccttgccaaacatattaaaacacaccagaataaaaaaggtattcactctagcagtacagtgctggcatctgtggaagctgcgcgagatgatactttgattactgcaggaggaacaacgcttatccttgcaaatattcaacaaggttctgtttcagggataggaactgttaatacttccgccaccagcaatcaagatatccttaccaacactgaaatacctttacagcttgtcacagtttctggaaatgagacaatggagtagtaatgaactagtccgtaacttgaaagtatttcgatttcttggctttatatatcttgtggaaaggacgagtaggttcgccgtattcgctaaga

SEQ ID NO: 127 - DNA, 1298 bp, Homo sapiens
  source 1..1298: mol_type = genomic DNA
accgccaccatggccgcggtggccgtcctccggaacgactcgctgcaggcctttctccaggaccgcacccccagcgcctccccggacctgggcaagcactcgcccctggcattgctggccgccacctgtagccgcatcggccagccgggcgcggcggcgcccccggacttcctgcaggtgccctacgaccccgcgctgggctcaccctccaggctcttccacccgtggaccgccgacatgccggcgcactcgccaggcgcactgccgcccccgcatcccagcttggggctgacgccgcagaagacgcacctgcagccgtccttcggggctgcgcacgagcttccccttacaccccccgccgacccctcgtacccctacgagttctcgccggtcaagatgctgccctcgagcatggcggctctgcccgccagctgcgcgcccgcctacgtgccctacgcggcgcaggccgcgctgccgccaggctactccaacctgctgcctccgccgccgccaccgcccccgccgcccacctgccgccagttgtcacccaacccggcccccgacgacctcccgtggtggagcatcccgcaggcgggcgccgggccgggggcctccggggttccgggaagcggcctctccggcgcctgtgccggggccccccacgcgccccgcttccccgcctctgcggccgctgctgctgcggccgccgccgccctacaaagaggcctggtgttgggcccgtcggactttgcgcagtaccagagccagatcgccgcgctgctgcagaccaaggcccccctggcggccacggccaggaggtgccgccgctgccgctgtcccaactgccaggcggcgggcggcgcccccgaggcggagccggggaagaagaagcagcacgtgtgccacgtgccgggctgcggcaaggtgtacgggaagacgtcgcacctgaaggcgcacctgcgctggcacacgggcgagcgacccttcgtgtgcaactggctcttctgcgggaagagcttcacgcgctcggacgagctgcagcggcacctgcggactcacacgggcgagaagcgctttgcctgtcccgagtgcggcaagcgcttcatgcgcagcgaccacctcgcgaagcacgtcaagactcaccagaataagaagctcaaagtcgctgaggccggggttaagcgggaggacgcgcgggacctgtagtaatgaactagtccgtaacttgaaagtatttcgatttcttggctttatatatcttgtggaaaggacgatcgaaactcgtacagcctatacca

SEQ ID NO: 128 - DNA, 1343 bp, Homo sapiens
  source 1..1343: mol_type = genomic DNA
accgccaccatgctgacggcagcgtgcagcaaatttggtggctctagccctctgcgggactcaacaactctgggcaaagcaggcacaaagaagccgtactctgtgggcagtgacctttcagcctccaaaaccatgggggatgcttatccagccccctttacaagcactaatgggctcctttcacctgcaggcagtcctccagcacccacctcaggctatgctaatgattaccctcccttttcccactcattccctgggcccacaggcacccaggaccctgggctactagtgcccaaggggcacagctcttctgactgtctgcccagtgtctacacctctctggacatgacacacccctatggctcctggtacaaggcaggcatccatgcaggcatttcaccaggcccaggcaacactcctactccatggtgggatatgcaccctggaggcaactggctaggtggtgggcagggccagggtgatgggctgcaagggacactgcccacaggtccagctcagcctccactgaacccccagctgcccacctacccatctgactttgctccccttaatccagccccctacccagctccccacctcttgcaaccagggccccagcatgtcttgccccaagatgtctataaacccaaggcagtgggaaatagtgggcagctagaagggagtggtggagccaaacccccacggggtgcaagcactgggggtagtggtggatatgggggcagtggggcagggcgctcctcctgcgactgccctaattgccaggagctagagcggctgggagcagcagcggctgggctgcggaagaagcccatccacagctgccacatccctggctgcggcaaggtgtatggcaaggcttcgcacctgaaggcccacttgcgctggcacacaggcgagaggcccttcgtctgcaactggctcttctgcggcaagaggttcactcgttcggatgagctggagcgtcatgtgcgcactcacacccgggagaagaagttcacctgcctgctctgctccaagcgctttacccgaagcgaccacctgagcaaacaccagcgcacccatggagaaccaggcccgggtccccctcccagtggccccaaggagctgggggagggccgcagcacgggggaagaggaggccagtcagacgccccgaccttctgcctcgccagcaaccccagagaaagcccctggaggcagccctgagcagagcaacttgctggagatctagtaatgaactagtccgtaacttgaaagtatttcgatttcttggctttatatatcttgtggaaaggacgattaacgttataaggaggactctgt

SEQ ID NO: 129 - DNA, 1397 bp, Homo sapiens
  source 1..1397: mol_type = genomic DNA
accgccaccatggcgtcctccctgcttgaggaggaagttcactatggctccagtcccctggccatgctgacggcagcgtgcagcaaatttggtggctctagccctctgcgggactcaacaactctgggcaaagcaggcacaaagaagccgtactctgtgggcagtgacctttcagcctccaaaaccatgggggatgcttatccagccccctttacaagcactaatgggctcctttcacctgcaggcagtcctccagcacccacctcaggctatgctaatgattaccctcccttttcccactcattccctgggcccacaggcacccaggaccctgggctactagtgcccaaggggcacagctcttctgactgtctgcccagtgtctacacctctctggacatgacacacccctatggctcctggtacaaggcaggcatccatgcaggcatttcaccaggcccaggcaacactcctactccatggtgggatatgcaccctggaggcaactggctaggtggtgggcagggccagggtgatgggctgcaagggacactgcccacaggtccagctcagcctccactgaacccccagctgcccacctacccatctgactttgctccccttaatccagccccctacccagctccccacctcttgcaaccagggccccagcatgtcttgccccaagatgtctataaacccaaggcagtgggaaatagtgggcagctagaagggagtggtggagccaaacccccacggggtgcaagcactgggggtagtggtggatatgggggcagtggggcagggcgctcctcctgcgactgccctaattgccaggagctagagcggctgggagcagcagcggctgggctgcggaagaagcccatccacagctgccacatccctggctgcggcaaggtgtatggcaaggcttcgcacctgaaggcccacttgcgctggcacacaggcgagaggcccttcgtctgcaactggctcttctgcggcaagaggttcactcgttcggatgagctggagcgtcatgtgcgcactcacacccgggagaagaagttcacctgcctgctctgctccaagcgctttacccgaagcgaccacctgagcaaacaccagcgcacccatggagaaccaggcccgggtccccctcccagtggccccaaggagctgggggagggccgcagcacgggggaagaggaggccagtcagacgccccgaccttctgcctcgccagcaaccccagagaaagcccctggaggcagccctgagcagagcaacttgctggagatctagtaatgaactagtccgtaacttgaaagtatttcgatttcttggctttatatatcttgtggaaaggacgatacggcagaggagtactcggtccg

SEQ ID NO: 130 - DNA, 1868 bp, Homo sapiens
  source 1..1868: mol_type = genomic DNA
accgccaccatgttagagaactacagaaacctggtcttcctgggtattgctgcctttaagccagacctgatcatttttctggagcaaggaaaagagccctggaatatgaagagacatgagatggtggaagaacccccagttatatgttctcatttttcccaagagttttggccagagcaaggcatagaagattctttccaaaaaatgatattgagaagatatgacaaatgtggacatgagaatttacacttaaaaattagttgtaccaatgtggatgagtgtaacgtgcacaaagaaggttataataaacttaaccagagtttaacaactacacagagcaaagtatttcaatgtggcaaatatgcaaacgtctttcataaatgttcaaattcaaacagacataagataaggcatactggagagaaaggtttgaaatgtaaagaatatgtcagatcattttgcatgctttcacacctatctcaacatgaaagaatttatactagagagaattcctacaaatgtgaagaaaatggcaaagcttttaactggtcctcaacccttacttattataagagtattcatactggagagaaaccctacaaatgtgaagaatgtggcaaagcctttagtaagttctcaatccttactaaacataaggtaattcatactggagagaaaccctacaaatgtgaagaatgtggcaaagcttttaatcgatcctcaatccttactaaacataagataattcatactggagagaaaccctacaaatgtgaagaatgtggcaaaggatttagtagcgtctcaacccttaatacacataaggcaattcatgctgaagagaagccctacaaatgtgaagaatgtggcaaagcttccaactcgtcctcaaagctcatggaacataagagaattcatactggagagaaaccctacaagtgtgaagaatgtggcaaagccttcagctggtcctcaagccttactgaacacaagagaattcatgctggagagaaaccctacaaatgtgaagaatgcgggaaagcttttaatcgatcctcaatccttactaaacataagattattcatactggagagaaaccctacaaatgtgaaggatgtggcaaagcctttagtaaggtctcaacccttaatacacataaggcaattcatgctgaagagaagccctacaaatgtgaagaatgtggcaaagcttccaactcatcctcaaagctcatggaacataagagaattcatactggagagaaaccctacaagtgtgaagaatgtggcaaagccttcagctggtcctcaagccttactgaacacaagagaattcatgctggagagaaaccctacaaatgtgaagaatgtggcaaagccttcacctggtcctcaagctttactaaacacaagagaattcatgctgcagagaaaccttacaaatgtgaagaatgtggcaaaggctttagtacgttctcaatccttactaaacataagataattcatactggagagaaacgctacaaatgtgaagaatgtggcaaagccttcagctggtcctcgatccttactgaacataagataattcatactggagagaaaccctacaaatgtgaagaatgtggcaaagccttcagcagatcctcaagccttactagacacaagagaattcatactggagagaaaccctacaaatgtgaagaatgtggcaaagcttttaagtcatcctcaactgttagttatcataagaaaattcatactggagagaatccctagtaatgaactagtccgtaacttgaaagtatttcgatttcttggctttatatatcttgtggaaaggacgataccgcaggcgaagttgcaatggt

SEQ ID NO: 131 - DNA, 1808 bp, Homo sapiens
  source 1..1808: mol_type = genomic DNA
accgccaccatgggactgttgacatttagggatgtggccatagaattctctctggaagaatggcaatgcctggacactgcacagcggaatttatataaaaatgtgattttagagaactacagaaacctggtcttcctgggtattgctgtctctaagcaagacctgatcacctgtctggagcaagaaaaagagcctttgactgtgaagagacatgagatggtgaatgaacccccagtaatgtgttctcattttgcccaagagttttggccagagcagaacataaaagattcttttgaaaaagtgacactgagaagatatgaaaaatgtggaaatgataattttcagttaaaaggctgtaaaagtgtggatgaatgtaagttgcacaagggaggttataatggacttaaccaatgtttaccaactatgcagagcaaaatgtttcaatgtgataaatatgtgaaagtctttaataaattttcacattcagatagacataagataaaacatatggaaaataaacctttcaaatgtaaagaatgtggcagatcattttgcatgctttcacacctaactcgacatgaaagaaattataccaaggtgaatttctgcaaatgtgaagaatgtgaaaaagctgttaaccaatcttcaaagcttactaaacataaaagaatttatacttgtgagaaactctacaaatgtcaagaatgtgacagaacttttaaccaattctcaaaccttactgaatataaaaaagattatgctcgagagaaaccatacaaatgtgaagaatgtggcaaagcctttaaccagtcctcacaccttactacacataagataattcatacaggagagaaaccctacaaatgtgaagaatgtggcaaagcctttaaccagttctcaaatcttactacacataaaaaaattcatactggagagcaaccctacatatgtgaagaatgtggcaaggcttttacccaatcctcaacccttactacacataagagaattcatactggagaaaaaccctacaaatgtgaagaatgtggaaaagcttttaaccgatcctcaaaacttactgaacataaaaacattcatactggagagcaaccctacaaatgtgaggaatgcggcaaagcttttaaccgatcctcaaatcttacggaacataggaaaattcataccgaagagaaaccctacaaatgtaaagaatgtggcaaagcttttaaacactcctcagcccttactacacataagagaattcacactggagagaaaccctacaaatgtgaagaatgtggcaaagcttttaaccgatcctcaaaacttactgaacataagaaacttcatactggaaagaaaccctacaaatgtgaagaatgtggcaaagcttttatccaatcctcaaaacttactgaacataagaaaattcattctggagagataccctacaagtgtgaagaatgtggcaaagcttttaaacactcctcatcccttactacacataaaagaattcatactggggagaaaccctacaaatgtgaagaatgtggcaaagcttttagccgatcctcaaaacttactgaacataagataattcatactggagagaaaccctataaatgtgagagatgtgacaaagcttttaaccaatctgcaaaccttactaaacataaaaaaatacatactggagagaaactacagaactggaatgtgtagtaatgaactagtccgtaacttgaaagtatttcgatttcttggctttatatatcttgtggaaaggacgatcacacttgataggaagccaacta

SEQ ID NO: 132 - DNA, 1829 bp, Homo sapiens
  source 1..1829: mol_type = genomic DNA
accgccaccatggccatgtcccaggaatcattgaccttcaaggacgtgtttgtggacttcaccctggaggagtggcagcaactggactctgcccagaagaacctctacagggatgtcatgcttgagaactacagccacctggtgtccgtggggcatctagttgggaagccagatgtgatcttcaggttgggaccaggtgacgagtcctggatggcagatggagggaccccggtacggacctgtgcagtctgggaagttgacgagcagatagatcactacaaggaaagccaagacaaatttctgtggcaagctgcattcataggcaaggaaacactgaaggatgaaagtggtcaagaatgtaaaatatgtagaaaaatcatttatctcaacacagactttgtttctgtaaaacaaagactccctaaatattattcatgggaaaggtgttcaaaacatcatttaaactttcttggtcaaaatagaagctatgtaagaaagaaagatgatggatgtaaggcatattggaaagtatgcctccattataatcttcataaagctcaacctgcagagagattttttgaccctaatcaacgagggaaagccctccaccaaaagcaagcccttagaaaaagtcagagaagtcaaactggggagaaactctacaaatgtactgaatgtggaaaagtgtttatccagaaagcaaacttagttgtacatcaaagaactcacaccggagagaaaccttatgaatgctgcgaatgtgcaaaagccttcagccagaagtcaaccctcatagcacaccagagaactcacacaggggagaagccctatgaatgcagtgaatgtggaaaaacctttatccagaagtcaactctgattaaacatcaacgaactcatacaggagagaaaccatttgtatgtgacaaatgtccaaaagcctttaagagttcatatcatcttattagacatgaaaaaacacacattagacaagcattttataaaggtattaaatgtactacgtccagccttatatatcaaagaattcacacaagtgagaaacctcagtgcagtgaacatgggaaagcctctgatgagaagcccagtcccactaaacattggagaactcatacaaaagagaacatttatgagtgtagtaaatgtgggaaaagcttcagaggaaagtcacacctctctgttcatcagagaattcatacaggagagaaaccctatgaatgtagtatatgtgggaagactttcagtggaaagtcacacctctctgtccatcatagaactcatacaggagagaaaccttatgaatgcagaagatgtgggaaagcctttggggagaagtcaacccttattgtacatcagagaatgcatacaggagagaaaccctataaatgcaacgaatgtgggaaagcctttagtgagaagtcaccactgattaaacatcagagaattcatacaggagagagaccctatgaatgcactgactgtaaaaaagccttcagtaggaagtcaactctcatcaaacatcagagaattcatacaggagaaaaaccttacaaatgtagtgaatgtgggaaggccttcagtgtgaaatcaactctcattgtgcatcacagaactcatacaggagagaaaccttatgaatgcagagactgtgggaaagcattcagtgggaagtcaactctcattaaacatcagagaagtcacacaggagataaaaacctatagtaatgaactagtccgtaacttgaaagtatttcgatttcttggctttatatatcttgtggaaaggacgagaggtacagtgtaggtctctcacc

SEQ ID NO: 133 - DNA, 1847 bp, Homo sapiens
  source 1..1847: mol_type = genomic DNA
accgccaccatggccatgtcccaggaatcattgaccttcaaggacgtgtttgtggacttcaccctggaggagtggcagcaactggactctgcccagaagaacctctacagggatgtcatgcttgagaactacagccacctggtgtccgtggggcatctagttgggaagccagatgtgatcttcaggttgggaccaggtgacgagtcctggatggcagatggagggaccccggtacggacctgtgcaggtgaggacaggccagaagtctgggaagttgacgagcagatagatcactacaaggaaagccaagacaaatttctgtggcaagctgcattcataggcaaggaaacactgaaggatgaaagtggtcaagaatgtaaaatatgtagaaaaatcatttatctcaacacagactttgtttctgtaaaacaaagactccctaaatattattcatgggaaaggtgttcaaaacatcatttaaactttcttggtcaaaatagaagctatgtaagaaagaaagatgatggatgtaaggcatattggaaagtatgcctccattataatcttcataaagctcaacctgcagagagattttttgaccctaatcaacgagggaaagccctccaccaaaagcaagcccttagaaaaagtcagagaagtcaaactggggagaaactctacaaatgtactgaatgtggaaaagtgtttatccagaaagcaaacttagttgtacatcaaagaactcacaccggagagaaaccttatgaatgctgcgaatgtgcaaaagccttcagccagaagtcaaccctcatagcacaccagagaactcacacaggggagaagccctatgaatgcagtgaatgtggaaaaacctttatccagaagtcaactctgattaaacatcaacgaactcatacaggagagaaaccatttgtatgtgacaaatgtccaaaagcctttaagagttcatatcatcttattagacatgaaaaaacacacattagacaagcattttataaaggtattaaatgtactacgtccagccttatatatcaaagaattcacacaagtgagaaacctcagtgcagtgaacatgggaaagcctctgatgagaagcccagtcccactaaacattggagaactcatacaaaagagaacatttatgagtgtagtaaatgtgggaaaagcttcagaggaaagtcacacctctctgttcatcagagaattcatacaggagagaaaccctatgaatgtagtatatgtgggaagactttcagtggaaagtcacacctctctgtccatcatagaactcatacaggagagaaaccttatgaatgcagaagatgtgggaaagcctttggggagaagtcaacccttattgtacatcagagaatgcatacaggagagaaaccctataaatgcaacgaatgtgggaaagcctttagtgagaagtcaccactgattaaacatcagagaattcatacaggagagagaccctatgaatgcactgactgtaaaaaagccttcagtaggaagtcaactctcatcaaacatcagagaattcatacaggagaaaaaccttacaaatgtagtgaatgtgggaaggccttcagtgtgaaatcaactctcattgtgcatcacagaactcatacaggagagaaaccttatgaatgcagagactgtgggaaagcattcagtgggaagtcaactctcattaaacatcagagaagtcacacaggagataaaaacctatagtaatgaactagtccgtaacttgaaagtatttcgatttcttggctttatatatcttgtggaaaggacgattacgcataaataagcccgcaaga

SEQ ID NO: 134 - DNA, 1460 bp, Homo sapiens
  source 1..1460: mol_type = genomic DNA
accgccaccatgtttgccacatctggggcagtggcagcggggaagccttactcgtgcagcgaatgtggcaagagcttctgctacagctcagtgctgctgcgacatgaacgagctcacggcggtgacggccgcttccgttgcctagaatgcggtgagcgctgtgcacgggctgctgacctccgagcgcacaggcgcacgcatgctggccagaccctctacatctgcagtgagtgcggacaaagcttccgccacagcggccgtcttgacctacacttgggcgcacaccggcagcgatgccgcacttgcccctgccgcacatgcggccggcgcttcccgcacctcccggcgctgctgctacaccggcgccgccagcatctgccagagcggccccgccgctgcccgctgtgcgcccgcaccttccggcagagcgcgctgctcttccaccaggcgcgggcgcaccccttggggacaacctctgaccctgctgccccaccccaccgctgcgcgcagtgcccgcgagccttccgaagcggcgccgggctgcggagtcacgcgcgcatccacgtgtcccggagccccacgcgaccccgtgtctcagacgcccaccagtgtggcgtgtgcggcaagtgctttggcaagagctctacgctgacgcgacacctgcagacgcactcgggggagaaacccttcaagtgcccggagtgcggcaagggcttcctggagagcgccacgctggtgcgccaccagcgcacacacacgggcgagaagccgtacgcatgtggcgactgtggacgctgcttcagcgagagttccacgctgctgcgccatcggcgcagccatcagggcgagcggccacatgcgtgcgccacttgcggcaagggtttcgggcagcgctccgacctggtggtgcaccagcgcatccacacgggcgagaagcccttcgcgtgccccgagtgcggccgccgcttcagcgaccgctcggacctcaccaagcaccggcgcacgcacacgggcgagaagccctaccgctgcgaactgtgcggcaagcggttcacgtgcgtgtccaatctcaacgtgcatcggcgcaaccatgccggccacaagccacacaaatgccccgagtgcagcaaggccttcagcgtcgcctccaagcttgcactgcaccgcaagacgcacctgggcgaacggccagcggagtgcgcagagtgcggcaagtgcttcagccacagccgctcgctgtcacagcatcagcgggcccacacgcgcgcccgcaccgctgccgccgttgccatccagtccgcagtgggcactgccctcgtctttgaggggccggctgaacaggaaaagccagggttctctgtgtcctagtaatgaactagtccgtaacttgaaagtatttcgatttcttggctttatatatcttgtggaaaggacgacctttctaggcgccgtttcgcttg

SEQ ID NO: 135 - DNA, 1706 bp, Homo sapiens
  source 1..1706: mol_type = genomic DNA
accgccaccatgttgtccccagtgtcccgagacgcgtctgatgctctgcagggacggaagtgcctgcgtccccgatcgagacgcctgccgctcccggcagctgtccgcgcccacggtcctatggcggagctaacggactccgcgcggggctgtgtggtctttgaggatgtgtttgtatacttctctcgggaagaatgggagcttcttgatgatgctcagagacttttgtaccatgatgtgatgctggagaactttgcacttttagcctcactgggaattgcattttccagatcacgtgcagtcatgaaactagagcgaggagaagagccctgggtgtatgaccaggtggatatgacttcagccacagaaagagaggcccagaggggacttagacctggttgttggcatggagtggaggatgaagaggtatcttctgagcagagcatttttgtagcaggagtgtcagaggtcaggactctcatggcagagctggagtctcacccatgtgacatatgtggcccaatattgaaagataccttacacctggctaaataccatgggggaaaagccaggcagaaaccatacttgtgtggggcatgtggaaagcaattctggttcagtacagactttgaccagcaccagaaccagcccaatggagggaaacttttcccaaggaaggagggcagagactctgtgaaaagctgcagagtccatgtgccagagaagaccctcacatgtgggaaaggtaggagagacttttcagccacatctggccttcttcagcatcaggcctctctcagcagcatgaagccccacaagagcactaagcttgtgagtggctttctcatgggacagaggtatcacaggtgtggtgaatgtgggaaagccttcacccgcaaagacacacttgctcggcatcagagaatccacactggagaaaggccttatgagtgtaacgaatgtgggaaattcttcagccaaagctatgacctctttaaacaccagacagttcacactggagaaaggccatacgagtgcagcgaatgtgggaaattctttagacaaatctccggcctgattgagcacaggcgagttcacacgggtgaaagactctatcagtgtggcaaatgtgggaaattttttagcagtaagtctaatctcattcgacaccaggaagttcacacaggagccaggccttatgtatgcagcgaatgtgggaaagagttcagtcggaaacacacacttgttctgcaccaacgaactcacactggagaaaggccttatgagtgcagtgaatgtgggaaggcctttagccaaagctcccaccttaatgtacactggagaattcacagcagtgattatgagtgtagcagatgtggtaaagctttcagctgcatctccaaactcattcagcaccagaaagttcactctggagaaaagccttatgagtgcagcaagtgcgggaaagccttcactcaaagacccaacctcatcaggcactggaaagtccacactggggaaaggccttatgtgtgtagtgagtgcgggagagaattcatccggaaacagacacttgttctgcaccagagggttcatgctggagaaaagctttagtaatgaactagtccgtaacttgaaagtatttcgatttcttggctttatatatcttgtggaaaggacgaactgagcgttcagtcttctccaac

SEQ ID NO: 136 - DNA, 413 bp, Homo sapiens
  source 1..413: mol_type = genomic DNA
accgccaccatgagcgataacgatgacatcgaggtggagagcgacgaagagcaaccgaggtttcaatctgcggctgacaaacgggctcatcataatgcactggaacgaaaacgtagggaccacatcaaagacagctttcacagtttgcgggactcagtcccatcactccaaggagagaaggcatcccgggcccaaatcctagacaaagccacagaatatatccagtatatgcgaaggaaaaaccacacacaccagcaagatattgacgacctcaagcggcagaatgctcttctggagcagcaaggggaaagcgagagctagtaatgaactagtccgtaacttgaaagtatttcgatttcttggctttatatatcttgtggaaaggacgataggtcttcgggttctgaagtatt

SEQ ID NO: 137 - DNA, 395 bp, Homo sapiens
  source 1..395: mol_type = genomic DNA
accgccaccatgctcttctggagcagcaaggggaaagcgagagctgatcaagttctttgttcctggggaattcacttctcttcctccctcatggaagatgcaagtaaaaggaaattccgtgcactggagaaggcgaggtcaagtgcccaactgcagaccaactacccctcctcagacaacagcctctacaccaacgccaagggcagcaccatctctgccttcgatgggggctcggactccagctcggagtctgagcctgaagagccccaaagcaggaagaagctccggatggaggccagctagtaatgaactagtccgtaacttgaaagtatttcgatttcttggctttatatatcttgtggaaaggacgactgcgagcaactagaaggcaggag

SEQ ID NO: 138 - DNA, 353 bp, Homo sapiens
  source 1..353: mol_type = genomic DNA
accgccaccatgagcgataacgatgacatcgaggtggagagcgacgaagagcaaccgaggtttcaatctgcggctgacaaacgggctcatcataatgcactggaacgaaaacgtagggaccacatcaaagacagctttcacagtttgcgggactcagtcccatcactccaaggagagaagggaacaaagatgaagttaaccctcccacctgtctttccttatgaacacttgccttttccaactgttttctgccatggctagtaatgaactagtccgtaacttgaaagtatttcgatttcttggctttatatatcttgtggaaaggacgacatgagcccgtggagtgtaacaga

SEQ ID NO: 139 - DNA, 557 bp, Homo sapiens
  source 1..557: mol_type = genomic DNA
accgccaccatgagcgataacgatgacatcgaggtggagagcgacgctgacaaacgggctcatcataatgcactggaacgaaaacgtagggaccacatcaaagacagctttcacagtttgcgggactcagtcccatcactccaaggagagaaggcatcccgggcccaaatcctagacaaagccacagaatatatccagtatatgcgaaggaaaaaccacacacaccagcaagatattgacgacctcaagcggcagaatgctcttctggagcagcaagtccgtgcactggagaaggcgaggtcaagtgcccaactgcagaccaactacccctcctcagacaacagcctctacaccaacgccaagggcagcaccatctctgccttcgatgggggctcggactccagctcggagtctgagcctgaagagccccaaagcaggaagaagctccggatggaggccagctagtaatgaactagtccgtaacttgaaagtatttcgatttcttggctttatatatcttgtggaaaggacgatctcaagcccgaccgtagacgttg

SEQ ID NO: 140 - DNA, 620 bp, Homo sapiens
  source 1..620: mol_type = genomic DNA
accgccaccatgttcccggtgtttccttgcacgctgctggccccccccttccccgtgctgggcctggactcccggggggtgggcggcctcatgaactccttcccgccacctcagggtcacgcccagaaccccctgcaggtcggggctgagctccagtcccgcttctttgcctcccagggctgcgcccagagtccattccagaaatgtgaggcagctttcgccacgaaggatcggctgcgggcgcacacagtacgacacgaggagaaagtgccatgtcacgtgtgtggcaagatgctgagctcggcttatatttcggaccacatgaaggtgcacagccagggtcctcaccatgtctgtgagctctgcaacaaaggtactggtgaggtttgtccaatggcggcggcagcggcagcggcggcagcggcagcagcggcagcagtagcagcccctcccacagctgtgggctccctctcgggggcggagggggtgcctgtgagctctcagccacttccctcccaaccctggtagtaatgaactagtccgtaacttgaaagtatttcgatttcttggctttatatatcttgtggaaaggacgaactaggctcgtcgggaccgaggga

SEQ ID NO: 141 - DNA, 1535 bp, Homo sapiens
  source 1..1535: mol_type = genomic DNA
accgccaccatgttcccggtgtttccttgcacgctgctggccccccccttccccgtgctgggcctggactcccggggggtgggcggcctcatgaactccttcccgccacctcagggtcacgcccagaaccccctgcaggtcggggctgagctccagtcccgcttctttgcctcccagggctgcgcccagagtccattccaggccgcgccggcgcccccgcccacgccccaggccccggcggccgagcccctccaggtggacttgctcccggtgctcgccgccgcccaggagtccgccgcggctgctgcggccgctgccgccgctgctgccgccgtcgctgccgcgcccccggcccctgccgccgcctctacggtggacacagcggccctgaagcagcctccggcgccccctccgccacccccgccagtgtcggcgcccgcggccgaggccgcgccccccgcctccgccgccactatcgccgcggcggcggccaccgccgtcgtagccccaacctcgacggtcgccgtggccccggtcgcgtctgccttggagaagaagacaaagagcaaggggccctacatctgcgctctgtgcgccaaggagttcaagaacggctacaatctccggaggcacgaagccatccacacgggagccaaggccggccgggtcccctcgggtgctatgaagatgccgaccatggtgcccctgagcctcctgagcgtgccccagctgagcggagccggcgggggagggggagaggcgggtgccggcggcggcgctgccgcagtggccgccggtggcgtggtgaccacgaccgcctcggggaagcgcatccggaagaaccatgcctgcgagatgtgtggcaaggccttccgcgacgtctaccacctgaaccgacacaagctgtcgcactcggacgagaagccctaccagtgcccggtgtgccagcagcgcttcaagcgcaaggaccgcatgagctaccacgtgcgctcacatgacggcgctgtgcacaagccctacaactgctcccactgtggcaagagcttctcccggccggatcacctcaacagtcacgtcagacaagtgcactcaacagaacggcccttcaaatgtgagaaatgtgaggcagctttcgccacgaaggatcggctgcgggcgcacacagtacgacacgaggagaaagtgccatgtcacgtgtgtggcaagatgctgagctcggcttatatttcggaccacatgaaggtgcacagccagggtcctcaccatgtctgtgagctctgcaacaaaggtactggtgaggtttgtccaatggcggcggcagcggcagcggcggcagcggcagcagcggcagcagtagcagcccctcccacagctgtgggctccctctcgggggcggagggggtgcctgtgagctctcagccacttccctcccaaccctggtagtaatgaactagtccgtaacttgaaagtatttcgatttcttggctttatatatcttgtggaaaggacgagatttacttaatcgtaggagcact

SEQ ID NO: 142 - DNA, 1466 bp, Homo sapiens
  source 1..1466: mol_type = genomic DNA
accgccaccatggatcccagcaactggagcagcttcatcttccagggtcacgcccagaaccccctgcaggtcggggctgagctccagtcccgcttctttgcctcccagggctgcgcccagagtccattccaggccgcgccggcgcccccgcccacgccccaggccccggcggccgagcccctccaggtggacttgctcccggtgctcgccgccgcccaggagtccgccgcggctgctgcggccgctgccgccgctgctgccgccgtcgctgccgcgcccccggcccctgccgccgcctctacggtggacacagcggccctgaagcagcctccggcgccccctccgccacccccgccagtgtcggcgcccgcggccgaggccgcgccccccgcctccgccgccactatcgccgcggcggcggccaccgccgtcgtagccccaacctcgacggtcgccgtggccccggtcgcgtctgccttggagaagaagacaaagagcaaggggccctacatctgcgctctgtgcgccaaggagttcaagaacggctacaatctccggaggcacgaagccatccacacgggagccaaggccggccgggtcccctcgggtgctatgaagatgccgaccatggtgcccctgagcctcctgagcgtgccccagctgagcggagccggcgggggagggggagaggcgggtgccggcggcggcgctgccgcagtggccgccggtggcgtggtgaccacgaccgcctcggggaagcgcatccggaagaaccatgcctgcgagatgtgtggcaaggccttccgcgacgtctaccacctgaaccgacacaagctgtcgcactcggacgagaagccctaccagtgcccggtgtgccagcagcgcttcaagcgcaaggaccgcatgagctaccacgtgcgctcacatgacggcgctgtgcacaagccctacaactgctcccactgtggcaagagcttctcccggccggatcacctcaacagtcacgtcagacaagtgcactcaacagaacggcccttcaaatgtgagaaatgtgaggcagctttcgccacgaaggatcggctgcgggcgcacacagtacgacacgaggagaaagtgccatgtcacgtgtgtggcaagatgctgagctcggcttatatttcggaccacatgaaggtgcacagccagggtcctcaccatgtctgtgagctctgcaacaaaggtactggtgaggtttgtccaatggcggcggcagcggcagcggcggcagcggcagcagcggcagcagtagcagcccctcccacagctgtgggctccctctcgggggcggagggggtgcctgtgagctctcagccacttccctcccaaccctggtagtaatgaactagtccgtaacttgaaagtatttcgatttcttggctttatatatcttgtggaaaggacgacaggacaaggatgtgtaaatagtc

SEQ ID NO: 143 - DNA, 1583 bp, Homo sapiens
  source 1..1583: mol_type = genomic DNA
accgccaccatgttcccggtgtttccttgcacgctgctggccccccccttccccgtgctgggcctggactcccggggggtgggcggcctcatgaactccttcccgccacctcagggtcacgcccagaaccccctgcaggtcggggctgagctccagtcccgcttctttgcctcccagggctgcgcccagagtccattccaggccgcgccggcgcccccgcccacgccccaggccccggcggccgagcccctccaggtggacttgctcccggtgctcgccgccgcccaggagtccgccgcggctgctgcggccgctgccgccgctgctgccgccgtcgctgccgcgcccccggcccctgccgccgcctctacggtggacacagcggccctgaagcagcctccggcgccccctccgccacccccgccagtgtcggcgcccgcggccgaggccgcgccccccgcctccgccgccactatcgccgcggcggcggccaccgccgtcgtagccccaacctcgacggtcgccgtggccccggtcgcgtctgccttggagaagaagacaaagagcaaggggccctacatctgcgctctgtgcgccaaggagttcaagaacggctacaatctccggaggcacgaagccatccacacgggagccaaggccggccgggtcccctcgggtgctatgaagatgccgaccatggtgcccctgagcctcctgagcgtgccccagctgagcggagccggcgggggagggggagaggcgggtgccggcggcggcgctgccgcagtggccgccggtggcgtggtgaccacgaccgcctcggggaagcgcatccggaagaaccatgcctgcgagatgtgtggcaaggccttccgcgacgtctaccacctgaaccgacacaagctgtcgcactcggacgagaagccctaccagtgcccggtgtgccagcagcgcttcaagcgcaaggaccgcatgagctaccacgtgcgctcacatgacggcgctgtgcacaagccctacaactgctcccactgtggcaagagcttctcccggccggatcacctcaacagtcacgtcagacaagtgcactcaacagaacggcccttcaaatgtgagaaatgtgaggcagctttcgccacgaaggatcggctgcgggcgcacacagtacgacacgaggagaaagtgccatgtcacgtgtgtggcaagatgctgagctcggcttatatttcggaccacatgaaggtgcacagccagggtcctcaccatgtctgtgagctctgcaacaaaggcttcaccacggcagcatacctgcgcatccacgcggtgaaggaccacgggctccaggccccgcgggctgaccgcatcctgtgcaagctgtgcagcgtgcactgcaagacccctgcccagctggccggccacatgcagacccatctggggggggccgccccccctgtcccgggagacgccccccagccacagcccacctgctagtaatgaactagtccgtaacttgaaagtatttcgatttcttggctttatatatcttgtggaaaggacgatgatggtcttgtgcagacctaaac

SEQ ID NO: 144 - DNA, 1337 bp, Homo sapiens
  source 1..1337: mol_type = genomic DNA
accgccaccatggctaaaagaccgggatcccctggaagccgagaaatgggactgttgacattcagagatgtagtcatagaattctctctggaggagtggcaatgcctggatcacgctcagcagaatttatatagagatgtgatgttagagaactacagaaacctggtctccctgggtattgctgtctctaagccagacttgatcacctgtctggagcaaaataaagagccttggaatataaagagaaatgagatggtaaccaaacacccagttatgtgttctcatttcacccaagaccttccgccagagctaggcataaaagattcactccaaaaagtaataccaagaagatatggaaaaagtggacatgacaatttacaagtaaaaacatgtaaaagcatgggtgagtgtgaggtgcaaaaaggaggttgtaatgaagttaaccaatgtttgtcaactacccaaaacaaaatatttcagactcataaatgtgtcaaagtcttcggcaaattttcaaattccaatagacataagacaagacatactggaaagaaacatttcaaatgtaaaaaatatggcaaatcattttgcatggtttcacaactacatcaacatcagataattcatactagggagaattcctaccaatgtgaagaatgcggcaaacccttcaactgctcttcaaccctttctaaacataaaagaattcatactggagagaaaccctacagatgtgaggaatgtggcaaagcttttacctggtcctcaacccttactaaacataggagaattcatactggagaaaaaccctacacatgtgaagaatgtggccaagcctttagccgctcctcaacacttgctaaccacaagagaattcatactggagagaaaccatacacatgtgaagaatgtggcaaagcctttagcttatcctcatccctcacttaccacaagagaattcatactggagagaaaccctacacatgtgaagaatgtggcaaagcctttaactgctcctcaacccttaagaaacataagataattcatactggagagaaaccctacaaatgtaaagaatgtgggaaagcctttgccttctcctcaactcttaatactcataagaggattcatactggagaggaaccctacaaatgtgaagaatgtgacaaagcttttaagtggtcctcaagtcttgctaatcataagagtatgcatactggagagaaaccctacaaatgtgaatagtaatgaactagtccgtaacttgaaagtatttcgatttcttggctttatatatcttgtggaaaggacgagtaggtctatcaacgctcctatag

SEQ ID NO: 145 - DNA, 1844 bp, Homo sapiens
  source 1..1844: mol_type = genomic DNA
accgccaccatgccaggacaccccgaaagccggaaaacgagacgcattctcactatgttgcccaggctggtcttgaactccttccctcaagtgattcttctgcctaatcctcccaaagttcttagattacagggactactggcattcagtgatgtggtcatagaattctctccagaggagtgggcatgcctggaccctgcccagcgaaatttgtatagggatgtgatgttcgagaactacagaaacctggtctccctggctattttatcttattccattcaagaccttttgccagagcaggatatgaaagatttatgccaaaaagtgacactgacaagacatagaagctggggccttgacaatttgcacttagtgaaagactggagaactgtgaatgaaggtaaggggcagaaagaatattgcaatagacttactcaatgttcatcaactaaaagcaaaatctttcaatgtattgaatgtggcagaaattttagctggaggtcaatccttactgaacataagagaattcatactggagagaagccatacaaatgtgaagaatgtggcaaagttttcaatcgatgttcaaacctaacaaaacataaaagaattcatactggagagaaaccctacaaatgtgacgaatgtggcaaagtttttaattggtggtcacaactaactaaccataagaaaattcatactggagagaaaccctacaaatgtgatgaatgtgacaaagtttttaattggtggtcacaactaactagccataagaaaattcatagtggagagaaaccatacccatgtgaagaatgtggcaaagcctttacccagttctcaaaccttacacaacataagagaattcatactggagagaaaccctacaaatgcaaagaatgttgcaaagcctttaacaagttctcaaaccttactcaacataagagaattcatactggagagaaaccttacaagtgtgaagaatgtggcaacgtttttaatgagtgctcacacctaactagacataggagaattcatactggagagaaaccctacaaatgtgaagaatgtggcaaagcctttacacagtttgcaagccttactcgtcataaaagaattcatactggagaaaaaccctaccaatgtgaagaatgtggcaaaacttttaatcggtgttcacacctaagtagccataagagaattcatactggagagaaaccctacaaatgtgaagaatgtggcagaacctttactcaattctcaaacctcactcagcataaaagaattcatactggagagaaaccctacaaatgcaaagaatgtggcaaagcgtttaacaagttctcaagccttactcaacataggagaattcatactggagtgaaaccctacaaatgtgaagaatgtgggaaagtttttaaacagtgctctcacctaactagccataagagaattcatactggagagaaaccctacaaatgtaaagaatgtggcaaagctttttaccaatcctcaatccttagtaagcataagagaattcatactgaagagaaaccctacaaatgtgaagaatgtggcaaagcctttaaccagttctcaagccttactcgtcataaaagaattcatactggagagaaacgctacaaatgtaaagaatgtggaaaaggtttttaccaatcctcaatccatagtaagtataagagaatttatactggagaggaacctgacaaatgtaaaaaatgtggcagtctttagtaatgaactagtccgtaacttgaaagtatttcgatttcttggctttatatatcttgtggaaaggacgagtcgagcacagaattcttcgcctt

SEQ ID NO: 146 - DNA, 1253 bp, Homo sapiens
  source 1..1253: mol_type = genomic DNA
accgccaccatggcatcagaactggcaatgagcaactccgacctgcccaccagtcccctggccatggaatatgttaatgacttcgatctgatgaagtttgaagtgaaaaaggaaccggtggagaccgaccgcatcatcagccagtgcggccgtctcatcgccgggggctcgctgtcctccacccccatgagcacgccgtgcagctcggtgcccccttcccccagcttctcggcgcccagcccgggctcgggcagcgagcagaaggcgcacctggaagactactactggatgaccggctacccgcagcagctgaaccccgaggcgctgggcttcagccccgaggacgcggtcgaggcgctcatcagcaacagccaccagctccagggcggcttcgatggctacgcgcgcggggcgcagcagctggccgcggcggccggggccggtgccggcgcctccttgggcggcagcggcgaggagatgggccccgccgccgccgtggtgtccgccgtgatcgccgcggccgccgcgcagagcggcgcgggcccgcactaccaccaccaccaccaccacgccgccggccaccaccaccacccgacggccggcgcgcccggcgccgcgggcagcgcggccgcctcggccggtggcgctgggggcgcgggcggcggtggcccggccagcgctgggggcggcggcggcggcggcggcggcggaggcggcgggggcgcggcgggggcggggggcgccctgcacccgcaccacgccgccggcggcctgcacttcgacgaccgcttctccgacgagcagctggtgaccatgtctgtgcgcgagctgaaccggcagctgcgcggggtcagcaaggaggaggtgatccggctgaagcagaagaggcggaccctgaaaaaccgcggctatgcccagtcctgccgcttcaagagggtgcagcagagacacgtcctggagtcggagaagaaccagctgctgcagcaagtcgaccacctcaagcaggagatctccaggctggtgcgcgagagggacgcgtacaaggagaaatacgagaagttggtgagcagcggcttccgagaaaacggctcgagcagcgacaacccgtcctctcccgagtttttcatgtacccaagggaatcctctacatcagtgatgtagtaatgaactagtccgtaacttgaaagtatttcgatttcttggctttatatatcttgtggaaaggacgagcggatatatcaccacctatgacg

SEQ ID NO: 147 - DNA, 1223 bp, Homo sapiens
  source 1..1223: mol_type = genomic DNA
accgccaccatggcatcagaactggcaatgagcaactccgacctgcccaccagtcccctggccatggaatatgttaatgacttcgatctgatgaagtttgaagtgaaaaaggaaccggtggagaccgaccgcatcatcagccagtgcggccgtctcatcgccgggggctcgctgtcctccacccccatgagcacgccgtgcagctcggtgcccccttcccccagcttctcggcgcccagcccgggctcgggcagcgagcagaaggcgcacctggaagactactactggatgaccggctacccgcagcagctgaaccccgaggcgctgggcttcagccccgaggacgcggtcgaggcgctcatcagcaacagccaccagctccagggcggcttcgatggctacgcgcgcggggcgcagcagctggccgcggcggccggggccggtgccggcgcctccttgggcggcagcggcgaggagatgggccccgccgccgccgtggtgtccgccgtgatcgccgcggccgccgcgcagagcggcgcgggcccgcactaccaccaccaccaccaccacgccgccggccaccaccaccacccgacggccggcgcgcccggcgccgcgggcagcgcggccgcctcggccggtggcgctgggggcgcgggcggcggtggcccggccagcgctgggggcggcggcggcggcggcggcggcggaggcggcgggggcgcggcgggggcggggggcgccctgcacccgcaccacgccgccggcggcctgcacttcgacgaccgcttctccgacgagcagctggtgaccatgtctgtgcgcgagctgaaccggcagctgcgcggggtcagcaaggaggaggtgatccggctgaagcagaagaggcggaccctgaaaaaccgcggctatgcccagtcctgccgcttcaagagggtgcagcagagacacgtcctggagtcggagaagaaccagctgctgcagcaagtcgaccacctcaagcaggagatctccaggctggtgcgcgagagggacgcgtacaaggagaaatacgagaagttggtgagcagcggcttccgagaaaacggctcgagcagcgacaacccgtcctctcccgagtttttcatgtagtaatgaactagtccgtaacttgaaagtatttcgatttcttggctttatatatcttgtggaaaggacgatttcgcctttagggactgatgtgg

SEQ ID NO: 148 - DNA, 1313 bp, Homo sapiens
  source 1..1313: mol_type = genomic DNA
accgccaccatggcatcagaactggcaatgagcaactccgacctgcccaccagtcccctggccatggaatatgttaatgacttcgatctgatgaagtttgaagtgaaaaaggaaccggtggagaccgaccgcatcatcagccagtgcggccgtctcatcgccgggggctcgctgtcctccacccccatgagcacgccgtgcagctcggtgcccccttcccccagcttctcggcgcccagcccgggctcgggcagcgagcagaaggcgcacctggaagactactactggatgaccggctacccgcagcagctgaaccccgaggcgctgggcttcagccccgaggacgcggtcgaggcgctcatcagcaacagccaccagctccagggcggcttcgatggctacgcgcgcggggcgcagcagctggccgcggcggccggggccggtgccggcgcctccttgggcggcagcggcgaggagatgggccccgccgccgccgtggtgtccgccgtgatcgccgcggccgccgcgcagagcggcgcgggcccgcactaccaccaccaccaccaccacgccgccggccaccaccaccacccgacggccggcgcgcccggcgccgcgggcagcgcggccgcctcggccggtggcgctgggggcgcgggcggcggtggcccggccagcgctgggggcggcggcggcggcggcggcggcggaggcggcgggggcgcggcgggggcggggggcgccctgcacccgcaccacgccgccggcggcctgcacttcgacgaccgcttctccgacgagcagctggtgaccatgtctgtgcgcgagctgaaccggcagctgcgcggggtcagcaaggaggaggtgatccggctgaagcagaagaggcggaccctgaaaaaccgcggctatgcccagtcctgccgcttcaagagggtgcagcagagacacgtcctggagtcggagaagaaccagctgctgcagcaagtcgaccacctcaagcaggagatctccaggctggtgcgcgagagggacgcgtacaaggagaaatacgagaagttggtgagcagcggcttccgagaaaacggctcgagcagcgacaacccgtcctctcccgagtttttcataactgagcccactcgcaagttggagccatcagtgggatacgccacattttggaagccccagcatcgtgtacttaccagtgtgttcacaaaatagtaatgaactagtccgtaacttgaaagtatttcgatttcttggctttatatatcttgtggaaaggacgagtaccaactatctaagcagggtga

SEQ ID NO: 149 - DNA, 1424 bp, Homo sapiens
  source 1..1424: mol_type = genomic DNA
accgccaccatgggcagctcgcacttgctcaacaagggcctgccgcttggcgtccgacctccgatcatgaacgggcccctgcacccgcggcccctggtggcattgctggatggccgggactgcacagtggagatgcccatcctgaaggacgtggccactgtggccttctgcgacgcgcagtccacgcaggagatccatgagaaggtcctgaacgaggctgtgggggccctgatgtaccacaccatcactctcaccagggaggacctggagaagttcaaagccctccgcatcatcgtccggattggcagtggttttgacaacatcgacatcaagtcggccggggatttaggcattgccgtctgcaacgtgcccgcggcgtctgtggaggagacggccgactcgacgctgtgccacatcctgaacctgtaccggcgggccacctggctgcaccaggcgctgcgggagggcacacgagtccagagcgtcgagcagatccgcgaggtggcgtccggcgctgccaggatccgcggggagaccttgggcatcatcggacttggtcgcgtggggcaggcagtggcgctgcgggccaaggccttcggcttcaacgtgctcttctacgacccttacttgtcggatggcgtggagcgggcgctggggctgcagcgtgtcagcaccctgcaggacctgctcttccacagcgactgcgtgaccctgcactgcggcctcaacgagcacaaccaccacctcatcaacgacttcaccgtcaagcagatgagacaaggggccttcctggtgaacacagcccggggtggcctggtggatgagaaggcgctggcccaggccctgaaggagggccggatccgcggcgcggccctggatgtgcacgagtcggaacccttcagctttagccagggccctctgaaggatgcacccaacctcatctgcaccccccatgctgcatggtacagcgagcaggcatccatcgagatgcgagaggaggcggcacgggagatccgcagagccatcacaggccggatcccagacagcctgaagaactgtgtcaacaaggaccatctgacagccgccacccactgggccagcatggaccccgccgtcgtgcaccctgagctcaatggggctgcctataggtaccctccgggcgtggtgggcgtggcccccactggcatcccagctgctgtggaaggtatcgtccccagcgccatgtccctgtcccacggcctgccccctgtggcccacccgccccacgccccttctcctggccaaaccgtcaagcccgaggcggatagagaccacgccagtgaccagttgtagtaatgaactagtccgtaacttgaaagtatttcgatttcttggctttatatatcttgtggaaaggacgaagaagaatagtgctaggtacaggt

SEQ ID NO: 150 - DNA, 1439 bp, Homo sapiens
  source 1..1439: mol_type = genomic DNA
accgccaccatggcccttgtggataagcacaaagtcaagagacagcgattggacagaatttgtgaaggtatccgcccccagatcatgaacggccccctgcacccccgccccctggtggcgctgctggacggccgcgactgcactgtggagatgcccatcctgaaggacctggccactgtggccttctgtgacgcgcagtcgacgcaggaaatccacgagaaggttctaaacgaagccgtgggcgccatgatgtaccacaccatcaccctcaccagggaggacctggagaagttcaaggccctgagagtgatcgtgcggataggcagtggctatgacaacgtggacatcaaggctgccggcgagctcggaattgccgtgtgcaacatcccgtctgcagccgtggaagagacagcggactctaccatctgccacatcctcaacctgtaccggaggaacacgtggctgtaccaggcactgcgggaaggcacgcgggttcagagcgtggagcagatccgcgaggtggcctcgggagcggcccgcatccgtggggagacgctgggcctcattggctttggtcgcacggggcaggcggttgcagttcgagccaaggcctttggattcagcgtcatattttatgacccctacttgcaggatgggatcgagcggtccctgggcgtgcagagggtctacaccctgcaggatttgctgtatcagagcgactgcgtctccttgcactgcaatctcaacgaacataaccaccacctcatcaatgactttaccataaagcagatgaggcagggagcattccttgtgaacgcagcccgtggcggcctggtggacgagaaagccttagcacaagccctcaaggagggcaggatacgaggggcagccctcgacgtgcatgagtcagagcccttcagctttgctcagggtccgttgaaagatgccccgaatctcatctgcactcctcacactgcctggtacagtgagcaggcgtcactggagatgagggaggcagctgccaccgagatccgccgagccatcacaggtcgcatcccagaaagcttaagaaattgtgtgaacaaggaattctttgtcacatcagcgccttggtcagtaatagaccagcaagcaattcatcctgagctcaatggtgccacatacagatatccgccaggcatcgtgggtgtggctccaggaggacttcctgcagccatggaagggatcatccctggaggcatcccagtgactcacaacctcccgacagtggcacatccttcccaagcgccctctcccaaccagcccacaaaacacggggacaatcgagagcaccccaacgagcaatagtaatgaactagtccgtaacttgaaagtatttcgatttcttggctttatatatcttgtggaaaggacgacgacgaaattcggacacgccttgt

SEQ ID NO: 151 - DNA, 1643 bp, Homo sapiens
  source 1..1643: mol_type = genomic DNA
accgccaccatgagaccaggacttccaggccccacagggttgtgcgctcagacctcaagtaggggccagaagagtgtactgaaacagaaggaatcttgtggaatttggcagttgtaccattttcttagcagaaaacaggagcccaggtgggagccatgtgtgtcgggttcctcgtcaggtgacggtgctgttgcggatctcgcggatgagctgagggggtatccagctttgtgctgcacgcttcctgtccactcatacaggtcgtgggctggtatccgcccccagatcatgaacggccccctgcacccccgccccctggtggcgctgctggacggccgcgactgcactgtggagatgcccatcctgaaggacctggccactgtggccttctgtgacgcgcagtcgacgcaggaaatccacgagaaggttctaaacgaagccgtgggcgccatgatgtaccacaccatcaccctcaccagggaggacctggagaagttcaaggccctgagagtgatcgtgcggataggcagtggctatgacaacgtggacatcaaggctgccggcgagctcggaattgccgtgtgcaacatcccgtctgcagccgtggaagagacagcggactctaccatctgccacatcctcaacctgtaccggaggaacacgtggctgtaccaggcactgcgggaaggcacgcgggttcagagcgtggagcagatccgcgaggtggcctcgggagcggcccgcatccgtggggagacgctgggcctcattggctttggtcgcacggggcaggcggttgcagttcgagccaaggcctttggattcagcgtcatattttatgacccctacttgcaggatgggatcgagcggtccctgggcgtgcagagggtctacaccctgcaggatttgctgtatcagagcgactgcgtctccttgcactgcaatctcaacgaacataaccaccacctcatcaatgactttaccataaagcagatgaggcagggagcattccttgtgaacgcagcccgtggcggcctggtggacgagaaagccttagcacaagccctcaaggagggcaggatacgaggggcagccctcgacgtgcatgagtcagagcccttcagctttgctcagggtccgttgaaagatgccccgaatctcatctgcactcctcacactgcctggtacagtgagcaggcgtcactggagatgagggaggcagctgccaccgagatccgccgagccatcacaggtcgcatcccagaaagcttaagaaattgtgtgaacaaggaattctttgtcacatcagcgccttggtcagtaatagaccagcaagcaattcatcctgagctcaatggtgccacatacagatatccgccaggcatcgtgggtgtggctccaggaggacttcctgcagccatggaagggatcatccctggaggcatcccagtgactcacaacctcccgacagtggcacatccttcccaagcgccctctcccaaccagcccacaaaacacggggacaatcgagagcaccccaacgagcaatagtaatgaactagtccgtaacttgaaagtatttcgatttcttggctttatatatcttgtggaaaggacgagcattagtctatttacttgtgcta

SEQ ID NO: 152 - DNA, 3059 bp, Homo sapiens
  source 1..3059: mol_type = genomic DNA
accgccaccatgccagttcccagcaggcatataaatattggtcgttctcagagctgggatgctgctgggtggtacgagggcccctgggagaacgccgagtccctgcggcctctggggaggagaagctccctgacgtatggcacagcagaggggacttggtttgagccaaaccaccgaccacaggacgctgccctgcccgtggccgccgagccctacctgtaccgggaggccgtttataactcagtggctgcaagaaaggggtctactcctgacttcaccttctacgacagcagacaggcagtgatgtctggtcgcagccccctgctgccacgggagtactacagtgatccgtctggagctgctagggtacccaaagagcctcccctctatcgggacccaggagtcagccggccggtccccagctacggagtgcttggcagcagaacgtcatgggatccaatgcaaggccggtcacctgccctgcaggacgccggtcacctgtaccgggatcctggaggtaaaatgatccctcaggggcggcagacacagagcagggctgcatctcccgggcggtatggacgggagcagcccgacaccaggtatggggcggaggtgcctgcctaccccctcagccaggtcttcagcgacatcagcgaaagacccattgaccctgcccctgccagacaggtggccccgacgtgcctggttgtggaccccagttcagctgctgcccccgaaggcagcacaggggtggccccaggggccctgaatcgtggctacgggcctgcccgggaaagcatcccatccaagatggcttacgagacttacgaagctgacctgtccaccttccagggtcctggtggcaagaggaccgtgctccctgagttcctggcctttctgcgggcggaggggctggcagaggccacgctgggagccctactgcagcagggctttgactccccggccgtcctggctaccctggaggacgcggatatcaagtctgtcgcacccaacctgggccaggcccgtgttctgagccgcctggccaatagctgcaggaccgaaatgcagctgcggaggcaggaccgggggggcccgctgccccgggcgcggtccagcagcttcagccaccgaagcgaactgctccatggtgacttggcttctctgggcgctgcggctcctctgcagacagcatccccccgagctggagacccggctcgccgtccctccagcgcaccatctcagcacctcctggagacggcagccacctattctgcccctggcgtgggcacccatgccccacacttcccctccaactccgggtacagctctcccaccccttgcgccctgacagcgcgtctgagccccacgtaccccctgcaggcaggggtggccttgactaacccgggcccctcaaacccccttcacccaggccccagaacagcctactccacggcatacacggtgcccatggagctgctaaagagggagcgcaacgtggccgcctctccgctgcccagccctcacggcagcccccaggtcttgcggaagccaggtgcacccctggggccatccaccctgccgccggccagccagagcctccacacgcctcactcaccgtaccagaaggtggcccggcgcacaggggcacccatcatcgtgtccaccatgcttgcaccagaaccaagtatccgcccccagatcatgaacggccccctgcacccccgccccctggtggcgctgctggacggccgcgactgcactgtggagatgcccatcctgaaggacctggccactgtggccttctgtgacgcgcagtcgacgcaggaaatccacgagaaggttctaaacgaagccgtgggcgccatgatgtaccacaccatcaccctcaccagggaggacctggagaagttcaaggccctgagagtgatcgtgcggataggcagtggctatgacaacgtggacatcaaggctgccggcgagctcggaattgccgtgtgcaacatcccgtctgcagccgtggaagagacagcggactctaccatctgccacatcctcaacctgtaccggaggaacacgtggctgtaccaggcactgcgggaaggcacgcgggttcagagcgtggagcagatccgcgaggtggcctcgggagcggcccgcatccgtggggagacgctgggcctcattggctttggtcgcacggggcaggcggttgcagttcgagccaaggcctttggattcagcgtcatattttatgacccctacttgcaggatgggatcgagcggtccctgggcgtgcagagggtctacaccctgcaggatttgctgtatcagagcgactgcgtctccttgcactgcaatctcaacgaacataaccaccacctcatcaatgactttaccataaagcagatgaggcagggagcattccttgtgaacgcagcccgtggcggcctggtggacgagaaagccttagcacaagccctcaaggagggcaggatacgaggggcagccctcgacgtgcatgagtcagagcccttcagctttgctcagggtccgttgaaagatgccccgaatctcatctgcactcctcacactgcctggtacagtgagcaggcgtcactggagatgagggaggcagctgccaccgagatccgccgagccatcacaggtcgcatcccagaaagcttaagaaattgtgtgaacaaggaattctttgtcacatcagcgccttggtcagtaatagaccagcaagcaattcatcctgagctcaatggtgccacatacagatatccgccaggcatcgtgggtgtggctccaggaggacttcctgcagccatggaagggatcatccctggaggcatcccagtgactcacaacctcccgacagtggcacatccttcccaagcgccctctcccaaccagcccacaaaacacggggacaatcgagagcaccccaacgagcaatagtaatgaactagtccgtaacttgaaagtatttcgatttcttggctttatatatcttgtggaaaggacgaaccgtttacctcagcccaagccgc

SEQ ID NO: 153 - DNA, 2837 bp, Homo sapiens
  source 1..2837: mol_type = genomic DNA
accgccaccatggatacctgcggggtcggctatgttgccctgggggaggccggccccgtggggaacatgactgtggtagactctcctggacaagaggtgctaaatcagcttgatgtcaagacctcttcagaaatgaccagtgcagaggcttccgtagagatgtcattacctacccctttgcctggatttgaggattctcctgatcagaggaggctccctccagagcaggaaagcctctccagactggaacagccagatctttcttcagagatgtcaaaggtctcaaagcctagggcctcaaagcctggccggaagagaggtggtaggacacgaaaaggccccaaaaggccccaacagcctaatcctccatcagccccactggttcctggtctcttagatcaatccaaccctctgtccacccccatgcctaagaaacgaggtcgaaagtccaaggcagagctgctgctgctgaagttgtcaaaagacctagatcggccagaatctcaatctccaaagaggccccctgaggactttgagaccccttctggggaacgaccccgccgaagggctgcccaagtggcacttctgtatcttcaggaactggctgaagagctctcaacagccctgcctgcccctgtgtcctgtcctgagggccccaaggtgagcagccccaccaaaccgaagaagatccggcagccagcagcctgtccaggtggagaagaggtggatggtgctccacgggatgaagacttttttctccaggttgaggctgaagatgtggaagaaagtgagggcccaagtgagagctcatctgaacctgagcctgtagtgccccgaagcaccccacgaggatctacttcagggaaacagaaaccacactgccgaggaatggctcccaatggcttaccaaatcatatcatggctcctgtttggaagtgcctccatctcaccaaggacttccgagagcagaaacattcatactgggagtttgctgagtggattcctttagcctggaagtggcacttgttatctgagcttgaggccgctccctacctgccccaggaggagaagtctccattgttttctgtacaacgtgaagggctacctgaagatggcaccctctaccgaataaacagatttagctcgatcacagcacatccagagcgctgggatgtgtccttcttcacggggggaccgctctgggctctggactggtgcccagtgccagagggggcaggagcctcgcaatatgtggctcttttctccagccctgacatgaatgagacacacccactgagccagcttcattcgggtcctgggctgctccagctctggggccttgggaccttgcagcaagaaagctgtcctggcaacagggcccactttgtctatgggattgcttgtgacaacggctgcatctgggacctcaagttctgccccagtggagcatgggaacttccaggcacccctcggaaggctcctctcctgccccggttgggtctcttggctctggcctgctcagacgggaaagtactgctattcagtctaccccatccggaggccctgctggctcagcaacccccagatgcagtgaagcctgccatatataaggtacaatgtgtggcaactctgcaggtggggtctatgcaagctacagacccctctgagtgtggtcagtgccttagcctggcctggatgcctaccaggccccaccaacacctagctgctggatattataatggcatggtggttttctggaaccttcccactaactcacccctgcagcggatacggctctctgatggctccttaaagctctaccccttccagtgtttcctagcccatgaccaggctgtgcgtacccttcaatggtgcaaagctaacagccatttccttgtctctgcggggagtgaccggaaaatcaaattctgggaccttcgacgtccttacgaacccataaactctatcaagcgcttcttgagtacagaactggcctggctgcttccctacaatggtgtcactgtggctcaggacaactgctatgcctcttatggactctgtgggattcattatattgacgctggttaccttggtttcaaggcctacttcactgctcctcgaaaaggcaccgtttggagtctttcaggatccgactggcttgggacaatagctgcaggagatatatccggggagctcattgctgctatattaccagatatggcactgaatccaataaatgtcaagcgacctgtagagcgaagatttcctatatataaagcagatctgataccgtatcaggacagtcctgaaggtccagaccattcttctgcttcatctggggtccccaaccctcctaaggctcgaacttacactgaaactgtcaaccatcactacttgctctttcaagacacagatttgggttcattccatgatctgctccgtagagaaccaatgctgcgcatgcaggagggagaggggcattctcaactctgcctggacaggctgcagctggaggctattcataaggtacgtttcagcccaaacctggactcctatggatggctggtatctggggggcagtcagggctggttcgaatccattttgtccgtggactcgcctccccactgggccaccgtatgcagcttgaaagccgagcccacttcaatgctatgttccaaccatcctcccccactagacggcctggcttctctccaaccagccatcgccttctgcccactccctagtaatgaactagtccgtaacttgaaagtatttcgatttcttggctttatatatcttgtggaaaggacgagacgaaagcttcagcgcatctcgc

SEQ ID NO: 154 - DNA, 5693 bp, Homo sapiens
  source 1..5693: mol_type = genomic DNA
accgccaccatgattgaagacaaggggcctcgtgttgctgactactttgttgtagcaggattaactgatgtttcaaagcctctagaagaagaaattcacttcaatgatgcttgtcataaagtagctaaaccaaaagaacctattacagatgtttcagttattatcaaatctcttggggaggaagtcccacaggattatatctgtattgatgttaccccaactggattgtcagctgatcttaataatggaagtcttgtggggccacagatttacctttgctatagaagaggaagagataagcctccacttacagatctgggggttttatatgactggaaagaaagattgaaacagggttgtgaaattattcagagtactccctatgggcgccccgcaaatattagtgggagtacctcatcacaaagaatttatatcacttaccgaagagcctctgaaaacatgactcagaatacgttggctgtcactgacatatgtattattatacccagtaaaggagaaagcccaccacacacgttctgcaaagtcgacaagaatctcaataacagtatgtggggatcagcagtatacttgtgttataaaaaatcggtggcaaagacgaacactgtatcttacaaagctggcctaatttgtagatatcctcaagaagattatgagtcattctcactaccggaatctgttcctctattttgtttaccaatgggtgcaaccattgaatgttggccatcaaatagcaaataccctctgcctgtattttctacttttgttttaactggagcctcagctgaaaaggtttatggtgctgctattcagttttatgaaccatactctgaggagaatctcacagaaaagcagagacttcttttgggtttaacatcagcagatgggaagtctgatagttccaaaacaattcatactaacaaatgcatctgtcttctttctcactggcctttttttgatgcattcaggaagtttctgacttttctgtatcgttattccatctctgggcctcatgtccttccaattgagaagcatatttctcattttatgcataaagttccttttccatctcctcagagaccacggattttagttcagttatcaccacatgataatctgattctcagtcagcctgtgtcttcacctcttccactaagtggtggcaagttttcaacactactgcagaatttaggccctgaaaatgctgtgacactactggtgtttgcagtaacagaacataaaattcttatccattccctacggccatccgtgcttactagtgtgacagaagcattagtgtctatgattttccctttccactggccatgcccgtatgttcctctctgcccactggctttagcagatgtcttgagtgcaccatgtccattcatagtagggattgattcaagatactttgatctctatgatcctccaccagatgtcagttgtgttgatgtagataccaacactatttctcaaattggtgacaagaaaaatgtagcctggaagatacttccaaagaagccatgtaaaaatctgatgaacacactgaataatttgcatcagcaattggcaaaattgcagcagagaccgagagatgatggactcatggatttagcaataaatgactatgattttaattctggaaagaggttgcacatgatagatttggaaatccaagaggcatttttgtttttcatggcctctattttaaaaggttacagatcatacttaaggccaataacacaagccccatctgagacagccacagatgcagcctctctctttgccctacaagctttcttaagaagccgggaccggtcacatcaaaaattctataacatgatgaccaaaacacaaatgtttattcgcttcattgaagaatgttcttttgttagtgacaaagatgcaagcctggcattttttgatgattgtgtagataaagtggatatggacaagagcggtgaagtacgacttatagaactggatgaatctttcaaaagtgaacacactgtttttgtaacaccacctgagatcccccacctacccaatggtgaagaaccccctttacagtacagctataatggatttccagttcttaggaacaatttatttgaaagacctgaaggatttctacaagcaaagaagaacaaattgccttcaaaatcaagtagtcctaatagccctttgcccatgttcagaagaacaaaacaggaaattaaatcagcccataaaattgcaaagaggtactcttccatccctcagatgtggtctaggtgtctactgcgccactgttatggactgtggtttatttgtctcccagcttatgtgaaagtctgtcattcaaaagtcagggctctgaaaacagcatatgatgtgcttaaaaaaatgcagtcaaagaagatggatccacctgatgaggtatgctaccgcattcttatgcaactctgtggacaatatgatcagccagtgcttgcagttcgagtgctttttgaaatgcagaaagctggtattgaccccaatgccattacttatggttattataataaggctgttttggaaagtacctggccttcaagaagtcgtagtggctattttctttggacaaaagtaagaaatgttgttttaggagtaacacagttcaaaagagctttaaagaagcatgcacacttatcacaaacaactctctcaggtggccagtctgatcttggatataattcattatctaaagatgaagttagaagaggggatacatctactgaagacattcaagaagaaaaagataaaaaagggagtgattgtagttccttgtcagagagtgagagtacaaaaggaagtgctgattgccttcctaagctcagttatcaaaattcttccagtatcgttcgcctcactggtacaagtaacaacagtgctggtaaaatatcaggagaaagcatggaaagcacacctgagctgctcttaatatcatctcttgaagatacaaatgaaacacgaaacattcaaagtagatgcttcaggaaaagacataaaagtgacaatgaaactaatttgcagcagcaagtggtctggggaaatagaaaccgtaatcttagtggaggggtactgatgggatttatgctcaatagaattaaccaggaagcaacccctggagatatagttgaaaaattgggagctgatgcaaaaattctttcaaatgttatctcaaaaagcacgagaccaaatactcttgatattgggaagccacctttaagatcaaaaagagacagtctagaaaaggaatctagtgatgatgatacaccttttgatggttctaactatttggcagataaagtggattctcctgttatttttgacttagaagacttagacagtgaaacagatgtatcaaaagcaggatgtgttgctacacaaaatcccaagaggattcaacgtatgaacagcagcttttcagtaaaaccttttgaaaaaactgatgtcgcaacaggatttgatcccctctctcttttggttgctgagactgaacagcagcaaaaagaagaagaggaggaggatgaagatgatagcaaaagcatttcaacaccatctgctaggcgtgatttagctgaagaaattgtgatgtatatgaataacatgagcagtcctttgacaagtcgtacaccaagcattgatttacaacgggcatgtgatgataaattaaataagaaaagtccaccattggtcaaggcatgcagaagatctagtctgcctcctaattctcctaagccagtgagacttaccaaatctaaaagttacacaaaaagtgaggagaaaccaagggatagactttggtcttctccagccttctcacctacttgcccatttagggaagaatctcaggatacattaacccactcatcaccttcatttaacttagatacactactagtacctaaactagatgttctaagaaacagtatgttcactgctggaaaaggagttgcagagaaagcaagcaaatggtattcaagattcaccatgtacaccacatcatctaaggatcaaagttctgatcgtaccagtctttcttcagtgggagcccaggattctgaatctacctctttaacagatgaagatgtctgccatgagttggaaggacctatctcctctcaagagaccagtgctacttcagggactaagagaattgatctcagccgaataagcctggaaagttctgcatccttggaaggatctctgtcgaagtttgccttacctgggaaatcagaagtgacatcttccttcaacgcgagtaatacaaatatcttccagaactatgcaatggaggttctcatctcaagttgctctcggtgtagaacttgtgattgtcttgtccatgatgaggaaatcatggctggctggacagcagatgattcaaatctcaatactacatgcccattctgtggcaatatcttcttaccctttctgaatatagaaataagagatttaagacgacctggaagatactttctaaagtcaagcccatcaacagaaaatatgcactttccatcctccatttcaagtcagacgaggcagtcttgcatttcaacatcagcctctggtcttgacacatctgctctctctgttcaagggaattttgatctaaatagcaaatctaaactgcaggaaaatttttgcacccgaagtattcagatccctgctaatagatcaaaaacagctatgtctaaatgtccaatatttccaatggccaggagtattagtacttctggccccttggataaggaagatactggaagacagaagctcatttctacaggcagcctgccagctactttacaaggagctacagattctttaggtttagaatggcaccttccaagtcccgatcctgtcactgttccgtatcttagtcctttagtggtatggaaagaacttgaaagcttattggaaaatgaaggtgatcatgcaataacagtagcagactttgtggaccatcatccaattgttttttggaacctggtatggtatttcagacgtcttgacttgcccagtaacttacctggattgattctttcttctgagcactgtaacaagtattcaaagattccccgccactgtatgtctgaagatagcaaatatgttttaatacaaatgttatgggacaatatgaagttacatcaggatccgggacagcccttgtacattctctggaatgcacacacccaaaaatatccaatggtccatttattgcaaaaaagtgataactcatttaaccaggaactgttgaaaagtatggtaaaaagcattaaaatgaatgatgtctatggaccaatgagtcagattttagagacactgaataagtgtccacattttaaaagacagaggagtttatacagagaaatactatttctctcacttgtggcactgggaagagaaaacattgatatagatgcttttgataaagagtacaagatggcatacgatcgtctcacacctagtcaagtcaagagtacacacaactgtgatagaccaccaagtacaggggtgatggaatgtcgaaaaacctttggagaaccttatctttagtaatgaactagtccgtaacttgaaagtatttcgatttcttggctttatatatcttgtggaaaggacgattggacagtcgttccagcatcaca

SEQ ID NO: 155 - DNA, 5822 bp, Homo sapiens
  source 1..5822: mol_type = genomic DNA
accgccaccatgattgaagacaaggggcctcgtgttgctgactactttgttgtagcaggattaactgatgtttcaaagcctctagaagaagaaattcacttcaatgatgcttgtcataaagtagctaaaccaaaagaacctattacagatgtttcagttattatcaaatctcttggggaggaagtcccacaggattatatctgtattgatgttaccccaactggattgtcagctgatcttaataatggaagtcttgtggggccacagatttacctttgctatagaagaggaagagataagcctccacttacagatctgggggttttatatgactggaaagaaagattgaaacagggttgtgaaattattcagagtactccctatgggcgccccgcaaatattagtgggagtacctcatcacaaagaatttatatcacttaccgaagagcctctgaaaacatgactcagaatacgttggctgtcactgacatatgtattattatacccagtaaaggagaaagcccaccacacacgttctgcaaagtcgacaagaatctcaataacagtatgtggggatcagcagtatacttgtgttataaaaaatcggtggcaaagacgaacactgtatcttacaaagctggcctaatttgtagatatcctcaagaagattatgagtcattctcactaccggaatctgttcctctattttgtttaccaatgggtgcaaccattgaatgttggccatcaaatagcaaataccctctgcctgtattttctacttttgttttaactggagcctcagctgaaaaggtttatggtgctgctattcagttttatgaaccatactctgaggagaatctcacagaaaagcagagacttcttttgggtttaacatcagcagatgggaagtctgatagttccaaaacaattcatactaacaaatgcatctgtcttctttctcactggcctttttttgatgcattcaggaagtttctgacttttctgtatcgttattccatctctgggcctcatgtccttccaattgagaagcatatttctcattttatgcataaagttccttttccatctcctcagagaccacggattttagttcagttatcaccacatgataatctgattctcagtcagcctgtgtcttcacctcttccactaagtggtggcaagttttcaacactactgcagaatttaggccctgaaaatgctgtgacactactggtgtttgcagtaacagaacataaaattcttatccattccctacggccatccgtgcttactagtgtgacagaagcattagtgtctatgattttccctttccactggccatgcccgtatgttcctctctgcccactggctttagcagatgtcttgagtgcaccatgtccattcatagtagggattgattcaagatactttgatctctatgatcctccaccagatgtcagttgtgttgatgtagataccaacactatttctcaaattggtgacaagaaaaatgtagcctggaagatacttccaaagaagccatgtaaaaatctgatgaacacactgaataatttgcatcagcaattggcaaaattgcagcagagaccgagagatgatggactcatggatttagcaataaatgactatgattttaattctggaaagaggttgcacatgatagatttggaaatccaagaggcatttttgtttttcatggcctctattttaaaaggttacagatcatacttaaggccaataacacaagccccatctgagacagccacagatgcagcctctctctttgccctacaagctttcttaagaagccgggaccggtcacatcaaaaattctataacatgatgaccaaaacacaaatgtttattcgcttcattgaagaatgttcttttgttagtgacaaagatgcaagcctggcattttttgatgattgtgtagataaagtggatatggacaagagcggtgaagtacgacttatagaactggatgaatctttcaaaagtgaacacactgtttttgtaacaccacctgagatcccccacctacccaatggtgaagaaccccctttacagtacagctataatggatttccagttcttaggaacaatttatttgaaagacctgaaggatttctacaagcaaagaagaacaaattgccttcaaaatcaagtagtcctaatagccctttgcccatgttcagaagaacaaaacaggaaattaaatcagcccataaaattgcaaagaggtactcttccatccctcagatgtggtctaggtgtctactgcgccactgttatggactgtggtttatttgtctcccagcttatgtgaaagtctgtcattcaaaagtcagggctctgaaaacagcatatgatgtgcttaaaaaaatgcagtcaaagaagatggatccacctgatgaggtatgctaccgcattcttatgcaactctgtggacaatatgatcagccagtgcttgcagttcgagtgctttttgaaatgcagaaagctggtattgaccccaatgccattacttatggttattataataaggctgttttggaaagtacctggccttcaagaagtcgtagtggctattttctttggacaaaagtaagaaatgttgttttaggagtaacacagttcaaaagagctttaaagaagcatgcacacttatcacaaacaactctctcagatggcagtgacctggatgctgttagtcatggcagcatggatagtggtcatgggacacacactgtggagcaggcaccttttaatacgggtttaatcaaagtatatgctactgatgatagatctagtacaggtggccagtctgatcttggatataattcattatctaaagatgaagttagaagaggggatacatctactgaagacattcaagaagaaaaagataaaaaagggagtgattgtagttccttgtcagagagtgagagtacaaaaggaagtgctgattgccttcctaagctcagttatcaaaattcttccagtatcgttcgcctcactggtacaagtaacaacagtgctggtaaaatatcaggagaaagcatggaaagcacacctgagctgctcttaatatcatctcttgaagatacaaatgaaacacgaaacattcaaagtagatgcttcaggaaaagacataaaagtgacaatgaaactaatttgcagcagcaagtggtctggggaaatagaaaccgtaatcttagtggaggggtactgatgggatttatgctcaatagaattaaccaggaagcaacccctggagatatagttgaaaaattgggagctgatgcaaaaattctttcaaatgttatctcaaaaagcacgagaccaaatactcttgatattgggaagccacctttaagatcaaaaagagacagtctagaaaaggaatctagtgatgatgatacaccttttgatggttctaactatttggcagataaagtggattctcctgttatttttgacttagaagacttagacagtgaaacagatgtatcaaaagcaggatgtgttgctacacaaaatcccaagaggattcaacgtatgaacagcagcttttcagtaaaaccttttgaaaaaactgatgtcgcaacaggatttgatcccctctctcttttggttgctgagactgaacagcagcaaaaagaagaagaggaggaggatgaagatgatagcaaaagcatttcaacaccatctgctaggcgtgatttagctgaagaaattgtgatgtatatgaataacatgagcagtcctttgacaagtcgtacaccaagcattgatttacaacgggcatgtgatgataaattaaataagaaaagtccaccattggtcaaggcatgcagaagatctagtctgcctcctaattctcctaagccagtgagacttaccaaatctaaaagttacacaaaaagtgaggagaaaccaagggatagactttggtcttctccagccttctcacctacttgcccatttagggaagaatctcaggatacattaacccactcatcaccttcatttaacttagatacactactagtacctaaactagatgttctaagaaacagtatgttcactgctggaaaaggagttgcagagaaagcaagcaaatggtattcaagattcaccatgtacaccacatcatctaaggatcaaagttctgatcgtaccagtctttcttcagtgggagcccaggattctgaatctacctctttaacagatgaagatgtctgccatgagttggaaggacctatctcctctcaagagaccagtgctacttcagggactaagagaattgatctcagccgaataagcctggaaagttctgcatccttggaaggatctctgtcgaagtttgccttacctgggaaatcagaagtgacatcttccttcaacgcgagtaatacaaatatcttccagaactatgcaatggaggttctcatctcaagttgctctcggtgtagaacttgtgattgtcttgtccatgatgaggaaatcatggctggctggacagcagatgattcaaatctcaatactacatgcccattctgtggcaatatcttcttaccctttctgaatatagaaataagagatttaagacgacctggaagatactttctaaagtcaagcccatcaacagaaaatatgcactttccatcctccatttcaagtcagacgaggcagtcttgcatttcaacatcagcctctggtcttgacacatctgctctctctgttcaagggaattttgatctaaatagcaaatctaaactgcaggaaaatttttgcacccgaagtattcagatccctgctaatagatcaaaaacagctatgtctaaatgtccaatatttccaatggccaggagtattagtacttctggccccttggataaggaagatactggaagacagaagctcatttctacaggcagcctgccagctactttacaaggagctacagattctttaggtttagaatggcaccttccaagtcccgatcctgtcactgttccgtatcttagtcctttagtggtatggaaagaacttgaaagcttattggaaaatgaaggtgatcatgcaataacagtagcagactttgtggaccatcatccaattgttttttggaacctggtatggtatttcagacgtcttgacttgcccagtaacttacctggattgattctttcttctgagcactgtaacaagtattcaaagattccccgccactgtatgtctgaagatagcaaatatgttttaatacaaatgttatgggacaatatgaagttacatcaggatccgggacagcccttgtacattctctggaatgcacacacccaaaaatatccaatggtccatttattgcaaaaaagtgataactcatttaaccaggaactgttgaaaagtatggtaaaaagcattaaaatgaatgatgtctatggaccaatgagtcagattttagagacactgaataagtgtccacattttaaaagacagaggagtttatacagagaaatactatttctctcacttgtggcactgggaagagaaaacattgatatagatgcttttgataaagagtacaagatggcatacgatcgtctcacacctagtcaagtcaagagtacacacaactgtgatagaccaccaagtacaggggtgatggaatgtcgaaaaacctttggagaaccttatctttagtaatgaactagtccgtaacttgaaagtatttcgatttcttggctttatatatcttgtggaaaggacgacagatgaaagcactgtatctgtac

SEQ ID NO: 156 - DNA, 1781 bp, Homo sapiens
  source 1..1781: mol_type = genomic DNA
accgccaccatgggagacccggggtcggagataatagaatctgtccctccagctggccctgaggcatctgagtcaacaacggatgaaaatgaagacgacattcagtttgtcagtgaaggaccattacgacctgttcttgaatacattgatctggtcagcagtgatgatgaagagcctagcacctcttatactgatagaatgcctgaatctaaggtgccatcctctgagaatcatcgcccagaaatgtgctctagctgcaatgttcctcttcccattggagatagcagctccttctctgggagttgttccagcagtccagaaaggatagtttctcaaacttcctctgttgagaacccattggagaaccagaaaaatgatcaaaataattcagatactaagatctctgagacagagacccttaaatcatcacagaattttcagactctgccttcatctccacttctggtcccccaagaatctttggcctcttctgaggtcaaagagaatttacgtatagattcttcttcagcttcacagcatggacgggatgccatcctctatctccagacacaagtagctgaaatgtcccgagtgatacgtgatctgcagtccaggagctgttttagatttcatcattctaggccaagtgagaactcctcagttccttgggacatctccacctctaaagaggaaaatttatccacagttgaagaagaaactgattacaaatcaccatcagctgatgacaaagggcagccatctgaccccagccaatctagtttcacaggtcttttgaagagaatggaacaaagaggtgttataaaaagggtgacattacaatctgaagcggagtcatgtgaagggaaacctgattgtgtgacttctaaaaaacgtttggttcctccattgcatcctcttctgagaattgccaccactgaggtttttaaagaccctgctgattgccatccttcttccttcatgggacacagggtatatcctgtggccaaggacacctctcctttccaaccaaacccaccagctgaaggccccattgtagaagcattagaacacagcaaaagaggaaacacaacatcccctctagattctacctcaaaagaaatggaggtcatgggttgtaggttttaccacgctgcctccattgcagcccgagctgctagctacatggcctatatgactcaatatcagcgtaaactctgggaagacatggaagatctggttcatgacccagaatttgatcgtggaaaagcaagatgcataatatctgatggtatggatgcaggcctttggcaactttgtactactagggacataatggactctgtagtcagagttatggccatggccatagactatagacggcaggcctggcttcgacttacatctctcactaagaaaacccaggagaagatctcccacttgccctttgatggtacttccctttttggacaagatgtgaaagctgttgttgcagaagacaacaatataaaagaaaatgactataaagatcacaaatactataatcagcatcgatacttttatagtcatgatcagaaagcacattatcacaatagaggatactccaaaggggattggtacaaacctcgaaaccacccctatagatatagaaagaagggagactctccagaacgccatgggtacaagaattagtaatgaactagtccgtaacttgaaagtatttcgatttcttggctttatatatcttgtggaaaggacgatgtaggccgaacctcgtaagcccg

SEQ ID NO: 157 - DNA, 3143 bp, Homo sapiens
  source 1..3143: mol_type = genomic DNA
accgccaccatgggagacccggggtcggagataatagaatctgtccctccagctggccctgaggcatctgagtcaacaacggatgaaaatgaagacgacattcagtttgtcagtgaaggaccattacgacctgttcttgaatacattgatctggtcagcagtgatgatgaagagcctagcacctcttatactgatgagaatattaaacgtaaagaccatattgattatcagaaggataaagttgctttaactctggctcgtctagcccgccatgttgaagtggagaaacagcagaaagaagagaagaatagagcattcagagaaaaaattgattttcagcatgctcatgggttacaagaattggaatttattcgaggacattctgatacagaagcagcaagactgtgtgtggaccagtggctaaaaatgccaggactcaaaacaggcacaattaattgtggaacaaaaagttcattccgaagaggaggccacacgtgggtgtctgggaaaccaattttatgtcctataatgcactgtaacaaggagtttgacaatgggcaccttctcttaggacatttgaaaaggttcgatcactctccatgtgatccaacaattacactacatggacctttcttcagctcctttgcttgtgtagtatgttataaaaaatttgttactcaacaacaatatagagatcacctttttgataaggaagccacagatgatggacataacaacaaccttcttcctcagattattcagtgttttgcatgtccaaattgcttccttctttttagcagaaaggaggagtgttcaaagcatatgtctggaaagaatcatttccatcagagtttcaaactgggtgataacaaaggaattgcacatccaatatctttcccatcttttgcaaagaaacttttgatctctctgtgcaaagatgttccctttcaagttaagtgtgtggcctgccacaagacactgcgttcccacatggagctcactgcccatttcagagttcattgtcgaaatgctggacctgtagctgtagctgagaagagcattacccaggttgcagagaaattcatattaagaggttattgtccagattgcaatcaagtctttgtggatgaaaccagcacccaaaatcataagcagaattcaggacacaaagtccgagtcattaactcagtggaagaatcagtcttactctattgccacagcagcgaagggaacaaggatccttcttctgacttgcatttattgttggatcaatcaaaattttcatcacttaaaagaaccatgtctattaaagaatctagctcactggagtgcattgccattccaaaaaagaagatgaatttaaaagataaaagccatgaaggtgttgcttgtgtccagaaagaaaaatcagtagttaaaacctggttctgtgaatgcaatcagcgattcccaagtgaagatgcagtagaaaagcatgttttctcagcaaacacaatgggttataaatgtgtggtctgtggaaaggtatgtgatgattcaggggtcattcgtttacacatgagccggattcacggaggggcacatttaaataactttcttttctggtgtcggacatgcaaaaaggagttaacaaggaaagatactatcatggcacatgtgactgaatttcataatggacacagatatttttatgagatggatgaggtagaaggtgaaactttgccatcatcctctacaacattggataatttgactgctaacaagccttcatcagctattactgttattgatcattccccggcaaatagttctccgaggggtaaatggcaatgccggatttgtgaagatatgtttgattcccaggaatatgtaaaacagcactgcatgtctttggcaagccacaagtttcatagatacagctgtgctcactgcagaaagccttttcataagatagaaacattgtaccgacattgccaagatgagcatgacaatgagataaagattaaatacttctgtgggctttgtgatcttatctttaatgtggaagaagcatttctgagtcattatgaggagcaccacagcatagattatgtatttgtgtcagaaaaaactgaaacttcaattaaaaccgaagatgattttccagtaatagagaccagtaaccagttaacttgtggttgccgtgagagttacatctgtaaagtcaacagaaaagaagattatagcagatgtctccaaatcatgctggataaaggaaaactgtggtttcgctgcagtttatgttcggcaacagcacagaatttaaccgacatgaacactcatatccatcaagtgcacaaagaaaagagtgatgaggaggagcagcagtatgtaatcaagtgtggcacctgcaccaaagcatttcatgatcctgagagtgcacagcagcatttccatagaaaacattgcttcttacagaaacccagtgtggctcattttggatctgaaaaatcaaacctgtacaagtttactgctagtgcctcacatacagagagaaaactgaaacaggcaataaactattcaaaaagtttagacatggagaaaggagttgagaatgacctaagctatcagaatataggaggaaacaccaattggaagcctccgctcaactgtaagatttataactacctgaacaggattggatgcttcttccttcatcctcgctgtagtaaaagaaaagatgctgctgattttgccatatgtatgcatgctggccgtctagatgaacaactacccaagcaaattcctttcaccatcctctcaggagatcaaggttttctggagctagagaatcaatttaagaagactcagaggccagctcatatactaaaccctcaccacttagagggagatatgatgtgtgccttgttaaatagcatatctgataccaccaaagaatgtgacagtgatgataacatgggtgccaaaaatacttcaataggagaagaatttatatccacagaagatgtggaattagaagaagctattagaagaagtcttgaggaaatgtagtaatgaactagtccgtaacttgaaagtatttcgatttcttggctttatatatcttgtggaaaggacgaaagccggcccattaagcccaagtt

SEQ ID NO: 158 - DNA, 3287 bp, Homo sapiens
  source 1..3287: mol_type = genomic DNA
accgccaccatgggagacccggggtcggagataatagaatctgtccctccagctggccctgaggcatctgagtcaacaacggatgaaaatgaagacgacattcagtttgtcagtgaaggaccattacgacctgttcttgaatacattgatctggtcagcagtgatgatgaagagcctagcacctcttatactgatgagaatattaaacgtaaagaccatattgattatcagaaggataaagttgctttaactctggctcgtctagcccgccatgttgaagtggagaaacagcagaaagaagagaagaatagagcattcagagaaaaaattgattttcagcatgctcatgggttacaagaattggaatttattcgaggacattctgatacagaagcagcaagactgtgtgtggaccagtggctaaaaatgccaggactcaaaacaggcacaattaattgtggaacaaaaagttcattccgaagaggaggccacacgtgggtgtctgggaaaccaattttatgtcctataatgcactgtaacaaggagtttgacaatgggcaccttctcttaggacatttgaaaaggttcgatcactctccatgtgatccaacaattacactacatggacctttcttcagctcctttgcttgtgtagtatgttataaaaaatttgttactcaacaacaatatagagatcacctttttgataaggaagccacagatgatggacataacaacaaccttcttcctcagattattcagtgttttgcatgtccaaattgcttccttctttttagcagaaaggaggagtgttcaaagcatatgtctggaaagaatcatttccatcagagtttcaaactgggtgataacaaaggaattgcacatccaatatctttcccatcttttgcaaagaaacttttgatctctctgtgcaaagatgttccctttcaagttaagtgtgtggcctgccacaagacactgcgttcccacatggagctcactgcccatttcagagttcattgtcgaaatgctggacctgtagctgtagctgagaagagcattacccaggttgcagagaaattcatattaagaggttattgtccagattgcaatcaagtctttgtggatgaaaccagcacccaaaatcataagcagaattcaggacacaaagtccgagtcattaactcagtggaagaatcagtcttactctattgccacagcagcgaagggaacaaggatccttcttctgacttgcatttattgttggatcaatcaaaattttcatcacttaaaagaaccatgtctattaaagaatctagctcactggagtgcattgccattccaaaaaagaagatgaatttaaaagataaaagccatgaaggtgttgcttgtgtccagaaagaaaaatcagtagttaaaacctggttctgtgaatgcaatcagcgattcccaagtgaagatgcagtagaaaagcatgttttctcagcaaacacaatgggttataaatgtgtggtctgtggaaaggtatgtgatgattcaggggtcattcgtttacacatgagccggattcacggaggggcacatttaaataactttcttttctggtgtcggacatgcaaaaaggagttaacaaggaaagatactatcatggcacatgtgactgaatttcataatggacacagatatttttatgagatggatgaggtagaaggtgaaactttgccatcatcctctacaacattggataatttgactgctaacaagccttcatcagctattactgttattgatcattccccggcaaatagttctccgaggggtaaatggcaatgccggatttgtgaagatatgtttgattcccaggaatatgtaaaacagcactgcatgtctttggcaagccacaagtttcatagatacagctgtgctcactgcagaaagccttttcataagatagaaacattgtaccgacattgccaagatgagcatgacaatgagataaagattaaatacttctgtgggctttgtgatcttatctttaatgtggaagaagcatttctgagtcattatgaggagcaccacagcatagattatgtatttgtgtcagaaaaaactgaaacttcaattaaaaccgaagatgattttccagtaatagagaccagtaaccagttaacttgtggttgccgtgagagttacatctgtaaagtcaacagaaaagaagattatagcagatgtctccaaatcatgctggataaaggaaaactgtggtttcgctgcagtttatgttcggcaacagcacagaatttaaccgacatgaacactcatatccatcaagtgcacaaagaaaagagtgatgaggaggagcagcagtatgtaatcaagtgtggcacctgcaccaaagcatttcatgatcctgagagtgcacagcagcatttccatagaaaacattgcttcttacagaaacccagtgtggctcattttggatctgaaaaatcaaacctgtacaagtttactgctagtgcctcacatacagagagaaaactgaaacaggcaataaactattcaaaaagtttagacatggagaaaggagttgagaatgacctaagctatcagaatatagaggaagaaattgttgagcttccagatttggattacctgcgaaccatgactcatatagtctttgtagattttgataactggtcaaacttttttggtcatctaccagggcatctaaaccaaggaacatttatttggggctttcaaggaggaaacaccaattggaagcctccgctcaactgtaagatttataactacctgaacaggattggatgcttcttccttcatcctcgctgtagtaaaagaaaagatgctgctgattttgccatatgtatgcatgctggccgtctagatgaacaactacccaagcaaattcctttcaccatcctctcaggagatcaaggttttctggagctagagaatcaatttaagaagactcagaggccagctcatatactaaaccctcaccacttagagggagatatgatgtgtgccttgttaaatagcatatctgataccaccaaagaatgtgacagtgatgataacatgggtgccaaaaatacttcaataggagaagaatttatatccacagaagatgtggaattagaagaagctattagaagaagtcttgaggaaatgtagtaatgaactagtccgtaacttgaaagtatttcgatttcttggctttatatatcttgtggaaaggacgatcgcagtgggaaagacctcgatat

SEQ ID NO: 159 - DNA, 2405 bp, Homo sapiens
  source 1..2405: mol_type = genomic DNA
accgccaccatgagctttgatccaaaccttctccacaacaatggacataatgggtaccctaatggtacttcagcagcactgcgtgaaactggggttattgaaaaactgttaacctcttacggatttattcagtgttcagaacgtcaagctagacttttcttccactgttcacagtataatggcaacctgcaagacttaaaagtaggagatgatgttgaatttgaagtatcatcggaccgacggactgggaaacccattgctgttaaactggtgaagataaaacaagaaatcctccctgaagaacgaatgaatggacaagaagtgttttatctgacttacacccctgaagatgtcgaagggaacgttcagctggaaactggagataaaataaactttgtaattgataacaataaacatactggtgctgtaagtgctcgcaacattatgctgttgaaaaagaaacaagcccgctgtcagggagtagtttgtgccatgaaggaggcatttggctttattgaaagaggtgatgttgtaaaagagatattctttcactatagtgaatttaagggtgacttagaaaccttacagcctggcgatgatgtggaattcacaatcaaggacagaaatggtaaagaagttgcaacagatgtcagactattgcctcaaggaacagtcatttttgaagatatcagcattgaacattttgaaggaactgtaaccaaagttatcccaaaagtacccagtaaaaaccagaatgacccattgccaggacgcatcaaagttgactttgtgatccctaaagaacttccctttggagacaaagatacgaaatccaaggtgaccctgctggaaggtgaccatgttaggtttaatatttcaacagaccgacgtgacaaattagagcgagcaaccaatatagaagttctgtcaaatacatttcagttcactaatgaagcccgagaaatgggtgtgattgctgccatgagagatggttttggtttcatcaagtgtgtggatcgtgatgttcgtatgttcttccacttcagtgaaattctggatgggaaccagctccatattgcagatgaagtagagtttactgtggttcctgatatgctctctgctcaaagaaatcatgctattaggattaaaaaacttcccaagggcacggtttcatttcattcccattcagatcaccgttttctgggcacggtagaaaaagaagccactttttccaatcctaaaaccactagcccaaataaaggcaaagagaaggaggctgaggatggcattattgcttatgatgactgtggggtgaaactgactattgcttttcaagccaaggatgtggaaggatctacttctcctcaaataggagataaggttgaatttagtattagtgacaaacagaggcctggacagcaggttgcaacttgtgtgcgacttttaggtcgtaattctaactccaagaggctcttgggttatgtggcaactctgaaggataattttggatttattgaaacagccaatcatgataaggaaatctttttccattacagtgagttctctggtgatgttgatagcctggaactgggggacatggtcgagtatagcttgtccaaaggcaaaggcaacaaagtcagtgcagaaaaagtgaacaaaacacactcagtgaatggcattactgaggaagctgatcccaccatttactctggcaaagtaattcgccccctgaggagtgttgatccaacacagactgagtaccaaggaatgattgagattgtggaggagggcgatatgaaaggtgaggtctatccatttggcatcgttgggatggccaacaaaggggattgcctgcagaaaggggagagcgtcaagttccaattgtgtgtcctgggccaaaatgcacaaactatggcttacaacatcacacccctgcgcagggccacagtggaatgtgtgaaagatcagtttggcttcattaactatgaagtaggagatagcaagaagctctttttccatgtgaaagaagttcaggatggcattgagctacaggcaggagatgaggtggagttctcagtgattcttaatcagcgcactggcaagtgcagcgcctgtaatgtttggcgagtctgtgagggccccaaggctgttgcagctcctcgacctgatcggttggtcaatcgcttgaagaatatcactctggatgatgccagtgctcctcgcctaatggttcttcgtcagccaaggggaccagataactcaatggggtttggtgcagaaagaaagatccgtcaagctggtgtcattgactagtaatgaactagtccgtaacttgaaagtatttcgatttcttggctttatatatcttgtggaaaggacgagcctgctgtgaaaggaaatggcgc

SEQ ID NO: 160 - DNA, 2636 bp, Homo sapiens
  source 1..2636: mol_type = genomic DNA
accgccaccatggagaacgtttttactgtgtcatcagatcctcatccctctcctgcagcccctccttcactttctttacccttatcttcatcttctacctcatctgggactaaaaaacaaaagaggaccccaacttatcagagatctatgagctttgatccaaaccttctccacaacaatggacataatgggtaccctaatggtacttcagcagcactgcgtgaaactggggttattgaaaaactgttaacctcttacggatttattcagtgttcagaacgtcaagctagacttttcttccactgttcacagtataatggcaacctgcaagacttaaaagtaggagatgatgttgaatttgaagtatcatcggaccgacggactgggaaacccattgctgttaaactggtgaagataaaacaagaaatcctccctgaagaacgaatgaatggacaagttgtgtgcgctgttcctcacaacttagagagtaaatctccagctgccccgggtcagagtccaacagggagtgtatgctacgaacgtaatggggaagtgttttatctgacttacacccctgaagatgtcgaagggaacgttcagctggaaactggagataaaataaactttgtaattgataacaataaacatactggtgctgtaagtgctcgcaacattatgctgttgaaaaagaaacaagcccgctgtcagggagtagtttgtgccatgaaggaggcatttggctttattgaaagaggtgatgttgtaaaagagatattctttcactatagtgaatttaagggtgacttagaaaccttacagcctggcgatgatgtggaattcacaatcaaggacagaaatggtaaagaagttgcaacagatgtcagactattgcctcaaggaacagtcatttttgaagatatcagcattgaacattttgaaggaactgtaaccaaagttatcccaaaagtacccagtaaaaaccagaatgacccattgccaggacgcatcaaagttgactttgtgatccctaaagaacttccctttggagacaaagatacgaaatccaaggtgaccctgctggaaggtgaccatgttaggtttaatatttcaacagaccgacgtgacaaattagagcgagcaaccaatatagaagttctgtcaaatacatttcagttcactaatgaagcccgagaaatgggtgtgattgctgccatgagagatggttttggtttcatcaagtgtgtggatcgtgatgttcgtatgttcttccacttcagtgaaattctggatgggaaccagctccatattgcagatgaagtagagtttactgtggttcctgatatgctctctgctcaaagaaatcatgctattaggattaaaaaacttcccaagggcacggtttcatttcattcccattcagatcaccgttttctgggcacggtagaaaaagaagccactttttccaatcctaaaaccactagcccaaataaaggcaaagagaaggaggctgaggatggcattattgcttatgatgactgtggggtgaaactgactattgcttttcaagccaaggatgtggaaggatctacttctcctcaaataggagataaggttgaatttagtattagtgacaaacagaggcctggacagcaggttgcaacttgtgtgcgacttttaggtcgtaattctaactccaagaggctcttgggttatgtggcaactctgaaggataattttggatttattgaaacagccaatcatgataaggaaatctttttccattacagtgagttctctggtgatgttgatagcctggaactgggggacatggtcgagtatagcttgtccaaaggcaaaggcaacaaagtcagtgcagaaaaagtgaacaaaacacactcagtgaatggcattactgaggaagctgatcccaccatttactctggcaaagtaattcgccccctgaggagtgttgatccaacacagactgagtaccaaggaatgattgagattgtggaggagggcgatatgaaaggtgaggtctatccatttggcatcgttgggatggccaacaaaggggattgcctgcagaaaggggagagcgtcaagttccaattgtgtgtcctgggccaaaatgcacaaactatggcttacaacatcacacccctgcgcagggccacagtggaatgtgtgaaagatcagtttggcttcattaactatgaagtaggagatagcaagaagctctttttccatgtgaaagaagttcaggatggcattgagctacaggcaggagatgaggtggagttctcagtgattcttaatcagcgcactggcaagtgcagcgcctgtaatgtttggcgagtctgtgagggccccaaggctgttgcagctcctcgacctgatcggttggtcaatcgcttgaagaatatcactctggatgatgccagtgctcctcgcctaatggttcttcgtcagccaaggggaccagataactcaatggggtttggtgcagaaagaaagatccgtcaagctggtgtcattgactagtaatgaactagtccgtaacttgaaagtatttcgatttcttggctttatatatcttgtggaaaggacgaataccttaagggtggcagtggagc

SEQ ID NO: 161 - DNA, 2543 bp, Homo sapiens
  source 1..2543: mol_type = genomic DNA
accgccaccatggagaacgtttttactgtgtcatcagatcctcatccctctcctgcagcccctccttcactttctttacccttatcttcatcttctacctcatctgggactaaaaaacaaaagaggaccccaacttatcagagatctatgagctttgatccaaaccttctccacaacaatggacataatgggtaccctaatggtacttcagcagcactgcgtgaaactggggttattgaaaaactgttaacctcttacggatttattcagtgttcagaacgtcaagctagacttttcttccactgttcacagtataatggcaacctgcaagacttaaaagtaggagatgatgttgaatttgaagtatcatcggaccgacggactgggaaacccattgctgttaaactggtgaagataaaacaagaaatcctccctgaagaacgaatgaatggacaagaagtgttttatctgacttacacccctgaagatgtcgaagggaacgttcagctggaaactggagataaaataaactttgtaattgataacaataaacatactggtgctgtaagtgctcgcaacattatgctgttgaaaaagaaacaagcccgctgtcagggagtagtttgtgccatgaaggaggcatttggctttattgaaagaggtgatgttgtaaaagagatattctttcactatagtgaatttaagggtgacttagaaaccttacagcctggcgatgatgtggaattcacaatcaaggacagaaatggtaaagaagttgcaacagatgtcagactattgcctcaaggaacagtcatttttgaagatatcagcattgaacattttgaaggaactgtaaccaaagttatcccaaaagtacccagtaaaaaccagaatgacccattgccaggacgcatcaaagttgactttgtgatccctaaagaacttccctttggagacaaagatacgaaatccaaggtgaccctgctggaaggtgaccatgttaggtttaatatttcaacagaccgacgtgacaaattagagcgagcaaccaatatagaagttctgtcaaatacatttcagttcactaatgaagcccgagaaatgggtgtgattgctgccatgagagatggttttggtttcatcaagtgtgtggatcgtgatgttcgtatgttcttccacttcagtgaaattctggatgggaaccagctccatattgcagatgaagtagagtttactgtggttcctgatatgctctctgctcaaagaaatcatgctattaggattaaaaaacttcccaagggcacggtttcatttcattcccattcagatcaccgttttctgggcacggtagaaaaagaagccactttttccaatcctaaaaccactagcccaaataaaggcaaagagaaggaggctgaggatggcattattgcttatgatgactgtggggtgaaactgactattgcttttcaagccaaggatgtggaaggatctacttctcctcaaataggagataaggttgaatttagtattagtgacaaacagaggcctggacagcaggttgcaacttgtgtgcgacttttaggtcgtaattctaactccaagaggctcttgggttatgtggcaactctgaaggataattttggatttattgaaacagccaatcatgataaggaaatctttttccattacagtgagttctctggtgatgttgatagcctggaactgggggacatggtcgagtatagcttgtccaaaggcaaaggcaacaaagtcagtgcagaaaaagtgaacaaaacacactcagtgaatggcattactgaggaagctgatcccaccatttactctggcaaagtaattcgccccctgaggagtgttgatccaacacagactgagtaccaaggaatgattgagattgtggaggagggcgatatgaaaggtgaggtctatccatttggcatcgttgggatggccaacaaaggggattgcctgcagaaaggggagagcgtcaagttccaattgtgtgtcctgggccaaaatgcacaaactatggcttacaacatcacacccctgcgcagggccacagtggaatgtgtgaaagatcagtttggcttcattaactatgaagtaggagatagcaagaagctctttttccatgtgaaagaagttcaggatggcattgagctacaggcaggagatgaggtggagttctcagtgattcttaatcagcgcactggcaagtgcagcgcctgtaatgtttggcgagtctgtgagggccccaaggctgttgcagctcctcgacctgatcggttggtcaatcgcttgaagaatatcactctggatgatgccagtgctcctcgcctaatggttcttcgtcagccaaggggaccagataactcaatggggtttggtgcagaaagaaagatccgtcaagctggtgtcattgactagtaatgaactagtccgtaacttgaaagtatttcgatttcttggctttatatatcttgtggaaaggacgaaaatacacaaaccgatttattgac

SEQ ID NO: 162 - DNA, 2498 bp, Homo sapiens
  source 1..2498: mol_type = genomic DNA
accgccaccatgagctttgatccaaaccttctccacaacaatggacataatgggtaccctaatggtacttcagcagcactgcgtgaaactggggttattgaaaaactgttaacctcttacggatttattcagtgttcagaacgtcaagctagacttttcttccactgttcacagtataatggcaacctgcaagacttaaaagtaggagatgatgttgaatttgaagtatcatcggaccgacggactgggaaacccattgctgttaaactggtgaagataaaacaagaaatcctccctgaagaacgaatgaatggacaagttgtgtgcgctgttcctcacaacttagagagtaaatctccagctgccccgggtcagagtccaacagggagtgtatgctacgaacgtaatggggaagtgttttatctgacttacacccctgaagatgtcgaagggaacgttcagctggaaactggagataaaataaactttgtaattgataacaataaacatactggtgctgtaagtgctcgcaacattatgctgttgaaaaagaaacaagcccgctgtcagggagtagtttgtgccatgaaggaggcatttggctttattgaaagaggtgatgttgtaaaagagatattctttcactatagtgaatttaagggtgacttagaaaccttacagcctggcgatgatgtggaattcacaatcaaggacagaaatggtaaagaagttgcaacagatgtcagactattgcctcaaggaacagtcatttttgaagatatcagcattgaacattttgaaggaactgtaaccaaagttatcccaaaagtacccagtaaaaaccagaatgacccattgccaggacgcatcaaagttgactttgtgatccctaaagaacttccctttggagacaaagatacgaaatccaaggtgaccctgctggaaggtgaccatgttaggtttaatatttcaacagaccgacgtgacaaattagagcgagcaaccaatatagaagttctgtcaaatacatttcagttcactaatgaagcccgagaaatgggtgtgattgctgccatgagagatggttttggtttcatcaagtgtgtggatcgtgatgttcgtatgttcttccacttcagtgaaattctggatgggaaccagctccatattgcagatgaagtagagtttactgtggttcctgatatgctctctgctcaaagaaatcatgctattaggattaaaaaacttcccaagggcacggtttcatttcattcccattcagatcaccgttttctgggcacggtagaaaaagaagccactttttccaatcctaaaaccactagcccaaataaaggcaaagagaaggaggctgaggatggcattattgcttatgatgactgtggggtgaaactgactattgcttttcaagccaaggatgtggaaggatctacttctcctcaaataggagataaggttgaatttagtattagtgacaaacagaggcctggacagcaggttgcaacttgtgtgcgacttttaggtcgtaattctaactccaagaggctcttgggttatgtggcaactctgaaggataattttggatttattgaaacagccaatcatgataaggaaatctttttccattacagtgagttctctggtgatgttgatagcctggaactgggggacatggtcgagtatagcttgtccaaaggcaaaggcaacaaagtcagtgcagaaaaagtgaacaaaacacactcagtgaatggcattactgaggaagctgatcccaccatttactctggcaaagtaattcgccccctgaggagtgttgatccaacacagactgagtaccaaggaatgattgagattgtggaggagggcgatatgaaaggtgaggtctatccatttggcatcgttgggatggccaacaaaggggattgcctgcagaaaggggagagcgtcaagttccaattgtgtgtcctgggccaaaatgcacaaactatggcttacaacatcacacccctgcgcagggccacagtggaatgtgtgaaagatcagtttggcttcattaactatgaagtaggagatagcaagaagctctttttccatgtgaaagaagttcaggatggcattgagctacaggcaggagatgaggtggagttctcagtgattcttaatcagcgcactggcaagtgcagcgcctgtaatgtttggcgagtctgtgagggccccaaggctgttgcagctcctcgacctgatcggttggtcaatcgcttgaagaatatcactctggatgatgccagtgctcctcgcctaatggttcttcgtcagccaaggggaccagataactcaatggggtttggtgcagaaagaaagatccgtcaagctggtgtcattgactagtaatgaactagtccgtaacttgaaagtatttcgatttcttggctttatatatcttgtggaaaggacgaagctataaatacgtgtataaaccc

SEQ ID NO: 163 - DNA, 1670 bp, Homo sapiens
  source 1..1670: mol_type = genomic DNA
accgccaccatggctgtcagccacctgccaaccatggtccaggaatcggtgaccttcaaggatgtggctatactgttcacccaggaagagtgggggcagctgagccccgcccagagggccctgtacagggacgtgatgctggagaactacagcaacctggtctcactgggactcttaggacccaaaccagatacgttttcccagctagaaaaaagggaagtgtggatgccagaggacacccctggaggcttctgtcttgactggatgactatgcctgccagtaagaaatctactgtcaaggcagagattcctgaagaagaattggatcaatggacaataaaggaaagattcagtagcagtagtcactggaagtgtgctagcctgctggagtggcaatgtggaggccaggagatcagtttgcagcgagtggtactcactcaccccaacaccccatcacaggaatgtgatgaatccgggagcactatgagctcatctcttcacagtgatcaaagtcagggatttcaacctagcaaaaatgcctttgagtgtagtgagtgtggaaaagtcttctctaagagttcaactcttaataaacatcagaaaattcataatgaaaaaaatgcaaatcagaaaattcatattaaggagaaaagatatgaatgtagagaatgtgggaaagcctttcaccagagtacgcaccttatccatcaccaaagaattcacactggcgagaaaccctatgaatgtaaggaatgtggcaaggccttctcagtgagctcctcacttacgtaccatcagaaaattcatactggagagaagccttttgaatgcaacttatgtggaaaagcttttatccgaaatatacaccttgcccatcatcatagaatacatactggagagaaaccttttaaatgtaacatttgtgaaaaagcctttgtgtgcagggcacaccttaccaaacaccagaatatccacagtggagagaaaccctataaatgcaatgaatgtggaaaagcctttaatcagagtacaagtttccttcagcatcagagaattcacactggagagaaaccctttgaatgtaatgaatgtgggaaggccttcagggtgaactcttcccttactgaacatcagagaattcatactggagagaaaccttataaatgtaatgaatgtgggaaagctttcagggataattcatcctttgcacgacatcggaaaattcacactggagagaaaccttacagatgtggcttgtgtgagaaagcctttcgggaccaatcagcactagcccaacatcagagaattcatactggggaaaaaccttatacatgtaacatatgtgaaaaagccttcagtgaccattcagcccttacccaacataagagaattcatactagggaaaaaccttacaaatgtaaaatctgtgagaaagcctttatccgaagcactcacctgactcaacatcagaggattcacacaggagagaaaccctataaatgtaataaatgtgggaaagcttttaaccagactgcaaacctcattcagcatcagagacatcatattggagagaagtagtaatgaactagtccgtaacttgaaagtatttcgatttcttggctttatatatcttgtggaaaggacgatttgacccaggacggctatatcca

SEQ ID NO: 164 - DNA, 2627 bp, Homo sapiens
  source 1..2627: mol_type = genomic DNA
accgccaccatgtctgtggatgagaagcctgactcccccatgtatgtgtatgagtccacagtccactgcaccaacatcctcctgggcctcaatgaccagcggaaaaaggatattctctgtgacgtgactttgatcgtggagaggaaggagttccgggcccaccgggctgtgctggccgcatgcagtgaatatttttggcaggcgctggttggacagacaaaaaatgatttggtggtcagcttgcctgaggaggtcacagccaggggctttgggccgctgttacagtttgcctacactgccaagctgttactcagcagagaaaacatccgcgaggtcatccgctgtgctgagttcctgcgcatgcacaacctggaggactcctgcttcagcttcctgcagacccagctcctgaacagtgaggatggcctgtttgtgtgccggaaggatgctgcgtgccagcgcccacacgaggactgcgagaactctgcaggagaggaggaggatgaagaggaggagacgatggattcagagacggccaagatggcttgccccagggaccagatgcttccagagcccatcagctttgaggccgccgccatccccgtagcagagaaggaagaagccctgctgcccgagcctgacgtgcccacagacaccaaggagagctcagaaaaggacgcgttaacgcagtaccccagatacaagaaataccagcttgcatgtaccaagaatgtctataatgcatcatcacacagtacctcaggttttgcaagcacattccgggaagataactctagcaacagcctcaagccggggcttgccagggggcagattaaaagtgagccgcccagtgaagagaatgaggaagagagcatcacgctctgcctgtctggagatgagcctgacgccaaggacagagcgggggatgtcgagatggaccggaaacagcccagccctgcccctacccccacggccccagctggggccgcctgcctggagagatccaggagcgtggcctcgccctcctgcttaaggtctctgttcagcataacgaaaagtgtggagctgtctggcctgcccagtacatctcagcagcactttgccaggagtccagcctgcccttttgacaaggggatcactcagggtgaccttaaaactgactacacccctttcacagggaattatggacagccccacgtgggccagaaggaggtgtccaacttcaccatggggtcgcccctcagggggcctgggttggaggctctctgtaaacaggagggagagctggaccggaggagcgtgatcttctcctccagcgcttgtgaccaagtgagcacctcggtgcattcttattctggggtgagcagtttggacaaagacctctctgagccggtgccaaagggtctgtgggtgggagccggccagtccctccccagctcgcaggcctactcccacggtgggctgatggccgaccacttgccaggaaggatgcggcccaacaccagctgcccggtaccaatcaaagtctgccctcgctcaccccccttggagaccaggaccaggacttccagctcctgctcttcctattcctacgcggaggacgggagcgggggctcaccctgcagcctccctctctgtgagttctcctcctcgccctgttcccagggagccagattccttgccacagaacatcaggaaccaggcctgatgggagatggaatgtacaaccaagtgcggccccaaattaaatgtgagcagtcttatggaaccaactccagtgacgaatccggatcgttctcggaagcagacagtgagtcgtgtcctgtgcaggacaggggccaggaggtaaaacttccttttcctgtagatcaaatcacagatcttccaaggaacgatttccagatgatgattaaaatgcacaagctaacctcagaacagttagagtttattcatgatgtccgacggcgcagcaagaaccgcatcgcggcccagcgctgccgcaaaaggaaactggactgtattcagaatttagaatgtgaaatccgcaaattggtgtgtgagaaagagaaactgttgtcagagaggaatcaactgaaagcatgcatgggggaactgttggacaacttctcctgcctttcccaggaagtttgccgagacatccagagccccgagcagatccaggccctgcatcggtattgccctgtcctcagacccatggacttgcccacggcctccagtattaaccctgcgcccttgggtgctgagcagaacattgcggcctcccaatgcgcagtgggggaaaacgtgccctgctgcttggagccaggcgcggctccccccggacccccctgggcacccagcaacacctccgagaattgtacctctgggaggagactagaaggcactgacccgggaaccttctcagagagaggacctcctcttgaacccaggagccaaacagtgaccgtggacttctgccaggaaatgactgataagtgtacaactgacgaacagcccaggaaagattatacctagtaatgaactagtccgtaacttgaaagtatttcgatttcttggctttatatatcttgtggaaaggacgacggcagtgtcaactaaggaggaca

SEQ ID NO: 165 - DNA, 668 bp, Homo sapiens
  source 1..668: mol_type = genomic DNA
accgccaccatggccaccgtcaggcatcggcctgaagcccttgagcttctggaagcccagagcaaatttaccaagaaagagcttcagatcctttacagaggatttaagaatgaatgccccagtggtgttgttaatgaagaaaccttcaaagagatttactcgcagttctttccacagggagactctacaacatatgcacattttctgttcaatgcatttgatacagaccacaatggagctgtgagtttcgaggatttcatcaaaggtctttccattttgctccgggggacagtacaagaaaaactcaattgggcatttaatctgtatgacataaataaagatggctacatcactaaagaggaaatgcttgatataatgaaagcaatatacgatatgatgggtaaatgtacatatcctgtcctcaaagaagatgctcccagacaacacgttgaaacattttttcagaaaatggacaaaaataaagatggggttgttaccatagatgagttcattgaaagctgccaaaaagatgaaaacataatgcgctccatgcagctctttgaaaatgtgatttagtaatgaactagtccgtaacttgaaagtatttcgatttcttggctttatatatcttgtggaaaggacgaagttattgcattacgtatggtgga

SEQ ID NO: 166 - DNA, 779 bp, Homo sapiens
  source 1..779: mol_type = genomic DNA
accgccaccatgagtggctgtagaaagcggtgtaaacgtgaaatactgaaatttgcccagtaccttctcagactattaacaggttctcttcatacagacagcgtggaagatgaactggagatggccaccgtcaggcatcggcctgaagcccttgagcttctggaagcccagagcaaatttaccaagaaagagcttcagatcctttacagaggatttaagaatgaatgccccagtggtgttgttaatgaagaaaccttcaaagagatttactcgcagttctttccacagggagactctacaacatatgcacattttctgttcaatgcatttgatacagaccacaatggagctgtgagtttcgaggatttcatcaaaggtctttccattttgctccgggggacagtacaagaaaaactcaattgggcatttaatctgtatgacataaataaagatggctacatcactaaagaggaaatgcttgatataatgaaagcaatatacgatatgatgggtaaatgtacatatcctgtcctcaaagaagatgctcccagacaacacgttgaaacattttttcagaaaatggacaaaaataaagatggggttgttaccatagatgagttcattgaaagctgccaaaaagatgaaaacataatgcgctccatgcagctctttgaaaatgtgatttagtaatgaactagtccgtaacttgaaagtatttcgatttcttggctttatatatcttgtggaaaggacgactcgctcgcactagaattagttac

SEQ ID NO: 167 - DNA, 791 bp, Homo sapiens
  source 1..791: mol_type = genomic DNA
accgccaccatgaacttggaagggcttgaaatgatagcagttctgatcgtcattgtgctttttgttaaattattggaacagtttgggctgattgaagcaggtttagaagacagcgtggaagatgaactggagatggccaccgtcaggcatcggcctgaagcccttgagcttctggaagcccagagcaaatttaccaagaaagagcttcagatcctttacagaggatttaagaatgaatgccccagtggtgttgttaatgaagaaaccttcaaagagatttactcgcagttctttccacagggagactctacaacatatgcacattttctgttcaatgcatttgatacagaccacaatggagctgtgagtttcgaggatttcatcaaaggtctttccattttgctccgggggacagtacaagaaaaactcaattgggcatttaatctgtatgacataaataaagatggctacatcactaaagaggaaatgcttgatataatgaaagcaatatacgatatgatgggtaaatgtacatatcctgtcctcaaagaagatgctcccagacaacacgttgaaacattttttcagaaaatggacaaaaataaagatggggttgttaccatagatgagttcattgaaagctgccaaaaagatgaaaacataatgcgctccatgcagctctttgaaaatgtgatttagtaatgaactagtccgtaacttgaaagtatttcgatttcttggctttatatatcttgtggaaaggacgattagttatatcctttacgtacgtg

SEQ ID NO: 168 - DNA, 752 bp, Homo sapiens
  source 1..752: mol_type = genomic DNA
accgccaccatgaatgtgaggagggtggaaagcatttcggctcagctggaggaggccagctctacaggcgacagcgtggaagatgaactggagatggccaccgtcaggcatcggcctgaagcccttgagcttctggaagcccagagcaaatttaccaagaaagagcttcagatcctttacagaggatttaagaatgaatgccccagtggtgttgttaatgaagaaaccttcaaagagatttactcgcagttctttccacagggagactctacaacatatgcacattttctgttcaatgcatttgatacagaccacaatggagctgtgagtttcgaggatttcatcaaaggtctttccattttgctccgggggacagtacaagaaaaactcaattgggcatttaatctgtatgacataaataaagatggctacatcactaaagaggaaatgcttgatataatgaaagcaatatacgatatgatgggtaaatgtacatatcctgtcctcaaagaagatgctcccagacaacacgttgaaacattttttcagaaaatggacaaaaataaagatggggttgttaccatagatgagttcattgaaagctgccaaaaagatgaaaacataatgcgctccatgcagctctttgaaaatgtgatttagtaatgaactagtccgtaacttgaaagtatttcgatttcttggctttatatatcttgtggaaaggacgaagttcgtggcaaacaaacacgcag

SEQ ID NO: 169 - DNA, 872 bp, Homo sapiens
  source 1..872: mol_type = genomic DNA
accgccaccatgcagccggctaaggaagtgacaaaggcgtcggacggcagcctcctgggggacctcgggcacacaccacttagcaagaaggagggtatcaagtggcagaggccgaggctcagccgccaggctttgatgagatgctgcctggtcaagtggatcctgtccagcacagccccacagggctcagatagcagcgacagtgagctggagctgtccacggtgcgccaccagccagaggggctggaccagctgcaggcccagaccaagttcaccaagaaggagctgcagtctctctacaggggctttaagaatgagtgtcccacgggcctggtggacgaagacaccttcaaactcatttacgcgcagttcttccctcagggagatgccaccacctatgcacacttcctcttcaacgcctttgatgcggacgggaacggggccatccactttgaggactttgtggttggcctctccatcctgctgcggggcacagtccacgagaagctcaagtgggcctttaatctctacgacattaacaaggatggctacatcaccaaagaggagatgctggccatcatgaagtccatctatgacatgatgggccgccacacctaccccatcctgcgggaggacgcgccggcggagcacgtggagaggttcttcgagaaaatggaccggaaccaggatggggtagtgaccattgaagagttcctggaggcctgtcagaaggatgagaacatcatgagctccatgcagctgtttgagaatgtcatctagtaatgaactagtccgtaacttgaaagtatttcgatttcttggctttatatatcttgtggaaaggacgaatcggttatacctttagcaagtgt

SEQ ID NO: 170 - DNA, 794 bp, Homo sapiens
  source 1..794: mol_type = genomic DNA
accgccaccatgggcatccagggcatggagctgtgcgccatggccgtggtggtgctgctgttcatcgccgtcctcaagcagttcggcatcctggagcccatatccatggaagatagcagcgacagtgagctggagctgtccacggtgcgccaccagccagaggggctggaccagctgcaggcccagaccaagttcaccaagaaggagctgcagtctctctacaggggctttaagaatgagtgtcccacgggcctggtggacgaagacaccttcaaactcatttacgcgcagttcttccctcagggagatgccaccacctatgcacacttcctcttcaacgcctttgatgcggacgggaacggggccatccactttgaggactttgtggttggcctctccatcctgctgcggggcacagtccacgagaagctcaagtgggcctttaatctctacgacattaacaaggatggctacatcaccaaagaggagatgctggccatcatgaagtccatctatgacatgatgggccgccacacctaccccatcctgcgggaggacgcgccggcggagcacgtggagaggttcttcgagaaaatggaccggaaccaggatggggtagtgaccattgaagagttcctggaggcctgtcagaaggatgagaacatcatgagctccatgcagctgtttgagaatgtcatctagtaatgaactagtccgtaacttgaaagtatttcgatttcttggctttatatatcttgtggaaaggacgatcgtatagtctttggccgtcatca

SEQ ID NO: 171 - DNA, 959 bp, Homo sapiens
  source 1..959: mol_type = genomic DNA
accgccaccatgcggggccagggccgcaaggagagtttgtccgattcccgagacctggacggctcctacgaccagctcacgggccaccctccagggcccactaaaaaagcgctgaagcagcgattcctcaagctgctgccgtgctgcgggccccaagccctgccctcagtcagtgaaattggccgggtcttccgctttctcggtgacagttcgctcccttcagcattagccgccccagcctccctccgcccccacagaccccgcctgctggacccagacagcgtggacgatgaatttgaattgtccaccgtgtgtcaccggcctgagggtctggagcagctgcaggagcaaaccaaattcacgcgcaaggagttgcaggtcctgtaccggggcttcaagaacgaatgtcccagcggaattgtcaatgaggagaacttcaagcagatttactcccagttctttcctcaaggagactccagcacctatgccacttttctcttcaatgcctttgacaccaaccatgatggctcggtcagttttgaggactttgtggctggtttgtccgtgattcttcggggaactgtagatgacaggcttaattgggccttcaacctgtatgaccttaacaaggacggctgcatcaccaaggaggaaatgcttgacatcatgaagtccatctatgacatgatgggcaagtacacgtaccctgcactccgggaggaggccccaagggaacacgtggagagcttcttccagaagatggacagaaacaaggatggtgtggtgaccattgaggaattcattgagtcttgtcaaaaggatgagaacatcatgaggtccatgcagctctttgacaatgtcatctagtaatgaactagtccgtaacttgaaagtatttcgatttcttggctttatatatcttgtggaaaggacgaggcgtgctaaccgaggtgtacgca

SEQ ID NO: 172 - DNA, 779 bp, Homo sapiens
  source 1..779: mol_type = genomic DNA
accgccaccatgaaccgatgcccccgcaggtgccggagcccgctggggcaggcagcgcgatccctctaccagctggtgactgggtcgctgtccccagacagcgtggacgatgaatttgaattgtccaccgtgtgtcaccggcctgagggtctggagcagctgcaggagcaaaccaaattcacgcgcaaggagttgcaggtcctgtaccggggcttcaagaacgaatgtcccagcggaattgtcaatgaggagaacttcaagcagatttactcccagttctttcctcaaggagactccagcacctatgccacttttctcttcaatgcctttgacaccaaccatgatggctcggtcagttttgaggactttgtggctggtttgtccgtgattcttcggggaactgtagatgacaggcttaattgggccttcaacctgtatgaccttaacaaggacggctgcatcaccaaggaggaaatgcttgacatcatgaagtccatctatgacatgatgggcaagtacacgtaccctgcactccgggaggaggccccaagggaacacgtggagagcttcttccagaagatggacagaaacaaggatggtgtggtgaccattgaggaattcattgagtcttgtcaaaaggatgagaacatcatgaggtccatgcagctctttgacaatgtcatctagtaatgaactagtccgtaacttgaaagtatttcgatttcttggctttatatatcttgtggaaaggacgataaattatgggtcgattcgacaag

SEQ ID NO: 173 - DNA, 785 bp, Homo sapiens
  source 1..785: mol_type = genomic DNA
accgccaccatgcggggccagggccgcaaggagagtttgtccgattcccgagacctggacggctcctacgaccagctcacggacagcgtggacgatgaatttgaattgtccaccgtgtgtcaccggcctgagggtctggagcagctgcaggagcaaaccaaattcacgcgcaaggagttgcaggtcctgtaccggggcttcaagaaccctggtgccctctccttccaggaatgtcccagcggaattgtcaatgaggagaacttcaagcagatttactcccagttctttcctcaaggagactccagcacctatgccacttttctcttcaatgcctttgacaccaaccatgatggctcggtcagttttgaggactttgtggctggtttgtccgtgattcttcggggaactgtagatgacaggcttaattgggccttcaacctgtatgaccttaacaaggacggctgcatcaccaaggaggaaatgcttgacatcatgaagtccatctatgacatgatgggcaagtacacgtaccctgcactccgggaggaggccccaagggaacacgtggagagcttcttccagaagatggacagaaacaaggatggtgtggtgaccattgaggaattcattgagtcttgtcaaaaggatgagaacatcatgaggtccatgcagctctttgacaatgtcatctagtaatgaactagtccgtaacttgaaagtatttcgatttcttggctttatatatcttgtggaaaggacgaatgagtagaccatagctcatcaaa

SEQ ID NO: 174 - DNA, 764 bp, Homo sapiens
  source 1..764: mol_type = genomic DNA
accgccaccatgcggggccagggccgcaaggagagtttgtccgattcccgagacctggacggctcctacgaccagctcacggacagcgtggacgatgaatttgaattgtccaccgtgtgtcaccggcctgagggtctggagcagctgcaggagcaaaccaaattcacgcgcaaggagttgcaggtcctgtaccggggcttcaagaacgaatgtcccagcggaattgtcaatgaggagaacttcaagcagatttactcccagttctttcctcaaggagactccagcacctatgccacttttctcttcaatgcctttgacaccaaccatgatggctcggtcagttttgaggactttgtggctggtttgtccgtgattcttcggggaactgtagatgacaggcttaattgggccttcaacctgtatgaccttaacaaggacggctgcatcaccaaggaggaaatgcttgacatcatgaagtccatctatgacatgatgggcaagtacacgtaccctgcactccgggaggaggccccaagggaacacgtggagagcttcttccagaagatggacagaaacaaggatggtgtggtgaccattgaggaattcattgagtcttgtcaaaaggatgagaacatcatgaggtccatgcagctctttgacaatgtcatctagtaatgaactagtccgtaacttgaaagtatttcgatttcttggctttatatatcttgtggaaaggacgaaagaactgagggcgatatacgagc

SEQ ID NO: 175 - DNA, 914 bp, Homo sapiens
  source 1..914: mol_type = genomic DNA
accgccaccatgcggggccagggccgcaaggagagtttgtccgattcccgagacctggacggctcctacgaccagctcacgggccaccctccagggcccactaaaaaagcgctgaagcagcgattcctcaagctgctgccgtgctgcgggccccaagccctgccctcagtcagtgaaacattagccgccccagcctccctccgcccccacagaccccgcctgctggacccagacagcgtggacgatgaatttgaattgtccaccgtgtgtcaccggcctgagggtctggagcagctgcaggagcaaaccaaattcacgcgcaaggagttgcaggtcctgtaccggggcttcaagaacgaatgtcccagcggaattgtcaatgaggagaacttcaagcagatttactcccagttctttcctcaaggagactccagcacctatgccacttttctcttcaatgcctttgacaccaaccatgatggctcggtcagttttgaggactttgtggctggtttgtccgtgattcttcggggaactgtagatgacaggcttaattgggccttcaacctgtatgaccttaacaaggacggctgcatcaccaaggaggaaatgcttgacatcatgaagtccatctatgacatgatgggcaagtacacgtaccctgcactccgggaggaggccccaagggaacacgtggagagcttcttccagaagatggacagaaacaaggatggtgtggtgaccattgaggaattcattgagtcttgtcaaaaggatgagaacatcatgaggtccatgcagctctttgacaatgtcatctagtaatgaactagtccgtaacttgaaagtatttcgatttcttggctttatatatcttgtggaaaggacgagccaatggccctacagccattcac

SEQ ID NO: 176 - DNA, 878 bp, Homo sapiens
  source 1..878: mol_type = genomic DNA
accgccaccatgaggtcattcaaccaggtttcatcagccccaggcggggctagcaaaggtggtggagaagagcccgggaagctgccggagccggcagaggaggaatcccaggttttgcgcggaactggccactgtaagtggttcaatgtgcgcatgggatttggattcatctccatgataaaccgagagggaagccccttggatattccagtcgatgtatttgtacaccaaagcaaactattcatggaaggatttagaagcctaaaagaaggagaaccagtggaattcacatttaaaaaatcttccaaaggccttgagtcaatacgggtaacaggacctggtgggagcccctgtttaggaagtgaaagaagacccaaagggaagacactacagaaaagaaaaccaaagggagatagatgctacaactgtggtggccttgatcatcatgctaaggaatgtagtctacctcctcagccaaagaagtgccattactgtcagagcatcatgcacatggtggcaaactgcccacataaaaatgttgcacagccacccgcgagttctcagggaagacaggaagcagaatcccagccatgcacttcaactctccctcgagaagtgggaggcgggcatggctgtacatcaccaccgtttcctcaggaggctagggcagagatctcagaacggtcaggcaggtcacctcaagaagcttcctccacgaagtcatctatagcaccagaagagcaaagcaaaaaggggccttcagttcaaaaaaggaaaaagacatagtaatgaactagtccgtaacttgaaagtatttcgatttcttggctttatatatcttgtggaaaggacgagcggaccgcattgcctcaacacga

SEQ ID NO: 177 - DNA, 731 bp, Homo sapiens
  source 1..731: mol_type = genomic DNA
accgccaccatgggctccgtgtccaaccagcagtttgcaggtggctgcgccaaggcggcagaagaggcgcccgaggaggcgccggaggacgcggcccgggcggcggacgagcctcagctgctgcacggtgcgggcatctgtaagtggttcaacgtgcgcatggggttcggcttcctgtccatgaccgcccgcgccggggtcgcgctcgaccccccagtggatgtctttgtgcaccagagtaagctgcacatggaagggttccggagcttgaaggagggtgaggcagtggagttcacctttaagaagtcagccaagggtctggaatccatccgtgtcaccggacctggtggagtattctgtattgggagtgagaggcggccaaaaggaaagagcatgcagaagcgcagatcaaaaggagacaggtgctacaactgtggaggtctagatcatcatgccaaggaatgcaagctgccaccccagcccaagaagtgccacttctgccagagcatcagccatatggtagcctcatgtccgctgaaggcccagcagggccctagtgcacagggaaagccaacctactttcgagaggaagaagaagaaatccacagccctaccctgctcccggaggcacagaattagtaatgaactagtccgtaacttgaaagtatttcgatttcttggctttatatatcttgtggaaaggacgagtcataattatgcttgttgcttct

SEQ ID NO: 178 - DNA, 2264 bp, Homo sapiens
  source 1..2264: mol_type = genomic DNA
accgccaccatggaggaggcggaggagctgctcttggaggggaagaaggcgctgcaactcgcccgcgagccgcgcctgggcctggacttaggatggaacccttccggagaaggctgtacgcagggcctcaaagacgtcccacccgagccgacccgagacatcctcgctttaaagagccttccccggggcttggcccttggcccctcactcgccaaggaacagcgcttgggggtctggtgtgtcggggaccccctgcagcccggcctgctgtgggggccgctggaagaggagtctgcctccaaggagaagggcgagggagtaaagccacggcaggaggagaacctgtcattaggcccatggggagacgtgtgtgcctgtgagcagagttctggctggactagcttggtacaacggggcaggctggagagtgagggaaatgtggccccagtgcggatcagcgagaggcttcatctgcaagtgtaccagctggtgctgccaggctctgaactgctgctgtggccccagccttcctctgagggcccaagtctcacccagcctgggctggacaaagaggcagctgtagcagtggtgacagaagtggagtctgctgtacagcaggaagtggcctcccctggggaggatgcagcagaaccttgcatagatcctggttcccagtcaccctctggcatccaggcagagaatatggtgagccctggacttaagttcccaacccaggaccgaatttccaaggatagccagccacttggcccattgcttcaggatggcgacgtggatgaggaatgcccggcccaggcacagatgccacctgaacttcagagcaattcggctacccagcaggacccagatggcagtggagccagtttctcatcttctgccaggggcacccagccgcatggctacctggccaagaagttacacagccccagtgatcagtgcccacccagagcaaagaccccagagcctggagcccagcagtctggcttccctacactctcgcggagccctcctggcccagcaggaagctccccaaagcaggggcgacggtaccggtgtggagagtgtggcaaggcattcctacagctgtgccacctaaagaagcacgcatttgtgcacacgggccacaagccctttctttgcactgagtgtggcaagagctatagctcagaggagagcttcaaagcccatatgctgggccaccgtggggtgcggcccttcccctgtccacaatgcgacaaggcctatggcacccagcgagacctcaaagagcaccaggtggtacattcaggtgcccggccctttgcttgtgaccagtgtggcaaggcctttgcccgccggccctccctgcggctgcatcgcaagacccaccaggtgccagctgcccctgccccttgcccatgccctgtgtgtgggcggcccctggccaaccagggctccctgcggaaccatatgaggctccatacaggagaaaagcctttcctgtgcccgcactgtggccgggcgtttcgtcagcggggcaacctgcgtgggcatttgcggctccacaccggggagcgtccttaccgctgcccacactgtgccgatgccttcccccagctgcctgaactgcggcgccatctcatctcacacaccggggaggcccacttgtgcccggtgtgtggcaaggccctccgagacccacacacgctccgagctcacgagcgcctgcactccggagagaggccctttccctgtccccagtgtggccgtgcttacacgctggccaccaagctgcggcgccacctcaaatctcacttggaggacaagccctaccgctgccccacctgtggcatgggctacaccctcccgcagagcctcaggcggcatcagctcagtcaccggcctgaggcaccctgcagcccaccctctgtgccttctgctgcttctgagcccactgtggtgctcctgcaggctgagccacaactgctggacacacacagagaggaggaagtctcccccgccagggatgttgttgaggtcaccatttcagaaagccaggagaagtgctttgtggtgccagaggagccagatgccgcccccagcctggtgctaatccataaggacatgggcctcggcgcctgggcagaggtggtggaggtggagatgggcacctagtaatgaactagtccgtaacttgaaagtatttcgatttcttggctttatatatcttgtggaaaggacgaccagtggcaggtggtaaattcctt

SEQ ID NO: 179 - DNA, 3428 bp, Homo sapiens
  source 1..3428: mol_type = genomic DNA
accgccaccatgaaagttacaaattataatactgtggtagaaacaaattcagattcagatgatgaagacaaactgcatattgtggaagaagaaagtgttacagatgcagctgactgtgaaggtgtaccagaggatgacctgccaacagaccagacagtgttaccagggaggagcagtgaaagagaagggaatgctaagaactgctgggaggatgacacaggaaaggaagggcaagaaatcctggggcctgaagctcaggcagatgaagcaggatgtacagtaaaagatgatgaatgcgagtcagatgcagaaaatgagcaaaaccatgatcctaatgttgaagagtttctacaacaacaagacactgctgtcatttttcctgaggcacctgaagaggaccagaggcagggcacaccagaagccagtggtcatgatgaaaatggaacaccagatgcattttcacaattactcacctgtccatattgtgatagaggctataaacgctttacctctctgaaagaacacattaaatatcgtcatgaaaagaatgaagataactttagttgctccctgtgcagttacacctttgcatacagaacccaacttgaacgtcacatgacatcacataaatcaggaagagatcaaagacatgtgacgcagtctgggtgtaatcgtaaattcaaatgcactgagtgtggaaaagctttcaaatacaaacatcacctaaaagagcacttaagaattcacagtggagagaagccatatgaatgcccaaactgcaagaaacgcttttcccattctggctcctatagctcacacataagcagtaagaaatgtatcagcttgatacctgtgaatgggcgaccaagaacaggactcaagacatctcagtgttcttcaccgtctctttcagcatcaccaggcagtcccacacgaccacagatacggcaaaagatagagaataaaccccttcaagaacaactttctgttaaccaaattaaaactgaacctgtggattatgaattcaaacccatagtggttgcttcaggaatcaactgttcaacccctttacaaaatggggttttcactggtggtggcccattacaggcaaccagttctcctcagggcatggtgcaagctgttgttctgccaacagttggtttggtgtctcccataagtatcaatttaagtgatattcagaatgtacttaaagtggcggtagatggtaatgtaataaggcaagtgttggagaataatcaagccaatcttgcatccaaagaacaagaaacaatcaatgcttcacccatacaacaaggtggccattctgttatttcagccatcagtcttcctttggttgatcaagatggaacaaccaaaattatcatcaactacagtcttgagcagcctagccaacttcaagttgttcctcaaaatttaaaaaaagaaaatccagtcgctacaaacagttgtaaaagtgaaaagttaccagaagatcttactgttaagtctgagaaggacaaaagctttgaagggggggtgaatgatagcacttgtcttctgtgtgatgattgtccaggagatattaatgcacttccagaattaaagcactatgacctaaagcagcctactcagcctcctccactccctgcagcagaagctgagaagcctgagtcctctgtttcatcagctactggagatggcaatttgtctcctagtcagccacctttaaagaacctcttgtctctcctaaaagcatattatgctttgaatgcacaaccaagtgcagaagagctctcaaaaattgctgattcagtaaacctaccactggatgtagtaaaaaagtggtttgaaaagatgcaagctggacagatttcagtgcagtcttctgaaccatcttctcctgaaccaggcaaagtaaatatccctgccaagaacaatgatcagcctcaatctgcaaatgcaaatgaaccccaggacagcacagtaaatctacaaagtcctttgaagatgactaactccccagttttaccagtgggatcaaccaccaatggttccagaagtagtacaccatccccatcacctctaaacctttcctcatccagaaatacacagggttacttgtacacagctgagggtgcacaagaagagccacaagtagaacctcttgatctttcactaccaaagcaacagggagaattattagaaaggtcaactatcactagtgtttaccagaacagtgtttattctgtccaggaagaacccttgaacttgtcttgcgcaaaaaaggagccacaaaaggacagttgtgttacagactcagaaccagttgtaaatgtaatcccaccaagtgccaaccccataaatatcgctatacctacagtcactgcccagttacccacaatcgtggccattgctgaccagaacagtgttccatgcttaagagcgctagctgccaataagcaaacgattctgattccccaggtggcatacacctactcaactacggtcagccctgcagtccaagaaccacccttgaaagtgatccagccaaatggaaatcaggatgaaagacaagatactagctcagaaggagtatcaaatgtagaggatcagaatgactctgattctacaccgcccaaaaagaaaatgcggaagacagaaaatggaatgtatgcttgtgatttgtgtgacaagatattccaaaagagtagttcattattgagacataaatatgaacacacaggtaaaagacctcatgagtgtggaatctgtaaaaaggcatttaaacacaaacatcatttgattgaacacatgcgattacattctggagaaaagccctatcaatgtgacaaatgtggaaagcgcttctcacactctgggtcttattctcaacacatgaatcatcgctactcctactgtaagagagaagcggaagaacgtgacagcacagagcaggaagaggcagggcctgaaatcctctcgaatgagcacgtgggtgccagggcgtctccctcacagggcgactcggacgagagagagagtttgacaagggaagaggatgaagacagtgaaaaagaggaagaggaggaggataaagagatggaagaattgcaggaagaaaaagaatgtgaaaaaccacaaggggatgaggaagaggaggaggaggaggaagaagtggaagaagaagaggtagaagaggcagagaatgagggagaagaagcaaaaactgaaggtctgatgaaggatgacagggctgaaagtcaagcaagcagcttaggacaaaaagtaggcgagagtagtgagcaagtgtctgaagaaaagacaaatgaagcctagtaatgaactagtccgtaacttgaaagtatttcgatttcttggctttatatatcttgtggaaaggacgacgtgtcgagcagcttcgaggcaac

SEQ ID NO: 180 - DNA, 3416 bp, Homo sapiens
  source 1..3416: mol_type = genomic DNA
accgccaccatggcggatggccccaggtgtaagcgcagaaagcaggcgaacccgcggcgcaataacgttacaaattataatactgtggtagaaacaaattcagattcagatgatgaagacaaactgcatattgtggaagaagaaagtgttacagatgcagctgactgtgaaggtgtaccagaggatgacctgccaacagaccagacagtgttaccagggaggagcagtgaaagagaagggaatgctaagaactgctgggaggatgacataaaagatgatgaatgcgagtcagatgcagaaaatgagcaaaaccatgatcctaatgttgaagagtttctacaacaacaagacactgctgtcatttttcctgaggcacctgaagaggaccagaggcagggcacaccagaagccagtggtcatgatgaaaatggaacaccagatgcattttcacaattactcacctgtccatattgtgatagaggctataaacgctttacctctctgaaagaacacattaaatatcgtcatgaaaagaatgaagataactttagttgctccctgtgcagttacacctttgcatacagaacccaacttgaacgtcacatgacatcacataaatcaggaagagatcaaagacatgtgacgcagtctgggtgtaatcgtaaattcaaatgcactgagtgtggaaaagctttcaaatacaaacatcacctaaaagagcacttaagaattcacagtggagagaagccatatgaatgcccaaactgcaagaaacgcttttcccattctggctcctatagctcacacataagcagtaagaaatgtatcagcttgatacctgtgaatgggcgaccaagaacaggactcaagacatctcagtgttcttcaccgtctctttcagcatcaccaggcagtcccacacgaccacagatacggcaaaagatagagaataaaccccttcaagaacaactttctgttaaccaaattaaaactgaacctgtggattatgaattcaaacccatagtggttgcttcaggaatcaactgttcaacccctttacaaaatggggttttcactggtggtggcccattacaggcaaccagttctcctcagggcatggtgcaagctgttgttctgccaacagttggtttggtgtctcccataagtatcaatttaagtgatattcagaatgtacttaaagtggcggtagatggtaatgtaataaggcaagtgttggagaataatcaagccaatcttgcatccaaagaacaagaaacaatcaatgcttcacccatacaacaaggtggccattctgttatttcagccatcagtcttcctttggttgatcaagatggaacaaccaaaattatcatcaactacagtcttgagcagcctagccaacttcaagttgttcctcaaaatttaaaaaaagaaaatccagtcgctacaaacagttgtaaaagtgaaaagttaccagaagatcttactgttaagtctgagaaggacaaaagctttgaagggggggtgaatgatagcacttgtcttctgtgtgatgattgtccaggagatattaatgcacttccagaattaaagcactatgacctaaagcagcctactcagcctcctccactccctgcagcagaagctgagaagcctgagtcctctgtttcatcagctactggagatggcaatttgtctcctagtcagccacctttaaagaacctcttgtctctcctaaaagcatattatgctttgaatgcacaaccaagtgcagaagagctctcaaaaattgctgattcagtaaacctaccactggatgtagtaaaaaagtggtttgaaaagatgcaagctggacagatttcagtgcagtcttctgaaccatcttctcctgaaccaggcaaagtaaatatccctgccaagaacaatgatcagcctcaatctgcaaatgcaaatgaaccccaggacagcacagtaaatctacaaagtcctttgaagatgactaactccccagttttaccagtgggatcaaccaccaatggttccagaagtagtacaccatccccatcacctctaaacctttcctcatccagaaatacacagggttacttgtacacagctgagggtgcacaagaagagccacaagtagaacctcttgatctttcactaccaaagcaacagggagaattattagaaaggtcaactatcactagtgtttaccagaacagtgtttattctgtccaggaagaacccttgaacttgtcttgcgcaaaaaaggagccacaaaaggacagttgtgttacagactcagaaccagttgtaaatgtaatcccaccaagtgccaaccccataaatatcgctatacctacagtcactgcccagttacccacaatcgtggccattgctgaccagaacagtgttccatgcttaagagcgctagctgccaataagcaaacgattctgattccccaggtggcatacacctactcaactacggtcagccctgcagtccaagaaccacccttgaaagtgatccagccaaatggaaatcaggatgaaagacaagatactagctcagaaggagtatcaaatgtagaggatcagaatgactctgattctacaccgcccaaaaagaaaatgcggaagacagaaaatggaatgtatgcttgtgatttgtgtgacaagatattccaaaagagtagttcattattgagacataaatatgaacacacaggtaaaagacctcatgagtgtggaatctgtaaaaaggcatttaaacacaaacatcatttgattgaacacatgcgattacattctggagaaaagccctatcaatgtgacaaatgtggaaagcgcttctcacactctgggtcttattctcaacacatgaatcatcgctactcctactgtaagagagaagcggaagaacgtgacagcacagagcaggaagaggcagggcctgaaatcctctcgaatgagcacgtgggtgccagggcgtctccctcacagggcgactcggacgagagagagagtttgacaagggaagaggatgaagacagtgaaaaagaggaagaggaggaggataaagagatggaagaattgcaggaagaaaaagaatgtgaaaaaccacaaggggatgaggaagaggaggaggaggaggaagaagtggaagaagaagaggtagaagaggcagagaatgagggagaagaagcaaaaactgaaggtctgatgaaggatgacagggctgaaagtcaagcaagcagcttaggacaaaaagtaggcgagagtagtgagcaagtgtctgaagaaaagacaaatgaagcctagtaatgaactagtccgtaacttgaaagtatttcgatttcttggctttatatatcttgtggaaaggacgactaactcctgttatggcgctaggc

SEQ ID NO: 181 - DNA, 3479 bp, Homo sapiens
  source 1..3479: mol_type = genomic DNA
accgccaccatggcggatggccccaggtgtaagcgcagaaagcaggcgaacccgcggcgcaataacgttacaaattataatactgtggtagaaacaaattcagattcagatgatgaagacaaactgcatattgtggaagaagaaagtgttacagatgcagctgactgtgaaggtgtaccagaggatgacctgccaacagaccagacagtgttaccagggaggagcagtgaaagagaagggaatgctaagaactgctgggaggatgacacaggaaaggaagggcaagaaatcctggggcctgaagctcaggcagatgaagcaggatgtacagtaaaagatgatgaatgcgagtcagatgcagaaaatgagcaaaaccatgatcctaatgttgaagagtttctacaacaacaagacactgctgtcatttttcctgaggcacctgaagaggaccagaggcagggcacaccagaagccagtggtcatgatgaaaatggaacaccagatgcattttcacaattactcacctgtccatattgtgatagaggctataaacgctttacctctctgaaagaacacattaaatatcgtcatgaaaagaatgaagataactttagttgctccctgtgcagttacacctttgcatacagaacccaacttgaacgtcacatgacatcacataaatcaggaagagatcaaagacatgtgacgcagtctgggtgtaatcgtaaattcaaatgcactgagtgtggaaaagctttcaaatacaaacatcacctaaaagagcacttaagaattcacagtggagagaagccatatgaatgcccaaactgcaagaaacgcttttcccattctggctcctatagctcacacataagcagtaagaaatgtatcagcttgatacctgtgaatgggcgaccaagaacaggactcaagacatctcagtgttcttcaccgtctctttcagcatcaccaggcagtcccacacgaccacagatacggcaaaagatagagaataaaccccttcaagaacaactttctgttaaccaaattaaaactgaacctgtggattatgaattcaaacccatagtggttgcttcaggaatcaactgttcaacccctttacaaaatggggttttcactggtggtggcccattacaggcaaccagttctcctcagggcatggtgcaagctgttgttctgccaacagttggtttggtgtctcccataagtatcaatttaagtgatattcagaatgtacttaaagtggcggtagatggtaatgtaataaggcaagtgttggagaataatcaagccaatcttgcatccaaagaacaagaaacaatcaatgcttcacccatacaacaaggtggccattctgttatttcagccatcagtcttcctttggttgatcaagatggaacaaccaaaattatcatcaactacagtcttgagcagcctagccaacttcaagttgttcctcaaaatttaaaaaaagaaaatccagtcgctacaaacagttgtaaaagtgaaaagttaccagaagatcttactgttaagtctgagaaggacaaaagctttgaagggggggtgaatgatagcacttgtcttctgtgtgatgattgtccaggagatattaatgcacttccagaattaaagcactatgacctaaagcagcctactcagcctcctccactccctgcagcagaagctgagaagcctgagtcctctgtttcatcagctactggagatggcaatttgtctcctagtcagccacctttaaagaacctcttgtctctcctaaaagcatattatgctttgaatgcacaaccaagtgcagaagagctctcaaaaattgctgattcagtaaacctaccactggatgtagtaaaaaagtggtttgaaaagatgcaagctggacagatttcagtgcagtcttctgaaccatcttctcctgaaccaggcaaagtaaatatccctgccaagaacaatgatcagcctcaatctgcaaatgcaaatgaaccccaggacagcacagtaaatctacaaagtcctttgaagatgactaactccccagttttaccagtgggatcaaccaccaatggttccagaagtagtacaccatccccatcacctctaaacctttcctcatccagaaatacacagggttacttgtacacagctgagggtgcacaagaagagccacaagtagaacctcttgatctttcactaccaaagcaacagggagaattattagaaaggtcaactatcactagtgtttaccagaacagtgtttattctgtccaggaagaacccttgaacttgtcttgcgcaaaaaaggagccacaaaaggacagttgtgttacagactcagaaccagttgtaaatgtaatcccaccaagtgccaaccccataaatatcgctatacctacagtcactgcccagttacccacaatcgtggccattgctgaccagaacagtgttccatgcttaagagcgctagctgccaataagcaaacgattctgattccccaggtggcatacacctactcaactacggtcagccctgcagtccaagaaccacccttgaaagtgatccagccaaatggaaatcaggatgaaagacaagatactagctcagaaggagtatcaaatgtagaggatcagaatgactctgattctacaccgcccaaaaagaaaatgcggaagacagaaaatggaatgtatgcttgtgatttgtgtgacaagatattccaaaagagtagttcattattgagacataaatatgaacacacaggtaaaagacctcatgagtgtggaatctgtaaaaaggcatttaaacacaaacatcatttgattgaacacatgcgattacattctggagaaaagccctatcaatgtgacaaatgtggaaagcgcttctcacactctgggtcttattctcaacacatgaatcatcgctactcctactgtaagagagaagcggaagaacgtgacagcacagagcaggaagaggcagggcctgaaatcctctcgaatgagcacgtgggtgccagggcgtctccctcacagggcgactcggacgagagagagagtttgacaagggaagaggatgaagacagtgaaaaagaggaagaggaggaggataaagagatggaagaattgcaggaagaaaaagaatgtgaaaaaccacaaggggatgaggaagaggaggaggaggaggaagaagtggaagaagaagaggtagaagaggcagagaatgagggagaagaagcaaaaactgaaggtctgatgaaggatgacagggctgaaagtcaagcaagcagcttaggacaaaaagtaggcgagagtagtgagcaagtgtctgaagaaaagacaaatgaagcctagtaatgaactagtccgtaacttgaaagtatttcgatttcttggctttatatatcttgtggaaaggacgaagagagttggccctcgagtaagag

SEQ ID NO: 182 - DNA, 3275 bp, Homo sapiens
  source 1..3275: mol_type = genomic DNA
accgccaccatggcggatggccccaggtgtaagcgcagaaagcaggcgaacccgcggcgcaataacggaaaggaagggcaagaaatcctggggcctgaagctcaggcagatgaagcaggatgtacagtaaaagatgatgaatgcgagtcagatgcagaaaatgagcaaaaccatgatcctaatgttgaagagtttctacaacaacaagacactgctgtcatttttcctgaggcacctgaagaggaccagaggcagggcacaccagaagccagtggtcatgatgaaaatggaacaccagatgcattttcacaattactcacctgtccatattgtgatagaggctataaacgctttacctctctgaaagaacacattaaatatcgtcatgaaaagaatgaagataactttagttgctccctgtgcagttacacctttgcatacagaacccaacttgaacgtcacatgacatcacataaatcaggaagagatcaaagacatgtgacgcagtctgggtgtaatcgtaaattcaaatgcactgagtgtggaaaagctttcaaatacaaacatcacctaaaagagcacttaagaattcacagtggagagaagccatatgaatgcccaaactgcaagaaacgcttttcccattctggctcctatagctcacacataagcagtaagaaatgtatcagcttgatacctgtgaatgggcgaccaagaacaggactcaagacatctcagtgttcttcaccgtctctttcagcatcaccaggcagtcccacacgaccacagatacggcaaaagatagagaataaaccccttcaagaacaactttctgttaaccaaattaaaactgaacctgtggattatgaattcaaacccatagtggttgcttcaggaatcaactgttcaacccctttacaaaatggggttttcactggtggtggcccattacaggcaaccagttctcctcagggcatggtgcaagctgttgttctgccaacagttggtttggtgtctcccataagtatcaatttaagtgatattcagaatgtacttaaagtggcggtagatggtaatgtaataaggcaagtgttggagaataatcaagccaatcttgcatccaaagaacaagaaacaatcaatgcttcacccatacaacaaggtggccattctgttatttcagccatcagtcttcctttggttgatcaagatggaacaaccaaaattatcatcaactacagtcttgagcagcctagccaacttcaagttgttcctcaaaatttaaaaaaagaaaatccagtcgctacaaacagttgtaaaagtgaaaagttaccagaagatcttactgttaagtctgagaaggacaaaagctttgaagggggggtgaatgatagcacttgtcttctgtgtgatgattgtccaggagatattaatgcacttccagaattaaagcactatgacctaaagcagcctactcagcctcctccactccctgcagcagaagctgagaagcctgagtcctctgtttcatcagctactggagatggcaatttgtctcctagtcagccacctttaaagaacctcttgtctctcctaaaagcatattatgctttgaatgcacaaccaagtgcagaagagctctcaaaaattgctgattcagtaaacctaccactggatgtagtaaaaaagtggtttgaaaagatgcaagctggacagatttcagtgcagtcttctgaaccatcttctcctgaaccaggcaaagtaaatatccctgccaagaacaatgatcagcctcaatctgcaaatgcaaatgaaccccaggacagcacagtaaatctacaaagtcctttgaagatgactaactccccagttttaccagtgggatcaaccaccaatggttccagaagtagtacaccatccccatcacctctaaacctttcctcatccagaaatacacagggttacttgtacacagctgagggtgcacaagaagagccacaagtagaacctcttgatctttcactaccaaagcaacagggagaattattagaaaggtcaactatcactagtgtttaccagaacagtgtttattctgtccaggaagaacccttgaacttgtcttgcgcaaaaaaggagccacaaaaggacagttgtgttacagactcagaaccagttgtaaatgtaatcccaccaagtgccaaccccataaatatcgctatacctacagtcactgcccagttacccacaatcgtggccattgctgaccagaacagtgttccatgcttaagagcgctagctgccaataagcaaacgattctgattccccaggtggcatacacctactcaactacggtcagccctgcagtccaagaaccacccttgaaagtgatccagccaaatggaaatcaggatgaaagacaagatactagctcagaaggagtatcaaatgtagaggatcagaatgactctgattctacaccgcccaaaaagaaaatgcggaagacagaaaatggaatgtatgcttgtgatttgtgtgacaagatattccaaaagagtagttcattattgagacataaatatgaacacacaggtaaaagacctcatgagtgtggaatctgtaaaaaggcatttaaacacaaacatcatttgattgaacacatgcgattacattctggagaaaagccctatcaatgtgacaaatgtggaaagcgcttctcacactctgggtcttattctcaacacatgaatcatcgctactcctactgtaagagagaagcggaagaacgtgacagcacagagcaggaagaggcagggcctgaaatcctctcgaatgagcacgtgggtgccagggcgtctccctcacagggcgactcggacgagagagagagtttgacaagggaagaggatgaagacagtgaaaaagaggaagaggaggaggataaagagatggaagaattgcaggaagaaaaagaatgtgaaaaaccacaaggggatgaggaagaggaggaggaggaggaagaagtggaagaagaagaggtagaagaggcagagaatgagggagaagaagcaaaaactgaaggtctgatgaaggatgacagggctgaaagtcaagcaagcagcttaggacaaaaagtaggcgagagtagtgagcaagtgtctgaagaaaagacaaatgaagcctagtaatgaactagtccgtaacttgaaagtatttcgatttcttggctttatatatcttgtggaaaggacgactacctgtaagtgaggccacgtgc

SEQ ID NO: 183 - DNA, 3476 bp, Homo sapiens
  source 1..3476: mol_type = genomic DNA
accgccaccatggcggatggccccaggtgtaagcgcagaaagcaggcgaacccgcggcgcaataacgttacaaattataatactgtggtagaaacaaattcagattcagatgatgaagacaaactgcatattgtggaagaagaaagtgttacagatgcagctgactgtgaaggtgtaccagaggatgacctgccaacagaccagacagtgttaccagggaggagcagtgaaagagaagggaatgctaagaactgctgggaggatgacagaaaggaagggcaagaaatcctggggcctgaagctcaggcagatgaagcaggatgtacagtaaaagatgatgaatgcgagtcagatgcagaaaatgagcaaaaccatgatcctaatgttgaagagtttctacaacaacaagacactgctgtcatttttcctgaggcacctgaagaggaccagaggcagggcacaccagaagccagtggtcatgatgaaaatggaacaccagatgcattttcacaattactcacctgtccatattgtgatagaggctataaacgctttacctctctgaaagaacacattaaatatcgtcatgaaaagaatgaagataactttagttgctccctgtgcagttacacctttgcatacagaacccaacttgaacgtcacatgacatcacataaatcaggaagagatcaaagacatgtgacgcagtctgggtgtaatcgtaaattcaaatgcactgagtgtggaaaagctttcaaatacaaacatcacctaaaagagcacttaagaattcacagtggagagaagccatatgaatgcccaaactgcaagaaacgcttttcccattctggctcctatagctcacacataagcagtaagaaatgtatcagcttgatacctgtgaatgggcgaccaagaacaggactcaagacatctcagtgttcttcaccgtctctttcagcatcaccaggcagtcccacacgaccacagatacggcaaaagatagagaataaaccccttcaagaacaactttctgttaaccaaattaaaactgaacctgtggattatgaattcaaacccatagtggttgcttcaggaatcaactgttcaacccctttacaaaatggggttttcactggtggtggcccattacaggcaaccagttctcctcagggcatggtgcaagctgttgttctgccaacagttggtttggtgtctcccataagtatcaatttaagtgatattcagaatgtacttaaagtggcggtagatggtaatgtaataaggcaagtgttggagaataatcaagccaatcttgcatccaaagaacaagaaacaatcaatgcttcacccatacaacaaggtggccattctgttatttcagccatcagtcttcctttggttgatcaagatggaacaaccaaaattatcatcaactacagtcttgagcagcctagccaacttcaagttgttcctcaaaatttaaaaaaagaaaatccagtcgctacaaacagttgtaaaagtgaaaagttaccagaagatcttactgttaagtctgagaaggacaaaagctttgaagggggggtgaatgatagcacttgtcttctgtgtgatgattgtccaggagatattaatgcacttccagaattaaagcactatgacctaaagcagcctactcagcctcctccactccctgcagcagaagctgagaagcctgagtcctctgtttcatcagctactggagatggcaatttgtctcctagtcagccacctttaaagaacctcttgtctctcctaaaagcatattatgctttgaatgcacaaccaagtgcagaagagctctcaaaaattgctgattcagtaaacctaccactggatgtagtaaaaaagtggtttgaaaagatgcaagctggacagatttcagtgcagtcttctgaaccatcttctcctgaaccaggcaaagtaaatatccctgccaagaacaatgatcagcctcaatctgcaaatgcaaatgaaccccaggacagcacagtaaatctacaaagtcctttgaagatgactaactccccagttttaccagtgggatcaaccaccaatggttccagaagtagtacaccatccccatcacctctaaacctttcctcatccagaaatacacagggttacttgtacacagctgagggtgcacaagaagagccacaagtagaacctcttgatctttcactaccaaagcaacagggagaattattagaaaggtcaactatcactagtgtttaccagaacagtgtttattctgtccaggaagaacccttgaacttgtcttgcgcaaaaaaggagccacaaaaggacagttgtgttacagactcagaaccagttgtaaatgtaatcccaccaagtgccaaccccataaatatcgctatacctacagtcactgcccagttacccacaatcgtggccattgctgaccagaacagtgttccatgcttaagagcgctagctgccaataagcaaacgattctgattccccaggtggcatacacctactcaactacggtcagccctgcagtccaagaaccacccttgaaagtgatccagccaaatggaaatcaggatgaaagacaagatactagctcagaaggagtatcaaatgtagaggatcagaatgactctgattctacaccgcccaaaaagaaaatgcggaagacagaaaatggaatgtatgcttgtgatttgtgtgacaagatattccaaaagagtagttcattattgagacataaatatgaacacacaggtaaaagacctcatgagtgtggaatctgtaaaaaggcatttaaacacaaacatcatttgattgaacacatgcgattacattctggagaaaagccctatcaatgtgacaaatgtggaaagcgcttctcacactctgggtcttattctcaacacatgaatcatcgctactcctactgtaagagagaagcggaagaacgtgacagcacagagcaggaagaggcagggcctgaaatcctctcgaatgagcacgtgggtgccagggcgtctccctcacagggcgactcggacgagagagagagtttgacaagggaagaggatgaagacagtgaaaaagaggaagaggaggaggataaagagatggaagaattgcaggaagaaaaagaatgtgaaaaaccacaaggggatgaggaagaggaggaggaggaggaagaagtggaagaagaagaggtagaagaggcagagaatgagggagaagaagcaaaaactgaaggtctgatgaaggatgacagggctgaaagtcaagcaagcagcttaggacaaaaagtaggcgagagtagtgagcaagtgtctgaagaaaagacaaatgaagcctagtaatgaactagtccgtaacttgaaagtatttcgatttcttggctttatatatcttgtggaaaggacgacggcgatcgaagtgagggctgcta

SEQ ID NO: 184 - DNA, 3410 bp, Homo sapiens
  source 1..3410: mol_type = genomic DNA
accgccaccatgaaggaagactatgacactatggggccagaagccacgatccagaccgcaattaacaatggtacagtgaagaatgcaaattgcacatcagattttgaggaatactttgccaaaagaaaactggaggaacgcgatggtcatgcagtcagcatcgaggagtaccttcagcgcagtgacacagccattatttacccagaagcccctgaggagctgtctcgccttggcacgccagaggccaatgggcaagaagaaaatgacctgccacctggaactccagatgcttttgcccaactgctgacctgcccctactgcgaccggggctacaagcgcttgacatcactgaaggagcacatcaagtaccgccacgagaagaatgaagagaacttttcctgccctctctgtagctacacgtttgcctaccgcacccagctcgagcggcatatggtgacacacaagccagggacagatcagcaccaaatgctaacccaaggagcaggtaatcgcaagttcaaatgcacagagtgtggcaaggccttcaaatataaacaccatctgaaagaacacctgcgaattcacagtggtgaaaaaccttacgagtgcccaaactgcaagaaacgtttctcccattctggttcctacagttcgcacatcagcagcaagaaatgtattggtttaatctctgtaaatggccgaatgagaaacaatatcaagacgggttcttcccctaattctgtttcttcttctcctactaattcagccattacccagttaagaaacaagttggagaatggaaaaccacttagtatgtctgaacagacaggcttacttaaaattaaaacagaaccactagacttcaatgactataaagttcttatggctacacacgggtttagtggcactagtccctttatgaatggtgggcttggagccaccagccctttaggagttcatccatctgctcagagtccaatgcagcacttaggtgtagggatggaagcccctttacttgggtttcccaccatgaatagtaatttaagtgaggtacaaaaggttctacagattgtggacaatactgtttccaggcaaaaaatggactgcaaggctgaagaaatttcaaagttgaaaggttatcacatgaaggatccatgctctcaacctgaggaacaaggagttacttctcctaatattccgcctgtcggtcttccggtagtgagtcataatggtgccactaaaagtattattgactatacgttggaaaaagtcaatgaagccaaagcttgcctccagagcttgactactgactcaaggagacagatcagtaatataaagaaagagaagctacgtactttaatagatttggtcactgatgacaaaatgattgagaaccacaacatatccactccattttcatgccagttctgtaaagaaagttttcctggccccatccctttgcatcagcatgaacgttacctttgtaagatgaatgaagagatcaaggcggtcctgcagcctcatgaaaacatagtccccaacaaagccggagtttttgttgataataaagccctcctcttgtcatctgtactttctgagaaaggaatgacaagccccatcaacccatacaaggaccacatgtctgtactcaaagcatactatgctatgaacatggagcccaactccgatgaactgctgaaaatttccattgctgtgggccttcctcaggaatttgtgaaggaatggtttgaacaacgaaaagtctaccagtactcaaattccaggtccccatccctggaaagaagctccaagccgttagctcccaacagtaaccctcccacaaaagactctttattacccaggtctcctgtaaaacctatggactccataacatcaccatctatagcagaactccacaacagtgttacgaattgtgatcctcctctcaggctaacaaaaccttcccattttaccaatattaaaccagttgaaaaattggaccactccaggagtaatactccttctcccttaaatctttcctccacatcttctaaaaactcccacagtagttcatacactccaaacagcttctcttctgaggagctccaggctgagcctttagacttgtcattaccaaaacaaatgaaagaacccaaaagtattatagccacaaagaacaaaacaaaagctagtagcatcagtttagatcataacagtgtttcttcctcatctgaaaactcagatgagcctctgaacttgacttttatcaagaaggaattttcaaattcaaataatctggacaacaaaagcactaacccagtgttcagcatgaacccatttagtgccaaacctttatacacagctcttccacctcaaagcgcatttccccctgctactttcatgccaccagtccagaccagtattcctgggctacgaccatacccaggactggatcagatgagcttcctaccacatatggcctacacctacccaactggagcagctacttttgctgatatgcagcaaaggagaaagtaccagcggaaacaaggatttcagggagaattgcttgatggagcacaagactacatgtcaggcctagatgatatgacagactccgactcctgtctgtctcgcaaaaagatcaagaagacagagagtggcatgtatgcatgtgacttatgtgacaagacattccagaaaagcagttcccttctgcgacataaatacgaacacacaggaaaaagaccacatcagtgtcagatttgtaagaaagcgtttaaacacaagcaccaccttatcgagcactcaaggcttcactcgggcgagaagccctatcagtgtgataaatgtggcaagcgcttctcacactcgggctcgtactcgcagcacatgaatcacaggtattcctactgcaagcgggaggcggaggagcgggaagcggcggagcgcgaggcgcgcgagaaagggcacttggaacccaccgagctgctgatgaaccgggcttacttgcagagcattacccctcaggggtactctgactcggaggagagggagagtatgccgagggatggcgagagcgagaaggagcacgagaaagaaggcgaggatggctacgggaagctgggcagacaggatggcgacgaggagttcgaggaggaagaggaagaaagtgaaaataaaagtatggatacggatcccgaaacgatacgagatgaagaagagactggagatcactccatggacgatagttcggaggatgggaaaatggaaaccaaatcagaccacgaggaagacaatatggaagatggcatgtagtaatgaactagtccgtaacttgaaagtatttcgatttcttggctttatatatcttgtggaaaggacgagtagggtttcaaagttactacttt

SEQ ID NO: 185 - DNA, 3674 bp, Homo sapiens
  source 1..3674: mol_type = genomic DNA
accgccaccatgaagcagccgatcatggcggatggcccccggtgcaagaggcgcaaacaagccaatcccaggaggaaaaacgtggtgaactatgacaatgtagtggacacaggttctgaaacagatgaggaagacaagcttcatattgctgaggatgacggtattgccaaccctctggaccaggagacgagtccagctagtgtgcccaaccatgagtcctccccacacgtgagccaagctctgttgccaagagaggaagaggaagatgaaataagggagggtggagtggaacacccctggcacaacaacgagattctacaagcctctgtagatggtccagtgaagaatgcaaattgcacatcagattttgaggaatactttgccaaaagaaaactggaggaacgcgatggtcatgcagtcagcatcgaggagtaccttcagcgcagtgacacagccattatttacccagaagcccctgaggagctgtctcgccttggcacgccagaggccaatgggcaagaagaaaatgacctgccacctggaactccagatgcttttgcccaactgctgacctgcccctactgcgaccggggctacaagcgcttgacatcactgaaggagcacatcaagtaccgccacgagaagaatgaagagaacttttcctgccctctctgtagctacacgtttgcctaccgcacccagctcgagcggcatatggtgacacacaagccagggacagatcagcaccaaatgctaacccaaggagcaggtaatcgcaagttcaaatgcacagagtgtggcaaggccttcaaatataaacaccatctgaaagaacacctgcgaattcacagtggtgaaaaaccttacgagtgcccaaactgcaagaaacgtttctcccattctggttcctacagttcgcacatcagcagcaagaaatgtattggtttaatctctgtaaatggccgaatgagaaacaatatcaagacgggttcttcccctaattctgtttcttcttctcctactaattcagccattacccagttaagaaacaagttggagaatggaaaaccacttagtatgtctgaacagacaggcttacttaaaattaaaacagaaccactagacttcaatgactataaagttcttatggctacacacgggtttagtggcactagtccctttatgaatggtgggcttggagccaccagccctttaggagttcatccatctgctcagagtccaatgcagcacttaggtgtagggatggaagcccctttacttgggtttcccaccatgaatagtaatttaagtgaggtacaaaaggttctacagattgtggacaatactgtttccaggcaaaaaatggactgcaaggctgaagaaatttcaaagttgaaaggttatcacatgaaggatccatgctctcaacctgaggaacaaggagttacttctcctaatattccgcctgtcggtcttccggtagtgagtcataatggtgccactaaaagtattattgactatacgttggaaaaagtcaatgaagccaaagcttgcctccagagcttgactactgactcaaggagacagatcagtaatataaagaaagagaagctacgtactttaatagatttggtcactgatgacaaaatgattgagaaccacaacatatccactccattttcatgccagttctgtaaagaaagttttcctggccccatccctttgcatcagcatgaacgttacctttgtaagatgaatgaagagatcaaggcggtcctgcagcctcatgaaaacatagtccccaacaaagccggagtttttgttgataataaagccctcctcttgtcatctgtactttctgagaaaggaatgacaagccccatcaacccatacaaggaccacatgtctgtactcaaagcatactatgctatgaacatggagcccaactccgatgaactgctgaaaatttccattgctgtgggccttcctcaggaatttgtgaaggaatggtttgaacaacgaaaagtctaccagtactcaaattccaggtccccatccctggaaagaagctccaagccgttagctcccaacagtaaccctcccacaaaagactctttattacccaggtctcctgtaaaacctatggactccataacatcaccatctatagcagaactccacaacagtgttacgaattgtgatcctcctctcaggctaacaaaaccttcccattttaccaatattaaaccagttgaaaaattggaccactccaggagtaatactccttctcccttaaatctttcctccacatcttctaaaaactcccacagtagttcatacactccaaacagcttctcttctgaggagctccaggctgagcctttagacttgtcattaccaaaacaaatgaaagaacccaaaagtattatagccacaaagaacaaaacaaaagctagtagcatcagtttagatcataacagtgtttcttcctcatctgaaaactcagatgagcctctgaacttgacttttatcaagaaggaattttcaaattcaaataatctggacaacaaaagcactaacccagtgttcagcatgaacccatttagtgccaaacctttatacacagctcttccacctcaaagcgcatttccccctgctactttcatgccaccagtccagaccagtattcctgggctacgaccatacccaggactggatcagatgagcttcctaccacatatggcctacacctacccaactggagcagctacttttgctgatatgcagcaaaggagaaagtaccagcggaaacaaggatttcagggagaattgcttgatggagcacaagactacatgtcaggcctagatgatatgacagactccgactcctgtctgtctcgcaaaaagatcaagaagacagagagtggcatgtatgcatgtgacttatgtgacaagacattccagaaaagcagttcccttctgcgacataaatacgaacacacaggaaaaagaccacatcagtgtcagatttgtaagaaagcgtttaaacacaagcaccaccttatcgagcactcaaggcttcactcgggcgagaagccctatcagtgtgataaatgtggcaagcgcttctcacactcgggctcgtactcgcagcacatgaatcacaggtattcctactgcaagcgggaggcggaggagcgggaagcggcggagcgcgaggcgcgcgagaaagggcacttggaacccaccgagctgctgatgaaccgggcttacttgcagagcattacccctcaggggtactctgactcggaggagagggagagtatgccgagggatggcgagagcgagaaggagcacgagaaagaaggcgaggatggctacgggaagctgggcagacaggatggcgacgaggagttcgaggaggaagaggaagaaagtgaaaataaaagtatggatacggatcccgaaacgatacgagatgaagaagagactggagatcactccatggacgatagttcggaggatgggaaaatggaaaccaaatcagaccacgaggaagacaatatggaagatggcatgtagtaatgaactagtccgtaacttgaaagtatttcgatttcttggctttatatatcttgtggaaaggacgatgttcattcgcactaacctacatt

SEQ ID NO: 186 - DNA, 3746 bp, Homo sapiens
  source 1..3746: mol_type = genomic DNA
accgccaccatgaagcagccgatcatggcggatggcccccggtgcaagaggcgcaaacaagccaatcccaggaggaaaaacgtggtgaactatgacaatgtagtggacacaggttctgaaacagatgaggaagacaagcttcatattgctgaggatgacggtattgccaaccctctggaccaggagacgagtccagctagtgtgcccaaccatgagtcctccccacacgtgagccaagctctgttgccaagagaggaagaggaagatgaaataagggagggtggagtggaacacccctggcacaacaacgagattctacaagcctctgtagatggtccagaagaaatgaaggaagactatgacactatggggccagaagccacgatccagaccgcaattaacaatggtacagtgaagaatgcaaattgcacatcagattttgaggaatactttgccaaaagaaaactggaggaacgcgatggtcatgcagtcagcatcgaggagtaccttcagcgcagtgacacagccattatttacccagaagcccctgaggagctgtctcgccttggcacgccagaggccaatgggcaagaagaaaatgacctgccacctggaactccagatgcttttgcccaactgctgacctgcccctactgcgaccggggctacaagcgcttgacatcactgaaggagcacatcaagtaccgccacgagaagaatgaagagaacttttcctgccctctctgtagctacacgtttgcctaccgcacccagctcgagcggcatatggtgacacacaagccagggacagatcagcaccaaatgctaacccaaggagcaggtaatcgcaagttcaaatgcacagagtgtggcaaggccttcaaatataaacaccatctgaaagaacacctgcgaattcacagtggtgaaaaaccttacgagtgcccaaactgcaagaaacgtttctcccattctggttcctacagttcgcacatcagcagcaagaaatgtattggtttaatctctgtaaatggccgaatgagaaacaatatcaagacgggttcttcccctaattctgtttcttcttctcctactaattcagccattacccagttaagaaacaagttggagaatggaaaaccacttagtatgtctgaacagacaggcttacttaaaattaaaacagaaccactagacttcaatgactataaagttcttatggctacacacgggtttagtggcactagtccctttatgaatggtgggcttggagccaccagccctttaggagttcatccatctgctcagagtccaatgcagcacttaggtgtagggatggaagcccctttacttgggtttcccaccatgaatagtaatttaagtgaggtacaaaaggttctacagattgtggacaatactgtttccaggcaaaaaatggactgcaaggctgaagaaatttcaaagttgaaaggttatcacatgaaggatccatgctctcaacctgaggaacaaggagttacttctcctaatattccgcctgtcggtcttccggtagtgagtcataatggtgccactaaaagtattattgactatacgttggaaaaagtcaatgaagccaaagcttgcctccagagcttgactactgactcaaggagacagatcagtaatataaagaaagagaagctacgtactttaatagatttggtcactgatgacaaaatgattgagaaccacaacatatccactccattttcatgccagttctgtaaagaaagttttcctggccccatccctttgcatcagcatgaacgttacctttgtaagatgaatgaagagatcaaggcggtcctgcagcctcatgaaaacatagtccccaacaaagccggagtttttgttgataataaagccctcctcttgtcatctgtactttctgagaaaggaatgacaagccccatcaacccatacaaggaccacatgtctgtactcaaagcatactatgctatgaacatggagcccaactccgatgaactgctgaaaatttccattgctgtgggccttcctcaggaatttgtgaaggaatggtttgaacaacgaaaagtctaccagtactcaaattccaggtccccatccctggaaagaagctccaagccgttagctcccaacagtaaccctcccacaaaagactctttattacccaggtctcctgtaaaacctatggactccataacatcaccatctatagcagaactccacaacagtgttacgaattgtgatcctcctctcaggctaacaaaaccttcccattttaccaatattaaaccagttgaaaaattggaccactccaggagtaatactccttctcccttaaatctttcctccacatcttctaaaaactcccacagtagttcatacactccaaacagcttctcttctgaggagctccaggctgagcctttagacttgtcattaccaaaacaaatgaaagaacccaaaagtattatagccacaaagaacaaaacaaaagctagtagcatcagtttagatcataacagtgtttcttcctcatctgaaaactcagatgagcctctgaacttgacttttatcaagaaggaattttcaaattcaaataatctggacaacaaaagcactaacccagtgttcagcatgaacccatttagtgccaaacctttatacacagctcttccacctcaaagcgcatttccccctgctactttcatgccaccagtccagaccagtattcctgggctacgaccatacccaggactggatcagatgagcttcctaccacatatggcctacacctacccaactggagcagctacttttgctgatatgcagcaaaggagaaagtaccagcggaaacaaggatttcagggagaattgcttgatggagcacaagactacatgtcaggcctagatgatatgacagactccgactcctgtctgtctcgcaaaaagatcaagaagacagagagtggcatgtatgcatgtgacttatgtgacaagacattccagaaaagcagttcccttctgcgacataaatacgaacacacaggaaaaagaccacatcagtgtcagatttgtaagaaagcgtttaaacacaagcaccaccttatcgagcactcaaggcttcactcgggcgagaagccctatcagtgtgataaatgtggcaagcgcttctcacactcgggctcgtactcgcagcacatgaatcacaggtattcctactgcaagcgggaggcggaggagcgggaagcggcggagcgcgaggcgcgcgagaaagggcacttggaacccaccgagctgctgatgaaccgggcttacttgcagagcattacccctcaggggtactctgactcggaggagagggagagtatgccgagggatggcgagagcgagaaggagcacgagaaagaaggcgaggatggctacgggaagctgggcagacaggatggcgacgaggagttcgaggaggaagaggaagaaagtgaaaataaaagtatggatacggatcccgaaacgatacgagatgaagaagagactggagatcactccatggacgatagttcggaggatgggaaaatggaaaccaaatcagaccacgaggaagacaatatggaagatggcatgtagtaatgaactagtccgtaacttgaaagtatttcgatttcttggctttatatatcttgtggaaaggacgagccggtatctcttccactgcttcc

SEQ ID NO: 187 - DNA, 1034 bp, Homo sapiens
  source 1..1034: mol_type = genomic DNA
accgccaccatggacagacttcttagacttggaggaggtatgcctggactgggccaggggccacctacagatgctcctgcagtggacacagcagaacaagtctatatctcttccctggcactgttaaaaatgttaaaacatggccgtgctggagttccaatggaagttatgggtttgatgcttggagaatttgttgatgattataccgtcagagtgattgatgtgtttgctatgccacagtcaggaacaggtgtcagtgtggaggcagttgatccagtgttccaagctaaaatgttggatatgttgaagcagacaggaaggccggagatggttgttggttggtatcacagtcaccctggctttggttgttggctttctggtgtggatatcaacactcagcagagctttgaagccttgtcggagagagctgtggcagtggttgtggatcccattcagagtgtaaaaggaaaggttgttattgatgccttcagattgatcaatgctaatatgatggtcttaggacatgaaccaagacaaacaacttcgaatctgggtcacttaaacaagccatctatccaggcattaattcatggactaaacagacattattactccattactattaactatcggaaaaatgaactggaacagaagatgttgctaaatttgcataagaagagttggatggaaggtttgacacttcaggactacagtgaacattgtaaacacaatgaatcagtggtaaaagagatgttggaattagccaagaattacaataaggctgtagaagaagaagataagatgacacctgaacagctggcaataaagaatgttggcaagcaggaccccaaacgtcatttggaggaacatgtggatgtacttatgacctcaaatattgtccagtgtttagcagctatgttggatactgtcgtatttaaatagtaatgaactagtccgtaacttgaaagtatttcgatttcttggctttatatatcttgtggaaaggacgaagcgaactggttcgccatgcacta

SEQ ID NO: 188 - DNA, 683 bp, Homo sapiens
  source 1..683: mol_type = genomic DNA
accgccaccatggacaacctgcgcgagactttcctcagcctcgaggatggcttgggctcctctgacagccctggcctgctgtcttcctgggactggaaggacagggcagggccctttgagctgaatcaggcctccccctctcagagcctttccccggctccatcgctggaatcctattcttcttctccctgtccagctgtggctgggctgccctgtgagcacggcggggccagcagtgggggcagcgaaggctgcagtgtcggtggggccagtggcctggtagaggtggactacaatatgttagctttccagcccacccaccttcagggcggtggtggccccaaggcccagaagggcaccaaagtcaggatgtctgtccagcggaggcggaaagccagcgagagggagaagctcaggatgaggaccttggcagatgccctgcacaccctccggaattacctgccacctgtctacagccagagaggccagcctctcaccaagatccagacactcaagtacaccatcaagtacatcggggaactcacagacctccttaaccgcggcagagagcccagagcccagagcgcgtagtaatgaactagtccgtaacttgaaagtatttcgatttcttggctttatatatcttgtggaaaggacgaatcccagaaacagcccactgcgta

SEQ ID NO: 189 - DNA, 734 bp, Homo sapiens
  source 1..734: mol_type = genomic DNA
accgccaccatggacctggaggagtttttgtcagaaaatggcattccccccagcccatctcagcatgaccacagccctcaccctcctgggctgcagccagcttcctcggctgccccctcggtcatggacctcagcagccgggcctctgcaccccttcaccctggcatcccatctccgaactgtatgcagagccccatcagaccaggtcagctgttgccagcaaaccgcaatacaccaagtcccattgatcctgacaccatccaggtcccagtgggttatgagccagacccagcagatcttgccctttccagcatccctggccaggaaatgtttgaccctcgcaaacgcaagttctctgaggaagaactgaagccacagcccatgatcaagaaagctcgcaaagtcttcatccctgatgacctgaaggatgacaagtactgggcaaggcgcagaaagaacaacatggcagccaagcgctcccgcgacgcccggaggctgaaagagaaccagatcgccatccgggcctcgttcctggagaaggagaactcggccctccgccaggaggtggctgacttgaggaaggagctgggcaaatgcaagaacatacttgccaagtatgaggccaggcacgggcccctgtagtaatgaactagtccgtaacttgaaagtatttcgatttcttggctttatatatcttgtggaaaggacgagaacaaattacggtggagctgcaa

SEQ ID NO: 190 - DNA, 1175 bp, Homo sapiens
  source 1..1175: mol_type = genomic DNA
accgccaccatgcagagtgtgcagagcacgagcttttgtctccgaaagcagtgcctttgcctgaccttcctgcttctccatctcctgggacaggtcgctgcgactcagcgctgccctccccagtgcccgggccggtgccctgcgacgccgccgacctgcgcccccggggtgcgcgcggtgctggacggctgctcatgctgtctggtgtgtgcccgccagcgtggcgagagctgctcagatctggagccatgcgacgagagcagtggcctctactgtgatcgcagcgcggaccccagcaaccagactggcatctgcacggcggtagagggagataactgtgtgttcgatggggtcatctaccgcagtggagagaaatttcagccaagctgcaaattccagtgcacctgcagagatgggcagattggctgtgtgccccgctgtcagctggatgtgctactgcctgagcctaactgcccagctccaagaaaagttgaggtgcctggagagtgctgtgaaaagtggatctgtggcccagatgaggaggattcactgggaggccttacccttgcagcttacaggccagaagccaccctaggagtagaagtctctgactcaagtgtcaactgcattgaacagaccacagagtggacagcatgctccaagagctgtggtatggggttctccacccgggtcaccaataggaaccgtcaatgtgagatgctgaaacagactcggctctgcatggtgcggccctgtgaacaagagccagagcagccaacagataagaaaggaaaaaagtgtctccgcaccaagaagtcactcaaagccatccacctgcagttcaagaactgcaccagcctgcacacctacaagcccaggttctgtggggtctgcagtgatggccgctgctgcactccccacaataccaaaaccatccaggcagagtttcagtgctccccagggcaaatagtcaagaagccagtgatggtcattgggacctgcacctgtcacaccaactgtcctaagaacaatgaggccttcctccaggagctggagctgaagactaccagagggaaaatgtagtaatgaactagtccgtaacttgaaagtatttcgatttcttggctttatatatcttgtggaaaggacgaagtggccgatatccgaggtggaca

SEQ ID NO: 191 - DNA, 1607 bp, Homo sapiens
  source 1..1607: mol_type = genomic DNA
accgccaccatgcaggcgcgctactccgtgtccgaccccaacgccctgggagtggtgccctacctgagcgagcagaattactaccgggctgcgggcagctacggcggcatggccagccccatgggcgtctattccggccacccggagcagtacagcgcggggatgggccgctcctacgcgccctaccaccaccaccagcccgcggcgcctaaggacctggtgaagccgccctacagctacatcgcgctcatcaccatggccatccagaacgcgcccgagaagaagatcaccttgaacggcatctaccagttcatcatggaccgcttccccttctaccgggagaacaagcagggctggcagaacagcatccgccacaacctctcgctcaacgagtgcttcgtcaaggtgccccgcgacgacaagaagcccggcaagggcagttactggaccctggacccggactcctacaacatgttcgagaacggcagcttcctgcggcgccggcggcgcttcaaaaagaaggacgtgtccaaggagaaggaggagcgggcccacctcaaggagccgcccccggcggcgtccaagggcgccccggccaccccccacctagcggacgcccccaaggaggccgagaagaaggtggtgatcaagagcgaggcggcgtccccggcgctgccggtcatcaccaaggtggagacgctgagccccgagagcgcgctgcagggcagcccgcgcagcgcggcctccacgcccgccggctcccccgacggctcgctgccggagcaccacgccgcggcgcccaacgggctgcctggcttcagcgtggagaacatcatgaccctgcgaacgtcgccgccgggcggagagctgagcccgggggccggacgcgcgggcctggtggtgccgccgctggcgctgccctacgccgccgcgccgcccgccgcctacggccagccgtgcgctcagggcctggaggccggggccgccgggggctaccagtgcagcatgcgagcgatgagcctgtacaccggggccgagcggccggcgcacatgtgcgtcccgcccgccctggacgaggccctctcggaccacccgagcggccccacgtcgcccctgagcgctctcaacctcgccgccggccaggagggcgcgctcgccgccacgggccaccaccaccagcaccacggccaccaccacccgcaggcgccgccgcccccgccggctccccagccccagccgacgccgcagcccggggccgccgcggcgcaggcggcctcctggtatctcaaccacagcggggacctgaaccacctccccggccacacgttcgcggcccagcagcaaactttccccaacgtgcgggagatgttcaactcccaccggctggggattgagaactcgaccctcggggagtcccaggtgagtggcaatgccagctgccagctgccctacagatccacgccgcctctctatcgccacgcagccccctactcctacgactgcacgaaatactagtaatgaactagtccgtaacttgaaagtatttcgatttcttggctttatatatcttgtggaaaggacgaatatatggatagccattccaagat

SEQ ID NO: 192 - DNA, 1763 bp, Homo sapiens
  source 1..1763: mol_type = genomic DNA
accgccaccatgcaggcgcgctactccgtgtccagccccaactccctgggagtggtgccctacctcggcggcgagcagagctactaccgcgcggcggccgcggcggccgggggcggctacaccgccatgccggcccccatgagcgtgtactcgcaccctgcgcacgccgagcagtacccgggcggcatggcccgcgcctacgggccctacacgccgcagccgcagcccaaggacatggtgaagccgccctatagctacatcgcgctcatcaccatggccatccagaacgccccggacaagaagatcaccctgaacggcatctaccagttcatcatggaccgcttccccttctaccgggacaacaagcagggctggcagaacagcatccgccacaacctctcgctcaacgagtgcttcgtcaaggtgccgcgcgacgacaagaagccgggcaagggcagctactggacgctggacccggactcctacaacatgttcgagaacggcagcttcctgcggcggcggcggcgcttcaagaagaaggacgcggtgaaggacaaggaggagaaggacaggctgcacctcaaggagccgcccccgcccggccgccagcccccgcccgcgccgccggagcaggccgacggcaacgcgcccggtccgcagccgccgcccgtgcgcatccaggacatcaagaccgagaacggtacgtgcccctcgccgccccagcccctgtccccggccgccgccctgggcagcggcagcgccgccgcggtgcccaagatcgagagccccgacagcagcagcagcagcctgtccagcgggagcagccccccgggcagcctgccgtcggcgcggccgctcagcctggacggtgcggattccgcgccgccgccgcccgcgccctccgccccgccgccgcaccatagccagggcttcagcgtggacaacatcatgacgtcgctgcgggggtcgccgcagagcgcggccgcggagctcagctccggccttctggcctcggcggccgcgtcctcgcgcgcggggatcgcacccccgctggcgctcggcgcctactcgcccggccagagctccctctacagctccccctgcagccagacctccagcgcgggcagctcgggcggcggcggcggcggcgcgggggccgcggggggcgcgggcggcgccgggacctaccactgcaacctgcaagccatgagcctgtacgcggccggcgagcgcgggggccacttgcagggcgcgcccgggggcgcgggcggctcggccgtggacgaccccctgcccgactactctctgcctccggtcaccagcagcagctcgtcgtccctgagtcacggcggcggcggcggcggcggcgggggaggccaggaggccggccaccaccctgcggcccaccaaggccgcctcacctcgtggtacctgaaccaggcgggcggagacctgggccacttggcgagcgcggcggcggcggcggcggccgcaggctacccgggccagcagcagaacttccactcggtgcgggagatgttcgagtcacagaggatcggcttgaacaactctccagtgaacgggaatagtagctgtcaaatggccttcccttccagccagtctctgtaccgcacgtccggagctttcgtctacgactgtagcaagttttagtaatgaactagtccgtaacttgaaagtatttcgatttcttggctttatatatcttgtggaaaggacgagtgttataataccagtaattggaa

SEQ ID NO: 193 - DNA, 608 bp, Homo sapiens
  source 1..608: mol_type = genomic DNA
accgccaccatgcacccaagtttggctacaatggggaaactggcttcaaagctacaacttgatctatccgtagtaaagatctggttcaagaaccagcgtgccaaatggaagaggcagcagcggcagcaaatgcagacacggccatcactagggccagcaaaccagacaacttcagtgaagaaggaggagactccctcagccataactactgcaaacattcgtccagtaagtcctggaatctctgatgcaaatgaccatgatctacgtgagccttctggtatcaagaatcctggaggagccagcgcctctgcgagggtttcatcctgggattctcagtcatatgacattgaacagatatgtctgggggcttcaaatcctccttgggcctccactctctttgaaatagatgaatttgtaaagatctatgacttgccaggggaagatgacaccagcagcctaaatcaatatctttttccagtatgccttgagtatgaccagctccaatcttcagtgtagtaatgaactagtccgtaacttgaaagtatttcgatttcttggctttatatatcttgtggaaaggacgaagcaggagtgaggctagtacatga

SEQ ID NO: 194 - DNA, 1505 bp, Homo sapiens
  source 1..1505: mol_type = genomic DNA
accgccaccatgcactccaccacccccatcagctccctcttctccttcaccagccccgcagtgaagagactgctaggctggaagcaaggagatgaagaggaaaagtgggcagagaaggcagtggactctctagtgaagaagttaaagaagaagaagggagccatggacgagctggagagggctctcagctgcccggggcagcccagcaaatgcgtcacgattccccgctccctggacgggcggctgcaggtgtcccaccgcaagggcctgccccatgtgatttactgtcgcgtgtggcgctggccggatctgcagtcccaccacgagctgaagccgctggagtgctgtgagttcccatttggctccaagcagaaagaagtgtgcattaacccttaccactaccgccgggtggagactccagtactgcctcctgtgctcgtgccaagacacagtgaatataacccccagctcagcctcctggccaagttccgcagcgcctccctgcacagtgagccactcatgccacacaacgccacctatcctgactctttccagcagcctccgtgctctgcactccctccctcacccagccacgcgttctcccagtccccgtgcacggccagctaccctcactccccaggaagtccttctgagccagagagtccctatcaacactcagttgacacaccacccctgccttatcatgccacagaagcctctgagacccagagtggccaacctgtagatgccacagctgatagacatgtagtgctatcgataccaaatggagactttcgaccagtttgttacgaggagccccagcactggtgctcggtcgcctactatgaactgaacaaccgagttggggagacattccaggcttcctcccgaagtgtgctcatagatgggttcaccgacccttcaaataacaggaacagattctgtcttggacttctttctaatgtaaacagaaactcaacgatagaaaataccaggagacatataggaaagggtgtgcacttgtactacgtcgggggagaggtgtatgccgagtgcgtgagtgacagcagcatctttgtgcagagccggaactgcaactatcaacacggcttccacccagctaccgtctgcaagatccccagcggctgcagcctcaaggtcttcaacaaccagctcttcgctcagctcctggcccagtcagttcaccacggctttgaagtcgtgtatgaactgaccaagatgtgtactatccggatgagttttgttaagggttggggtgctgagtatcatcgccaggatgtcaccagcaccccctgctggattgagattcatcttcatgggccactgcagtggctggacaaagttctgactcagatgggctctccacataaccccatttcttcagtgtcttagtaatgaactagtccgtaacttgaaagtatttcgatttcttggctttatatatcttgtggaaaggacgaagtatcacagtttgcgtagtgaag

SEQ ID NO: 195 - DNA, 3764 bp, Homo sapiens
  source 1..3764: mol_type = genomic DNA
accgccaccatgggtgaccagcaactgtacaagaccaaccatgtggcccatggtagtgagaaccttttctaccaacagccaccacttggcgtccacagcgggctgaaccacaactatgggaatgcagttacagggggcggaatggatgcccctcaggcctcgccaatctccccccacttccctcaagatacacgggatggtctgggcttgcctgttggctccaaaaaccttggccaaatggatacctcgaggcagggagggtggggaagtcatgcagggcctggaaaccatgtccagctacgtggaaacctggccaactcaaacatgatgtggggggcaccagcccaggctgagcccactgatggctaccaatacacctactcccaggccagcgagatccggacccagaagcttaccagcggtgtcttacacaagctggactctttcacccaggtgtttgccaaccaaaacctgcgaattcaggtcaacaatatggcccaggtgctgcacactcagtcagcagtgatggatggagcccctgacagtgctctccgccagctgctgtctcagaagcccatggagcccccagcaccggctatcccttcccgctaccagcaggtgccccagcagcctcaccctggtttcactggtgggctgtccaaaccagctcttcaggtcgggcagcaccctacccaagggcacctgtattatgactaccagcagcctctggctcaggtgccagtgcagggaggacagccactgcaggccccacagatgctgtcacagcacatgcaacagatgcagcagcaccagtattacccaccgcagcaacagcagcaagccgggcaacagcgtatctccatgcaagaaatacagacgcagccgcaacaaattcgcccatcacagccacagccgccgccacagcagcagcagccgcagcagctacagctgcagcagcggcagggttcaatgcagatacctcagtattatcagccccaacccatgatgcagcacttgcaagagcagcagcagcaacagatgcacctgcagcctccttcttatcacagggaccctcaccagtataccccagagcaggcacacactgtccagctgattcccctgggctccatgtcccagtactactaccaggagccccagcagccctacagccaccccctctaccagcagagccacctgtcccagcaccagcagcgtgaggacagtcagctgaagacctactctagtgacagacaggcccaggccatgctgagctcccatggggacctggggcctcctgacacaggaatgggagacccagcgagctcagatctgacccgggtcagcagcaccctcccccatcgccccctcctatcccccagtgggatccacctcaacaacatggggcctcagcatcagcagctgtctcccagtgccatgtggccccagatgcacctacctgatgggagagcccagccagggtcccctgagtcaagtggccaacccaaaggagcgtttggggagcagtttgatgccaagaacaagctgacatgctccatctgcctgaaggagttcaagaacctgcctgccctgaatggccacatgcggtcccacgggggaatgagggcctcccccaacctcaaacaggaggaaggagagaaggtcctgccgcctcagccccagccaccactgccgcctccgcctccgcctccgccgccaccacagctccctcccgaggcagaaagcctcacgcctatggtcatgcccgtgtctgtccctgtcaagcttctcccgcccaagcccagctctcaggggttcaccaacagcaccgttgccgccccctccgccagagacaagccagccagctcgatgtcggacgacgagatgcctgtgctcgtgaggatgaccctctctcccccacactcaccccaaggggctgccccccgcacgcctgctgaaatccccaggaagcatcagccgagtgtgcccaaagccgaggagcccctcaagaccgtgcaggagaagaaaaagttccggcaccggccggaacctctcttcatcccgccgccgccctcctacaacccgaaccccgctgcctcctactcgggcgccaccctgtaccagagccagctgcgctccccgcgcgtcctcggggaccacctgctcctggaccccacccacgagctgcccccttacacgcccccacccatgctgagcccggtgcgccagggctcggggctcttcagcaatgtcctcatctccggccacggccctggcgcccacccgcagctgcccctgacgcccctgacgcccacaccacgggtgctgctgtgtcgctccaacagcatcgatggcagcaacgtgacggtcaccccagggcctggagagcagactgtagatgttgaaccacgcatcaacattggcttgagattccaagcagaaatccctgaactccaagatatctctgccctggcccaggacacacacaaggccacactggtatggaagccctggccagaactagaaaaccatgacctccagcaaagagtggagaatcttctgaatttgtgctgttccagtgcattgccaggtggagggaccaattctgaatttgctttgcactctctgtttgaggccaaaggtgatgtgatggttgctctggaaatgctgctactgcggaagcctgtcaggttaaaatgtcatcctttagcaaattaccactatgccggttcggacaagtggacctccctagaaagaaaactgtttaacaaagcactagccacttacagcaaagactttatttttgtacagaagatggtgaagtccaagacggtggctcagtgcgtggagtactactacacgtggaaaaagatcatgcggctggggcggaaacaccggacacgcctggcagaaatcatcgacgattgtgtgacaagtgaagaagaagaagagttagaggaggaggaggaggaggacccggaagaagataggaaatccacaaaagaagaagagagtgaggtgccgaagtccccggagccaccacccgtccccgtcctggctcccacggaggggccgcccctgcaggccctgggccagccctcaggctccttcatctgtgaaatgcccaactgtggggctgtgttcagctcccgacaggcactgaatggccatgcccgcatccacgggggcaccaaccaggtgaccaaggcccgaggtgccatcccctctgggaagcagaagcctggtggcacccagagtgggtactgttcggtaaagagctcaccctctcacagcaccaccagcggcgagacagaccccaccaccatcttcccctgcaaggagtgtggcaaagtcttcttcaagatcaaaagccgaaatgcacacatgaaaactcacaggcagcaggaggaacaacagaggcaaaaggctcagaaggcggcttttgcagctgagatggcagccacgattgagaggactacggggcccgtgggggcgccggggctgctgcccctggaccagctgagtctgatcaaacccatcaaggatgtggacatcctcgacgacgacgtcgtccagcagttgggaggtgtcatggaagaggctgaagttgtggacaccgatcttctcttggatgatcaagattcagtcttgcttcagggtgacgcagaactatagtaatgaactagtccgtaacttgaaagtatttcgatttcttggctttatatatcttgtggaaaggacgactcgggatgttggtggccgtgatt

SEQ ID NO: 196 - DNA, 3491 bp, Homo sapiens
  source 1..3491: mol_type = genomic DNA
accgccaccatgggtgaccagcaactgtacaagaccaaccatgtggcccatggtagtgagaaccttttctaccaacagccaccacttggcgtccacagcgggctgaaccacaactatgggaatgcagttacagggggcggaatggatgcccctcaggcctcgccaatctccccccacttccctcaagatacacgggatggtctgggcttgcctgttggctccaaaaaccttggccaaatggatacctcgaggcagggagggtggggaagtcatgcagggcctggaaaccatgtccagctacgtggaaacctggccaactcaaacatgatgtggggggcaccagcccaggctgagcccactgatggctaccaatacacctactcccaggccagcgagatccggacccagaagcttaccagcggtgtcttacacaagctggactctttcacccaggtgtttgccaaccaaaacctgcgaattcaggtcaacaatatggcccaggtgctgcacactcagtcagcagtgatggatggagcccctgacagtgctctccgccagctgctgtctcagaagcccatggagcccccagcaccggctatcccttcccgctaccagcaggtgccccagcagcctcaccctggtttcactggtgggctgtccaaaccagctcttcaggtcgggcagcaccctacccaagggcacctgtattatgactaccagcagcctctggctcaggtgccagtgcagggaggacagccactgcaggccccacagatgctgtcacagcacatgcaacagatgcagcagcaccagtattacccaccgcagcaacagcagcaagccgggcaacagcgtatctccatgcaagaaatacagacgcagccgcaacaaattcgcccatcacagccacagccgccgccacagcagcagcagccgcagcagctacagctgcagcagcggcagggttcaatgcagatacctcagtattatcagccccaacccatgatgcagcacttgcaagagcagcagcagcaacagatgcacctgcagcctccttcttatcacagggaccctcaccagtataccccagagcaggcacacactgtccagctgattcccctgggctccatgtcccagtactactaccaggagccccagcagccctacagccaccccctctaccagcagagccacctgtcccagcaccagcagcgtgaggacagtcagctgaagacctactctagtgacagacaggcccaggccatgctgagctcccatggggacctggggcctcctgacacaggaatgggagacccagcgagctcagatctgacccgggtcagcagcaccctcccccatcgccccctcctatcccccagtgggatccacctcaacaacatggggcctcagcatcagcagctgtctcccagtgccatgtggccccagatgcacctacctgatgggagagcccagccagggtcccctgagtcaagtggccaacccaaaggagcgtttggggagcagtttgatgccaagaacaagctgacatgctccatctgcctgaaggagttcaagaacctgcctgccctgaatggccacatgcggtcccacgggggaatgagggcctcccccaacctcaaacaggaaatccccaggaagcatcagccgagtgtgcccaaagccgaggagcccctcaagaccgtgcaggagaagaaaaagttccggcaccggccggaacctctcttcatcccgccgccgccctcctacaacccgaaccccgctgcctcctactcgggcgccaccctgtaccagagccagctgcgctccccgcgcgtcctcggggaccacctgctcctggaccccacccacgagctgcccccttacacgcccccacccatgctgagcccggtgcgccagggctcggggctcttcagcaatgtcctcatctccggccacggccctggcgcccacccgcagctgcccctgacgcccctgacgcccacaccacgggtgctgctgtgtcgctccaacagcatcgatggcagcaacgtgacggtcaccccagggcctggagagcagactgtagatgttgaaccacgcatcaacattggcttgagattccaagcagaaatccctgaactccaagatatctctgccctggcccaggacacacacaaggccacactggtatggaagccctggccagaactagaaaaccatgacctccagcaaagagtggagaatcttctgaatttgtgctgttccagtgcattgccaggtggagggaccaattctgaatttgctttgcactctctgtttgaggccaaaggtgatgtgatggttgctctggaaatgctgctactgcggaagcctgtcaggttaaaatgtcatcctttagcaaattaccactatgccggttcggacaagtggacctccctagaaagaaaactgtttaacaaagcactagccacttacagcaaagactttatttttgtacagaagatggtgaagtccaagacggtggctcagtgcgtggagtactactacacgtggaaaaagatcatgcggctggggcggaaacaccggacacgcctggcagaaatcatcgacgattgtgtgacaagtgaagaagaagaagagttagaggaggaggaggaggaggacccggaagaagataggaaatccacaaaagaagaagagagtgaggtgccgaagtccccggagccaccacccgtccccgtcctggctcccacggaggggccgcccctgcaggccctgggccagccctcaggctccttcatctgtgaaatgcccaactgtggggctgactgtagatgtcatgtcactccctttcttccccaggtgttcagctcccgacaggcactgaatggccatgcccgcatccacgggggcaccaaccaggtgaccaaggcccgaggtgccatcccctctgggaagcagaagcctggtggcacccagagtgggtactgttcggtaaagagctcaccctctcacagcaccaccagcggcgagacagaccccaccaccatcttcccctgcaaggagtgtggcaaagtcttcttcaagatcaaaagccgaaatgcacacatgaaaactcacaggcagcaggaggaacaacagaggcaaaaggctcagaaggcggcttttgcagctgagatggcagccacgattgagaggactacggggcccgtgggggcgccggggctgctgcccctggaccagctgagtctgatcaaacccatcaaggatgtggacatcctcgacgacgacgtcgtccagcagttgggaggtgtcatggaagaggctgaagttgtggacaccgatcttctcttggatgatcaagattcagtcttgcttcagggtgacgcagaactatagtaatgaactagtccgtaacttgaaagtatttcgatttcttggctttatatatcttgtggaaaggacgagtggcctgtgcttgggaacggtct

SEQ ID NO: 197 - DNA, 3704 bp, Homo sapiens
  source 1..3704: mol_type = genomic DNA
accgccaccatgggtgaccagcaactgtacaagaccaaccatgtggcccatggtagtgagaaccttttctaccaacagccaccacttggcgtccacagcgggctgaaccacaactatgggaatgcagttacagggggcggaatggatgcccctcaggcctcgccaatctccccccacttccctcaagatacacgggatggtctgggcttgcctgttggctccaaaaaccttggccaaatggatacctcgaggcagggagggtggggaagtcatgcagggcctggaaaccatgtccagctacgtggaaacctggccaactcaaacatgatgtggggggcaccagcccaggctgagcccactgatggctaccaatacacctactcccaggccagcgagatccggacccagaagcttaccagcggtgtcttacacaagctggactctttcacccaggtgtttgccaaccaaaacctgcgaattcaggtcaacaatatggcccaggtgctgcacactcagtcagcagtgatggatggagcccctgacagtgctctccgccagctgctgtctcagaagcccatggagcccccagcaccggctatcccttcccgctaccagcaggtgccccagcagcctcaccctggtttcactggtgggctgtccaaaccagctcttcaggtcgggcagcaccctacccaagggcacctgtattatgactaccagcagcctctggctcaggtgccagtgcagggaggacagccactgcaggccccacagatgctgtcacagcacatgcaacagatgcagcagcaccagtattacccaccgcagcaacagcagcaagccgggcaacagcgtatctccatgcaagaaatacagacgcagccgcaacaaattcgcccatcacagccacagccgccgccacagcagcagcagccgcagcagctacagctgcagcagcggcagggttcaatgcagatacctcagtattatcagccccaacccatgatgcagcacttgcaagagcagcagcagcaacagatgcacctgcagcctccttcttatcacagggaccctcaccagtataccccagagcaggcacacactgtccagctgattcccctgggctccatgtcccagtactactaccaggagccccagcagccctacagccaccccctctaccagcagagccacctgtcccagcaccagcagcgtgaggacagtcagctgaagacctactctagtgacagacaggcccaggccatgctgagctcccatggggacctggggcctcctgacacaggaatgggagacccagcgagctcagatctgacccgggtcagcagcaccctcccccatcgccccctcctatcccccagtgggatccacctcaacaacatggggcctcagcatcagcagctgtctcccagtgccatgtggccccagatgcacctacctgatgggagagcccagccagggtcccctgagtcaagtggccaacccaaaggagcgtttggggagcagtttgatgccaagaacaagctgacatgctccatctgcctgaaggagttcaagaacctgcctgccctgaatggccacatgcggtcccacgggggaatgagggcctcccccaacctcaaacaggaggaaggagagaaggtcctgccgcctcagccccagccaccactgccgcctccgcctccgcctccgccgccaccacagctccctcccgaggcagaaagcctcacgcctatggtcatgcccgtgtctgtccctgtcaagcttctcccgcccaagcccagctctcaggggttcaccaacagcaccgttgccgccccctccgccagagacaagccagccagctcgatgtcggacgacgagatgcctgtgctcgaaatccccaggaagcatcagccgagtgtgcccaaagccgaggagcccctcaagaccgtgcaggagaagaaaaagttccggcaccggccggaacctctcttcatcccgccgccgccctcctacaacccgaaccccgctgcctcctactcgggcgccaccctgtaccagagccagctgcgctccccgcgcgtcctcggggaccacctgctcctggaccccacccacgagctgcccccttacacgcccccacccatgctgagcccggtgcgccagggctcggggctcttcagcaatgtcctcatctccggccacggccctggcgcccacccgcagctgcccctgacgcccctgacgcccacaccacgggtgctgctgtgtcgctccaacagcatcgatggcagcaacgtgacggtcaccccagggcctggagagcagactgtagatgttgaaccacgcatcaacattggcttgagattccaagcagaaatccctgaactccaagatatctctgccctggcccaggacacacacaaggccacactggtatggaagccctggccagaactagaaaaccatgacctccagcaaagagtggagaatcttctgaatttgtgctgttccagtgcattgccaggtggagggaccaattctgaatttgctttgcactctctgtttgaggccaaaggtgatgtgatggttgctctggaaatgctgctactgcggaagcctgtcaggttaaaatgtcatcctttagcaaattaccactatgccggttcggacaagtggacctccctagaaagaaaactgtttaacaaagcactagccacttacagcaaagactttatttttgtacagaagatggtgaagtccaagacggtggctcagtgcgtggagtactactacacgtggaaaaagatcatgcggctggggcggaaacaccggacacgcctggcagaaatcatcgacgattgtgtgacaagtgaagaagaagaagagttagaggaggaggaggaggaggacccggaagaagataggaaatccacaaaagaagaagagagtgaggtgccgaagtccccggagccaccacccgtccccgtcctggctcccacggaggggccgcccctgcaggccctgggccagccctcaggctccttcatctgtgaaatgcccaactgtggggctgtgttcagctcccgacaggcactgaatggccatgcccgcatccacgggggcaccaaccaggtgaccaaggcccgaggtgccatcccctctgggaagcagaagcctggtggcacccagagtgggtactgttcggtaaagagctcaccctctcacagcaccaccagcggcgagacagaccccaccaccatcttcccctgcaaggagtgtggcaaagtcttcttcaagatcaaaagccgaaatgcacacatgaaaactcacaggcagcaggaggaacaacagaggcaaaaggctcagaaggcggcttttgcagctgagatggcagccacgattgagaggactacggggcccgtgggggcgccggggctgctgcccctggaccagctgagtctgatcaaacccatcaaggatgtggacatcctcgacgacgacgtcgtccagcagttgggaggtgtcatggaagaggctgaagttgtggacaccgatcttctcttggatgatcaagattcagtcttgcttcagggtgacgcagaactatagtaatgaactagtccgtaacttgaaagtatttcgatttcttggctttatatatcttgtggaaaggacgacggctgcacttcacgttctcctaa

SEQ ID NO: 198 - DNA, 3455 bp, Homo sapiens
  source 1..3455: mol_type = genomic DNA
accgccaccatgggtgaccagcaactgtacaagaccaaccatgtggcccatggtagtgagaaccttttctaccaacagccaccacttggcgtccacagcgggctgaaccacaactatgggaatgcagttacagggggcggaatggatgcccctcaggcctcgccaatctccccccacttccctcaagatacacgggatggtctgggcttgcctgttggctccaaaaaccttggccaaatggatacctcgaggcagggagggtggggaagtcatgcagggcctggaaaccatgtccagctacgtggaaacctggccaactcaaacatgatgtggggggcaccagcccaggctgagcccactgatggctaccaatacacctactcccaggccagcgagatccggacccagaagcttaccagcggtgtcttacacaagctggactctttcacccaggtgtttgccaaccaaaacctgcgaattcaggtcaacaatatggcccaggtgctgcacactcagtcagcagtgatggatggagcccctgacagtgctctccgccagctgctgtctcagaagcccatggagcccccagcaccggctatcccttcccgctaccagcaggtgccccagcagcctcaccctggtttcactggtgggctgtccaaaccagctcttcaggtcgggcagcaccctacccaagggcacctgtattatgactaccagcagcctctggctcaggtgccagtgcagggaggacagccactgcaggccccacagatgctgtcacagcacatgcaacagatgcagcagcaccagtattacccaccgcagcaacagcagcaagccgggcaacagcgtatctccatgcaagaaatacagacgcagccgcaacaaattcgcccatcacagccacagccgccgccacagcagcagcagccgcagcagctacagctgcagcagcggcagggttcaatgcagatacctcagtattatcagccccaacccatgatgcagcacttgcaagagcagcagcagcaacagatgcacctgcagcctccttcttatcacagggaccctcaccagtataccccagagcaggcacacactgtccagctgattcccctgggctccatgtcccagtactactaccaggagccccagcagccctacagccaccccctctaccagcagagccacctgtcccagcaccagcagcgtgaggacagtcagctgaagacctactctagtgacagacaggcccaggccatgctgagctcccatggggacctggggcctcctgacacaggaatgggagacccagcgagctcagatctgacccgggtcagcagcaccctcccccatcgccccctcctatcccccagtgggatccacctcaacaacatggggcctcagcatcagcagctgtctcccagtgccatgtggccccagatgcacctacctgatgggagagcccagccagggtcccctgagtcaagtggccaacccaaaggagcgtttggggagcagtttgatgccaagaacaagctgacatgctccatctgcctgaaggagttcaagaacctgcctgccctgaatggccacatgcggtcccacgggggaatgagggcctcccccaacctcaaacaggaaatccccaggaagcatcagccgagtgtgcccaaagccgaggagcccctcaagaccgtgcaggagaagaaaaagttccggcaccggccggaacctctcttcatcccgccgccgccctcctacaacccgaaccccgctgcctcctactcgggcgccaccctgtaccagagccagctgcgctccccgcgcgtcctcggggaccacctgctcctggaccccacccacgagctgcccccttacacgcccccacccatgctgagcccggtgcgccagggctcggggctcttcagcaatgtcctcatctccggccacggccctggcgcccacccgcagctgcccctgacgcccctgacgcccacaccacgggtgctgctgtgtcgctccaacagcatcgatggcagcaacgtgacggtcaccccagggcctggagagcagactgtagatgttgaaccacgcatcaacattggcttgagattccaagcagaaatccctgaactccaagatatctctgccctggcccaggacacacacaaggccacactggtatggaagccctggccagaactagaaaaccatgacctccagcaaagagtggagaatcttctgaatttgtgctgttccagtgcattgccaggtggagggaccaattctgaatttgctttgcactctctgtttgaggccaaaggtgatgtgatggttgctctggaaatgctgctactgcggaagcctgtcaggttaaaatgtcatcctttagcaaattaccactatgccggttcggacaagtggacctccctagaaagaaaactgtttaacaaagcactagccacttacagcaaagactttatttttgtacagaagatggtgaagtccaagacggtggctcagtgcgtggagtactactacacgtggaaaaagatcatgcggctggggcggaaacaccggacacgcctggcagaaatcatcgacgattgtgtgacaagtgaagaagaagaagagttagaggaggaggaggaggaggacccggaagaagataggaaatccacaaaagaagaagagagtgaggtgccgaagtccccggagccaccacccgtccccgtcctggctcccacggaggggccgcccctgcaggccctgggccagccctcaggctccttcatctgtgaaatgcccaactgtggggctgtgttcagctcccgacaggcactgaatggccatgcccgcatccacgggggcaccaaccaggtgaccaaggcccgaggtgccatcccctctgggaagcagaagcctggtggcacccagagtgggtactgttcggtaaagagctcaccctctcacagcaccaccagcggcgagacagaccccaccaccatcttcccctgcaaggagtgtggcaaagtcttcttcaagatcaaaagccgaaatgcacacatgaaaactcacaggcagcaggaggaacaacagaggcaaaaggctcagaaggcggcttttgcagctgagatggcagccacgattgagaggactacggggcccgtgggggcgccggggctgctgcccctggaccagctgagtctgatcaaacccatcaaggatgtggacatcctcgacgacgacgtcgtccagcagttgggaggtgtcatggaagaggctgaagttgtggacaccgatcttctcttggatgatcaagattcagtcttgcttcagggtgacgcagaactatagtaatgaactagtccgtaacttgaaagtatttcgatttcttggctttatatatcttgtggaaaggacgagatctatcttccgtggttcttcag

SEQ ID NO: 199 - DNA, 1592 bp, Homo sapiens
  source 1..1592: mol_type = genomic DNA
accgccaccatgttcaggtccaaacgctcggggctggtgcggcgactttggcgaagtcgtgtggtccccgaccgggaggaaggcggcagcggcggcggcggtggcggcgacgaggatgggagcttgggcagccgagctgagccggccccgcgggcaagagagggcggaggctgcggccgctccgaagtccgcccggtagccccgcggcggccccgggacgcagtgggacagcgaggcgcccagggcgcggggaggcgccggcgcgcagggggccccccgaggcccatgtcggagccaggggccggcgctgggagctccctgctggacgtggcggagccgggaggcccgggctggctgcccgagagtgactgcgagacggtgacctgctgtctcttttcggagcgggacgccgccggcgcgccccgggacgccagcgaccccctggccggggcggccctggagccggcgggcggcgggcggagtcgcgaagcgcgctcgcggctgctgctgctggagcaggaactcaaaaccgtcacgtactcgctgctgaagcggctcaaggagcgctcgctggacacgctgctggaggcggtggagtcccgcggcggcgtgccgggcggctgcgtgctggtgccgcgcgccgacctccgcctgggcggccagcccgcgccgccgcagctgctgctcggccgcctctttcgctggcccgacctgcagcacgccgtggagctgaagcccctgtgcggctgccacagcttcgccgccgccgccgacggccctaccgtgtgctgcaacccctaccacttcagccggctctgcgggcccgaatctccgccacctccctactctcggctgtctcctcgcgacgagtacaagccactggatctgtccgattccacattgtcttacactgaaacggaggctaccaactccctcatcactgctccgggtgaattctcagacgccagcatgtctccggacgccaccaagccgagccactggtgcagcgtggcgtactgggagcaccggacgcgcgtgggccgcctctatgcggtgtacgaccaggccgtcagcatcttctacgacctacctcagggcagcggcttctgcctgggccagctcaacctggagcagcgcagcgagtcggtgcggcgaacgcgcagcaagatcggcttcggcatcctgctcagcaaggagcccgacggcgtgtgggcctacaaccgcggcgagcaccccatcttcgtcaactccccgacgctggacgcgcccggcggccgcgccctggtcgtgcgcaaggtgccccccggctactccatcaaggtgttcgacttcgagcgctcgggcctgcagcacgcgcccgagcccgacgccgccgacggcccctacgaccccaacagcgtccgcatcagcttcgccaagggctgggggccctgctactcccggcagttcatcacctcctgcccctgctggctggagatcctcctcaacaaccccagatagtaatgaactagtccgtaacttgaaagtatttcgatttcttggctttatatatcttgtggaaaggacgagagacccaagccggaatgtgtaca

SEQ ID NO: 200 - DNA, 1379 bp, Homo sapiens
  source 1..1379: mol_type = genomic DNA
accgccaccatgttcaggaccaaacgatctgcgctcgtccggcgtctctggaggagccgtgcgcccggcggcgaggacgaggaggagggcgcagggggaggtggaggaggaggcgagctgcggggagaaggggcgacggacagccgagcgcatggggccggtggcggcggcccgggcagggctggatgctgcctgggcaaggcggtgcgaggtgccaaaggtcaccaccatccccacccgccagccgcgggcgccggcgcggccgggggcgccgaggcggatctgaaggcgctcacgcactcggtgctcaagaaactgaaggagcggcagctggagctgctgctccaggccgtggagtcccgcggcgggacgcgcaccgcgtgcctcctgctgcccggccgcctggactgcaggctgggcccgggggcgcccgccggcgcgcagcctgcgcagccgccctcgtcctactcgctccccctcctgctgtgcaaagtgttcaggtggccggatctcaggcattcctcggaagtcaagaggctgtgttgctgtgaatcttacgggaagatcaaccccgagctggtgtgctgcaacccccatcaccttagccgactctgcgaactagagtctcccccccctccttactccagatacccgatggattttctcaaaccaactgactgtccagatgctgtgccttcctccgctgaaacagggggaacgaattatctggcccctggggggctttcagattcccaacttcttctggagcctggggatcggtcacactggtgcgtggtggcatactgggaggagaagacgagagtggggaggctctactgtgtccaggagccctctctggatatcttctatgatctacctcaggggaatggcttttgcctcggacagctcaattcggacaacaagagtcagctggtgcagaaggtgcggagcaaaatcggctgcggcatccagctgacgcgggaggtggatggtgtgtgggtgtacaaccgcagcagttaccccatcttcatcaagtccgccacactggacaacccggactccaggacgctgttggtacacaaggtgttccccggtttctccatcaaggctttcgactacgagaaggcgtacagcctgcagcggcccaatgaccacgagtttatgcagcagccgtggacgggctttaccgtgcagatcagctttgtgaagggctggggccagtgctacacccgccagttcatcagcagctgcccgtgctggctagaggtcatcttcaacagccggtagtaatgaactagtccgtaacttgaaagtatttcgatttcttggctttatatatcttgtggaaaggacgagaccaacatatgtacggagccttc

SEQ ID NO: 201 - DNA, 737 bp, Homo sapiens
  source 1..737: mol_type = genomic DNA
accgccaccatggattttctcaaaccaactgcagactgtccagatgctgtgccttcctccgctgaaacagggggaacgaattatctggcccctggggggctttcagattcccaacttcttctggagcctggggatcggtcacactggtgcgtggtggcatactgggaggagaagacgagagtggggaggctctactgtgtccaggagccctctctggatatcttctatgatctacctcaggggaatggcttttgcctcggacagctcaattcggacaacaagagtcagctggtgcagaaggtgcggagcaaaatcggctgcggcatccagctgacgcgggaggtggatggtgtgtgggtgtacaaccgcagcagttaccccatcttcatcaagtccgccacactggacaacccggactccaggacgctgttggtacacaaggtgttccccggtttctccatcaaggctttcgactacgagaaggcgtacagcctgcagcggcccaatgaccacgagtttatgcagcagccgtggacgggctttaccgtgcagatcagctttgtgaagggctggggccagtgctacacccgccagttcatcagcagctgcccgtgctggctagaggtcatcttcaacagccggtagtaatgaactagtccgtaacttgaaagtatttcgatttcttggctttatatatcttgtggaaaggacgaagttgcaactgaagtggtatccgg

SEQ ID NO: 202 - DNA, 1415 bp, Homo sapiens
  source 1..1415: mol_type = genomic DNA
accgccaccatgtcgtccatcttgccattcacgccgccagttgtgaagagactgctgggatggaagaagtcagctggtgggtctggaggagcaggcggaggagagcagaatgggcaggaagaaaagtggtgtgagaaagcagtgaaaagtctggtgaagaagctaaagaaaacaggacgattagatgagcttgagaaagccatcaccactcaaaactgtaatactaaatgtgttaccataccaaggtctcttgatggtcgtctccaggtatcccatcgaaaaggattgccacatgttatatattgccgattatggcgctggcctgatcttcacagtcatcatgaactcaaggcaattgaaaactgcgaatatgcttttaatcttaaaaaggatgaagtatgtgtaaacccttaccactatcagagagttgagacaccagttttgcctccagtattagtgccccgacacaccgagatcctaacagaacttccgcctctggatgactatactcactccattccagaaaacactaacttcccagcaggaattgagccacagagtaattatattccagaaacgccacctcctggatatatcagtgaagatggagaaacaagtgaccaacagttgaatcaaagtatggacacaggctctccagcagaactatctcctactactctttcccctgttaatcatagcttggatttacagccagttacttactcagaacctgcattttggtgttcgatagcatattatgaattaaatcagagggttggagaaaccttccatgcatcacagccctcactcactgtagatggctttacagacccatcaaattcagagaggttctgcttaggtttactctccaatgttaaccgaaatgccacggtagaaatgacaagaaggcatataggaagaggagtgcgcttatactacataggtggggaagtttttgctgagtgcctaagtgatagtgcaatctttgtgcagagccccaattgtaatcagagatatggctggcaccctgcaacagtgtgtaaaattccaccaggctgtaatctgaagatcttcaacaaccaggaatttgctgctcttctggctcagtctgttaatcagggttttgaagccgtctatcagctaactagaatgtgcaccataagaatgagttttgtgaaagggtggggagcagaataccgaaggcagacggtaacaagtactccttgctggattgaacttcatctgaatggacctctacagtggttggacaaagtattaactcagatgggatccccttcagtgcgttgctcaagcatgtcatagtaatgaactagtccgtaacttgaaagtatttcgatttcttggctttatatatcttgtggaaaggacgaccctacttgcctgcttgtaagccg

SEQ ID NO: 203 - DNA, 794 bp, Homo sapiens
  source 1..794: mol_type = genomic DNA
accgccaccatgaaccacagcatggacgcaggttctccaaacctatccccgaatccgatgtccccagcacataataacttggacctgcagccagttacctactgcgagccggccttctggtgctccatctcctactacgagctgaaccagcgcgtcggggagacattccacgcctcgcagccatccatgactgtggatggcttcaccgacccctccaattcggagcgcttctgcctagggctgctctccaatgtcaacaggaatgcagcagtggagctgacacggagacacatcggaagaggcgtgcggctctactacatcggaggggaggtcttcgcagagtgcctcagtgacagcgctatttttgtccagtctcccaactgtaaccagcgctatggctggcacccggccaccgtctgcaagatcccaccaggatgcaacctgaagatcttcaacaaccaggagttcgctgccctcctggcccagtcggtcaaccagggctttgaggctgtctaccagttgacccgaatgtgcaccatccgcatgagcttcgtcaaaggctggggagcggagtacaggagacagactgtgaccagtaccccctgctggattgagctgcacctgaatgggcctttgcagtggcttgacaaggtcctcacccagatgggctccccaagcatccgctgttccagtgtgtcttagtaatgaactagtccgtaacttgaaagtatttcgatttcttggctttatatatcttgtggaaaggacgatttaaccacgacgagttatccgaa

SEQ ID NO: 204 - DNA, 1064 bp, Homo sapiens
  source 1..1064: mol_type = genomic DNA
accgccaccatggagctgtgtgagttcgccttcaatatgaagaaggacgaggtctgcgtgaatccctaccactaccagagagtagagacaccagttctacctcctgtgttggtgccacgccacacagagatcccggccgagttccccccactggacgactacagccattccatccccgaaaacactaacttccccgcaggcatcgagccccagagcaatattccagagaccccaccccctggctacctgagtgaagatggagaaaccagtgaccaccagatgaaccacagcatggacgcaggttctccaaacctatccccgaatccgatgtccccagcacataataacttggacctgcagccagttacctactgcgagccggccttctggtgctccatctcctactacgagctgaaccagcgcgtcggggagacattccacgcctcgcagccatccatgactgtggatggcttcaccgacccctccaattcggagcgcttctgcctagggctgctctccaatgtcaacaggaatgcagcagtggagctgacacggagacacatcggaagaggcgtgcggctctactacatcggaggggaggtcttcgcagagtgcctcagtgacagcgctatttttgtccagtctcccaactgtaaccagcgctatggctggcacccggccaccgtctgcaagatcccaccaggatgcaacctgaagatcttcaacaaccaggagttcgctgccctcctggcccagtcggtcaaccagggctttgaggctgtctaccagttgacccgaatgtgcaccatccgcatgagcttcgtcaaaggctggggagcggagtacaggagacagactgtgaccagtaccccctgctggattgagctgcacctgaatgggcctttgcagtggcttgacaaggtcctcacccagatgggctccccaagcatccgctgttccagtgtgtcttagtaatgaactagtccgtaacttgaaagtatttcgatttcttggctttatatatcttgtggaaaggacgaagtgtgccggaataattgactacg

SEQ ID NO: 205 - DNA, 1247 bp, Homo sapiens
  source 1..1247: mol_type = genomic DNA
accgccaccatgtcttgcctgcaccctaggcaaacgtggaaaggcgcagctctggtacaccggaaagcatggtggatggggaggtccctggatggccggttgcaggtgtcccatcggaaggggctccctcatgtcatctactgccgcctgtggcgatggccagacctgcacagccaccacgagctacgggccatggagctgtgtgagttcgccttcaatatgaagaaggacgaggtctgcgtgaatccctaccactaccagagagtagagacaccagttctacctcctgtgttggtgccacgccacacagagatcccggccgagttccccccactggacgactacagccattccatccccgaaaacactaacttccccgcaggcatcgagccccagagcaatattccagagaccccaccccctggctacctgagtgaagatggagaaaccagtgaccaccagatgaaccacagcatggacgcaggttctccaaacctatccccgaatccgatgtccccagcacataataacttggacctgcagccagttacctactgcgagccggccttctggtgctccatctcctactacgagctgaaccagcgcgtcggggagacattccacgcctcgcagccatccatgactgtggatggcttcaccgacccctccaattcggagcgcttctgcctagggctgctctccaatgtcaacaggaatgcagcagtggagctgacacggagacacatcggaagaggcgtgcggctctactacatcggaggggaggtcttcgcagagtgcctcagtgacagcgctatttttgtccagtctcccaactgtaaccagcgctatggctggcacccggccaccgtctgcaagatcccaccaggatgcaacctgaagatcttcaacaaccaggagttcgctgccctcctggcccagtcggtcaaccagggctttgaggctgtctaccagttgacccgaatgtgcaccatccgcatgagcttcgtcaaaggctggggagcggagtacaggagacagactgtgaccagtaccccctgctggattgagctgcacctgaatgggcctttgcagtggcttgacaaggtcctcacccagatgggctccccaagcatccgctgttccagtgtgtcttagtaatgaactagtccgtaacttgaaagtatttcgatttcttggctttatatatcttgtggaaaggacgagggacttactcggtgactgtgccg

SEQ ID NO: 206 - DNA, 2348 bp, Homo sapiens
  source 1..2348: mol_type = genomic DNA
accgccaccatgaaaactagcccccgtcggccactgattctcaaaagacggaggctgccccttcctgttcaaaatgccccaagtgaaacatcagaggaggaacctaagagatcccctgcccaacaggagtctaatcaagcagaggcctccaaggaagtggcagagtccaactcttgcaagtttccagctgggatcaagattattaaccaccccaccatgcccaacacgcaagtagtggccatccccaacaatgctaatattcacagcatcatcacagcactgactgccaagggaaaagagagtggcagtagtgggcccaacaaattcatcctcatcagctgtgggggagccccaactcagcctccaggactccggcctcaaacccaaaccagctatgatgccaaaaggacagaagtgaccctggagaccttgggaccaaaacctgcagctagggatgtgaatcttcctagaccacctggagccctttgcgagcagaaacgggagacctgtgatggtgaggcagcaggctgcactatcaacaatagcctatccaacatccagtggcttcgaaagatgagttctgatggactgggctcccgcagcatcaagcaagagatggaggaaaaggagaattgtcacctggagcagcgacaggttaaggttgaggagccttcgagaccatcagcgtcctggcagaactctgtgtctgagcggccaccctactcttacatggccatgatacaattcgccatcaacagcactgagaggaagcgcatgactttgaaagacatctatacgtggattgaggaccactttccctactttaagcacattgccaagccaggctggaagaactccatccgccacaacctttccctgcacgacatgtttgtccgggagacgtctgccaatggcaaggtctccttctggaccattcaccccagtgccaaccgctacttgacattggaccaggtgtttaagcagcagcagaaacgaccgaatccagagctccgccggaacatgaccatcaaaaccgaactccccctgggcgcacggcggaagatgaagccactgctaccacgggtcagctcatacctggtacctatccagttcccggtgaaccagtcactggtgttgcagccctcggtgaaggtgccattgcccctggcggcttccctcatgagctcagagcttgcccgccatagcaagcgagtccgcattgcccccaaggtgctgctagctgaggaggggatagctcctctttcttctgcaggaccagggaaagaggagaaactcctgtttggagaagggttttctcctttgcttccagttcagactatcaaggaggaagaaatccagcctggggaggaaatgccacacttagcgagacccatcaaagtggagagccctcccttggaagagtggccctccccggccccatctttcaaagaggaatcatctcactcctgggaggattcgtcccaatctcccaccccaagacccaagaagtcctacagtgggcttaggtccccaacccggtgtgtctcggaaatgcttgtgattcaacacagggagaggagggagaggagccggtctcggagaaaacagcatctactgcctccctgtgtggatgagccggagctgctcttctcagaggggcccagtacttcccgctgggccgcagagctcccgttcccagcagactcctctgaccctgcctcccagctcagctactcccaggaagtgggaggaccttttaagacacccattaaggaaacgctgcccatctcctccaccccgagcaaatctgtcctccccagaacccctgaatcctggaggctcacgcccccagccaaagtagggggactggatttcagcccagtacaaacctcccagggtgcctctgaccccttgcctgaccccctggggctgatggatctcagcaccactcccttgcaaagtgctcccccccttgaatcaccgcaaaggctcctcagttcagaacccttagacctcatctccgtcccctttggcaactcttctccctcagatatagacgtccccaagccaggctccccggagccacaggtttctggccttgcagccaatcgttctctgacagaaggcctggtcctggacacaatgaatgacagcctcagcaagatcctgctggacatcagctttcctggcctggacgaggacccactgggccctgacaacatcaactggtcccagtttattcctgagctacagtagtaatgaactagtccgtaacttgaaagtatttcgatttcttggctttatatatcttgtggaaaggacgacacggttggttccacaaatctggg

SEQ ID NO: 207 - DNA, 2348 bp, Homo sapiens
  source 1..2348: mol_type = genomic DNA
accgccaccatgaaaactagcccccgtcggccactgattctcaaaagacggaggctgccccttcctgttcaaaatgccccaagtgaaacatcagaggaggaacctaagagatcccctgcccaacaggagtctaatcaagcagaggcctccaaggaagtggcagagtccaactcttgcaagtttccagctgggatcaagattattaaccaccccaccatgcccaacacgcaagtagtggccatccccaacaatgctaatattcacagcatcatcacagcactgactgccaagggaaaagagagtggcagtagtgggcccaacaaattcatcctcatcagctgtgggggagccccaactcagcctccaggactccggcctcaaacccaaaccagctatgatgccaaaaggacagaagtgaccctggagaccttgggaccaaaacctgcagctagggatgtgaatcttcctagaccacctggagccctttgcgagcagaaacgggagacctgtgcagatggtgaggcagcaggctgcactatcaacaatagcctatccaacatccagtggcttcgaaagatgagttctgatggactgggctcccgcagcatcaagcaagagatggaggaaaaggagaattgtcacctggagcagcgacaggttaaggttgaggagccttcgagaccatcagcgtcctggcagaactctgtgtctgagcggccaccctactcttacatggccatgatacaattcgccatcaacagcactgagaggaagcgcatgactttgaaagacatctatacgtggattgaggaccactttccctactttaagcacattgccaagccaggctggaagaactccatccgccacaacctttccctgcacgacatgtttgtccgggagacgtctgccaatggcaaggtctccttctggaccattcaccccagtgccaaccgctacttgacattggaccaggtgtttaagcagcagaaacgaccgaatccagagctccgccggaacatgaccatcaaaaccgaactccccctgggcgcacggcggaagatgaagccactgctaccacgggtcagctcatacctggtacctatccagttcccggtgaaccagtcactggtgttgcagccctcggtgaaggtgccattgcccctggcggcttccctcatgagctcagagcttgcccgccatagcaagcgagtccgcattgcccccaaggtgctgctagctgaggaggggatagctcctctttcttctgcaggaccagggaaagaggagaaactcctgtttggagaagggttttctcctttgcttccagttcagactatcaaggaggaagaaatccagcctggggaggaaatgccacacttagcgagacccatcaaagtggagagccctcccttggaagagtggccctccccggccccatctttcaaagaggaatcatctcactcctgggaggattcgtcccaatctcccaccccaagacccaagaagtcctacagtgggcttaggtccccaacccggtgtgtctcggaaatgcttgtgattcaacacagggagaggagggagaggagccggtctcggagaaaacagcatctactgcctccctgtgtggatgagccggagctgctcttctcagaggggcccagtacttcccgctgggccgcagagctcccgttcccagcagactcctctgaccctgcctcccagctcagctactcccaggaagtgggaggaccttttaagacacccattaaggaaacgctgcccatctcctccaccccgagcaaatctgtcctccccagaacccctgaatcctggaggctcacgcccccagccaaagtagggggactggatttcagcccagtacaaacctcccagggtgcctctgaccccttgcctgaccccctggggctgatggatctcagcaccactcccttgcaaagtgctcccccccttgaatcaccgcaaaggctcctcagttcagaacccttagacctcatctccgtcccctttggcaactcttctccctcagatatagacgtccccaagccaggctccccggagccacaggtttctggccttgcagccaatcgttctctgacagaaggcctggtcctggacacaatgaatgacagcctcagcaagatcctgctggacatcagctttcctggcctggacgaggacccactgggccctgacaacatcaactggtcccagtttattcctgagctacagtagtaatgaactagtccgtaacttgaaagtatttcgatttcttggctttatatatcttgtggaaaggacgaccattcaacccagcgtcagtccaa

SEQ ID NO: 208 - DNA, 2507 bp, Homo sapiens
  source 1..2507: mol_type = genomic DNA
accgccaccatgaaaactagcccccgtcggccactgattctcaaaagacggaggctgccccttcctgttcaaaatgccccaagtgaaacatcagaggaggaacctaagagatcccctgcccaacaggagtctaatcaagcagaggcctccaaggaagtggcagagtccaactcttgcaagtttccagctgggatcaagattattaaccaccccaccatgcccaacacgcaagtagtggccatccccaacaatgctaatattcacagcatcatcacagcactgactgccaagggaaaagagagtggcagtagtgggcccaacaaattcatcctcatcagctgtgggggagccccaactcagcctccaggactccggcctcaaacccaaaccagctatgatgccaaaaggacagaagtgaccctggagaccttgggaccaaaacctgcagctagggatgtgaatcttcctagaccacctggagccctttgcgagcagaaacgggagacctgtgcagatggtgaggcagcaggctgcactatcaacaatagcctatccaacatccagtggcttcgaaagatgagttctgatggactgggctcccgcagcatcaagcaagagatggaggaaaaggagaattgtcacctggagcagcgacaggttaaggttgaggagccttcgagaccatcagcgtcctggcagaactctgtgtctgagcggccaccctactcttacatggccatgatacaattcgccatcaacagcactgagaggaagcgcatgactttgaaagacatctatacgtggattgaggaccactttccctactttaagcacattgccaagccaggctggaagaactccatccgccacaacctttccctgcacgacatgtttgtccgggagacgtctgccaatggcaaggtctccttctggaccattcaccccagtgccaaccgctacttgacattggaccaggtgtttaagccactggacccagggtctccacaattgcccgagcacttggaatcacagcagaaacgaccgaatccagagctccgccggaacatgaccatcaaaaccgaactccccctgggcgcacggcggaagatgaagccactgctaccacgggtcagctcatacctggtacctatccagttcccggtgaaccagtcactggtgttgcagccctcggtgaaggtgccattgcccctggcggcttccctcatgagctcagagcttgcccgccatagcaagcgagtccgcattgcccccaaggtttttggggaacaggtggtgtttggttacatgagtaagttctttagtggcgatctgcgagattttggtacacccatcaccagcttgtttaattttatctttctttgtttatcagtgctgctagctgaggaggggatagctcctctttcttctgcaggaccagggaaagaggagaaactcctgtttggagaagggttttctcctttgcttccagttcagactatcaaggaggaagaaatccagcctggggaggaaatgccacacttagcgagacccatcaaagtggagagccctcccttggaagagtggccctccccggccccatctttcaaagaggaatcatctcactcctgggaggattcgtcccaatctcccaccccaagacccaagaagtcctacagtgggcttaggtccccaacccggtgtgtctcggaaatgcttgtgattcaacacagggagaggagggagaggagccggtctcggagaaaacagcatctactgcctccctgtgtggatgagccggagctgctcttctcagaggggcccagtacttcccgctgggccgcagagctcccgttcccagcagactcctctgaccctgcctcccagctcagctactcccaggaagtgggaggaccttttaagacacccattaaggaaacgctgcccatctcctccaccccgagcaaatctgtcctccccagaacccctgaatcctggaggctcacgcccccagccaaagtagggggactggatttcagcccagtacaaacctcccagggtgcctctgaccccttgcctgaccccctggggctgatggatctcagcaccactcccttgcaaagtgctcccccccttgaatcaccgcaaaggctcctcagttcagaacccttagacctcatctccgtcccctttggcaactcttctccctcagatatagacgtccccaagccaggctccccggagccacaggtttctggccttgcagccaatcgttctctgacagaaggcctggtcctggacacaatgaatgacagcctcagcaagatcctgctggacatcagctttcctggcctggacgaggacccactgggccctgacaacatcaactggtcccagtttattcctgagctacagtagtaatgaactagtccgtaacttgaaagtatttcgatttcttggctttatatatcttgtggaaaggacgaagcacatcggatttaccggaatcc

SEQ ID NO: 209 - DNA, 3401 bp, Homo sapiens
  source 1..3401: mol_type = genomic DNA
accgccaccatgaacctccaggcccagcccaaggctcagaacaagcggaagcgttgcctcttcgggggccaggaaccagctcccaaggagcagccccctcccctgcagcccccccagcagtccatcagagtgaaggaggagcagtacctcgggcacgagggtccaggaggggcagtctccacctctcagcctgtggaactgccccctcctagcagcctggccctgctgaactctgtggtatatgggcctgagcggacctcagcagccatgctgtcccagcaggtggcctcagtaaagtggcccaactctgtgatggctccagggcggggcccggagcgtggaggaggtgggggtgtcagtgacagcagctggcagcagcagccaggccagcctccaccccattcaacatggaactgccacagtctgtccctctacagtgcaaccaaggggagcccgcatcctggagtgggagtcccgacttactataaccaccctgaggcactgaagcgggagaaagcggggggcccacagctggaccgctatgtgcgaccaatgatgccacagaaggtgcagctggaggtagggcggccccaggcacccctgaattctttccacgcagccaagaaacccccaaaccagtcactgcccctgcaacccttccagctggcattcggccaccaggtgaaccggcaggtcttccggcagggcccaccgcccccaaacccggtggctgccttccctccacagaagcagcagcagcagcagcaaccacagcagcagcagcagcagcagcaggcagccctaccccagatgccgctctttgagaacttctattccatgccgcagcaaccctcgcagcaaccccaggactttggcctgcagccagctgggccactgggacagtcccacctggctcaccacagcatggcaccctaccccttcccccccaacccagatatgaacccagaactgcgcaaggcccttctgcaggactcagccccgcagccagcgctacctcaggtccagatccccttcccccgccgctcccgccgcctctctaaggagggtatcctgcctcccagcgccctggatggggctggcacccagcctgggcaggaggccactggcaacctgttcctacatcactggcccctgcagcagccgccacctggctccctggggcagccccatcctgaagctctgggattcccgctggagctgagggagtcgcagctactgcctgatggggagagactagcacccaatggccgggagcgagaggctcctgccatgggcagcgaggagggcatgagggcagtgagcacaggggactgtgggcaggtgctacggggcggagtgatccagagcacgcgacggaggcgccgggcatcccaggaggccaatttgctgaccctggcccagaaggctgtggagctggcctcactgcagaatgcaaaggatggcagtggttctgaagagaagcggaaaagtgtattggcctcaactaccaagtgtggggtggagttttctgagccttccttagccaccaagcgagcacgagaagacagtgggatggtacccctcatcatcccagtgtctgtgcctgtgcgaactgtggacccaactgaggcagcccaggctggaggtcttgatgaggacgggaagggtcctgaacagaaccctgctgagcacaagccatcagtcatcgtcacccgcaggcggtccacccgaatccccgggacagatgctcaagctcaggcagaggacatgaatgtcaagttggagggggagccttccgtgcggaaaccaaagcagcggcccaggcccgagcccctcatcatccccaccaaggcgggcactttcatcgcccctcccgtctactccaacatcaccccataccagagccacctgcgctctcccgtgcgcctagctgaccacccctctgagcggagctttgagctacctccctacacgccgccccccatcctcagccctgtgcgggaaggctctggcctctacttcaatgccatcatatcaaccagcaccatccctgcccctcctcccatcacgcctaagagtgcccatcgcacgctgctccggactaacagtgctgaagtaaccccgcctgtcctctctgtgatgggggaggccaccccagtgagcatcgagccacggatcaacgtgggctcccggttccaggcagaaatccccttgatgagggaccgtgccctggcagctgcagatccccacaaggctgacttggtgtggcagccatgggaggacctagagagcagccgggagaagcagaggcaagtggaagacctgctgacagccgcctgctccagcattttccctggtgctggcaccaaccaggagctggccctgcactgtctgcacgaatccagaggagacatcctggaaacgctgaataagctgctgctgaagaagcccctgcggccccacaaccatccgctggcaacttatcactacacaggctctgaccagtggaagatggccgagaggaagctgttcaacaaaggcattgccatctacaagaaggatttcttcctggtgcagaagctgatccagaccaagaccgtggcccagtgcgtggagttctactacacctacaagaagcaggtgaaaatcggccgcaatgggactctaacctttggggatgtggatacgagcgatgagaagtcggcccaggaagaggttgaagtggatattaagacttcccaaaagttcccaagggtgcctcttcccagaagagagtccccaagtgaagagaggctggagcccaagagggaggtgaaggagcccaggaaggagggggaggaggaggtgccagagatccaagagaaggaggagcaggaagaggggcgagagcgcagcaggcgggcagcggcagtcaaagccacgcagacactacaggccaatgagtcggccagtgacatcctcatcctccggagccacgagtccaacgcccctgggtctgccggtggccaggcctcggagaagccaagggaagggacagggaagtcacgaagggcactacctttttcagagaagaagaaaaaaacagagacattcagtaagacccagaatcaggagaacactttcccctgtaaaaaatgtggcagggtgttttacaaggtgaagagccgcagtgcgcatatgaagagccacgcagagcaggagaagaaggctgcagcgctgaggctgaaggagaaagaggccgctgctgccgccgccgccgcccaccagcaggccctgcgggaggagagcggtgcgggcgacaagggctagtaatgaactagtccgtaacttgaaagtatttcgatttcttggctttatatatcttgtggaaaggacgacatagcgagtatcaaccctacaga

SEQ ID NO: 210 - DNA, 3239 bp, Homo sapiens
  source 1..3239: mol_type = genomic DNA
accgccaccatgaacctccaggcccagcccaaggctcagaacaagcggaagcgttgcctcttcgggggccaggaaccagctcccaaggagcagccccctcccctgcagcccccccagcagtccatcagagtgaaggaggagcagtacctcgggcacgagggtccaggaggggcagtctccacctctcagcctgtggaactgccccctcctagcagcctggccctgctgaactctgtggtatatgggcctgagcggacctcagcagccatgctgtcccagcaggtggcctcagtaaagtggcccaactctgtgatggctccagggcggggcccggagcgtggaggaggtgggggtgtcagtgacagcagctggcagcagcagccaggccagcctccaccccattcaacatggaactgccacagtctgtccctctacagtgcaaccaaggggagcccgcatcctggagtgggagtcccgacttactataaccaccctgaggcactgaagcgggagaaagcggggggcccacagctggaccgctatgtgcgaccaatgatgccacagaaggtgcagctggaggtagggcggccccaggcacccctgaattctttccacgcagccaagaaacccccaaaccagtcactgcccctgcaacccttccagctggcattcggccaccaggtgaaccggcaggtcttccggcagggcccaccgcccccaaacccggtggctgccttccctccacagaagcagcagcagcagcagcaaccacagcagcagcagcagcagcagcaggcagccctaccccagatgccgctctttgagaacttctattccatgccgcagcaaccctcgcagcaaccccaggactttggcctgcagccagctgggccactgggacagtcccacctggctcaccacagcatggcaccctaccccttcccccccaacccagatatgaacccagaactgcgcaaggcccttctgcaggactcagccccgcagccagcgctacctcaggtccagatccccttcccccgccgctcccgccgcctctctaaggagggtatcctgcctcccagcgccctggatggggctggcacccagcctgggcaggaggccactggcaacctgttcctacatcactggcccctgcagcagccgccacctggctccctggggcagccccatcctgaagctctgggattcccgctggagctgagggagtcgcagctactgcctgatggggagagactagcacccaatggccgggagcgagaggctcctgccatgggcagcgaggagggcatgagggcagtgagcacaggggactgtgggcaggtgctacggggcggagtgatccagagcacgcgacggaggcgccgggcatcccaggaggccaatttgctgaccctggcccagaaggctgtggagctggcctcactgcagaatgcaaaggatggcagtggttctgaagagaagcggaaaagtgtattggcctcaactaccaagtgtggggtggagttttctgagccttccttagccaccaagcgagcacgagaagacagtgggatggtacccctcatcatcccagtgtctgtgcctgtgcgaactgtggacccaactgaggcagcccaggctggaggtcttgatgaggacgggaagggtcctgaacagaaccctgctgagcacaagccatcagtcatcgtcacccgcaggcggtccacccgaatccccgggacagatgctcaagctcaggcagaggacatgaatgtcaagttggagggggagccttccgtgcggaaaccaaagcagcggcccaggcccgagcccctcatcatccccaccaaggcgggcactttcatcgcccctcccgtctactccaacatcaccccataccagagccacctgcgctctcccgtgcgcctagctgaccacccctctgagcggagctttgagctacctccctacacgccgccccccatcctcagccctgtgcgggaaggctctggcctctacttcaatgccatcatatcaaccagcaccatccctgcccctcctcccatcacgcctaagagtgcccatcgcacgctgctccggactaacagtgctgaagtaaccccgcctgtcctctctgtgatgggggaggccaccccagtgagcatcgagccacggatcaacgtgggctcccggttccaggcagaaatccccttgatgagggaccgtgccctggcagctgcagatccccacaaggctgacttggtgtggcagccatgggaggacctagagagcagccgggagaagcagaggcaagtggaagacctgctgacagccgcctgctccagcattttccctggtgctggcaccaaccaggagctggccctgcactgtctgcacgaatccagaggagacatcctggaaacgctgaataagctgctgctgaagaagcccctgcggccccacaaccatccgctggcaacttatcactacacaggctctgaccagtggaagatggccgagaggaagctgttcaacaaaggcattgccatctacaagaaggatttcttcctggtgcagaagctgatccagaccaagaccgtggcccagtgcgtggagttctactacacctacaagaagcaggtgaaaatcggccgcaatgggactctaacctttggggatgtggatacgagcgatgagaagtcggcccaggaagaggttgaagtggatattaagacttcccaaaagttcccaagggtgcctcttcccagaagagagtccccaagtgaagagaggctggagcccaagagggaggtgaaggagcccaggaaggagggggaggaggaggtgccagagatccaagagaaggaggagcaggaagaggggcgagagcgcagcaggcgggcagcggcagtcaaagccacgcagacactacaggccaatgagtcggccagtgacatcctcatcctccggagccacgagtccaacgcccctgggtctgccggtggccaggcctcggagaagccaagggaagggacagggaagtcacgaagggcactacctttttcagagaagaagaaaaaaacagagacattcagtaagacccagaatcaggagaacactttcccctgtaaaaaatgtggcaggtagtaatgaactagtccgtaacttgaaagtatttcgatttcttggctttatatatcttgtggaaaggacgatgaagctcacggtataaaggtcgc

SEQ ID NO: 211 - DNA, 941 bp, Homo sapiens
  source 1..941: mol_type = genomic DNA
accgccaccatgcactgccacgccgagctgaggctgagctcgcccggccagctcaaagcagccaggcggcgctacaagactttcatgatcgacgagatcctctccaaggagacctgcgattactttgagaaactttccctctactccgtgtgcccgtcgctggtcgtgcgacccaagcccctgcattcctgtacgggctccccttccctgcgggcatatccgctcctctcggtgatcacccgccagcccactgtcatctcccacctggtccctgccaccccgggaatcgcccaggcactgtcctgccaccaggtcaccgaggcggtctctgctgaggccccagggggcgaggccctagccagcagcgagtcagagacggaacagcccacgccccgacagaagaagccccgccggagtcgcaccatcttcaccgagctgcagctcatgggcctggagaagaaattccagaagcagaagtatttgtcaaccccagacaggttggacttggctcagtctctgggactcactcagctgcaggtgaagacctggtatcagaatcgcaggatgaaatggaagaaaatggttcttaaaggtggacaggaagcacccacaaaacccaaaggtcgccccaagaagaactccatccccacatcagaagagattgaagctgaagagaagatgaacagccaggcccagggtcaggagcagctggagccctctcaggggcaggaggagctctgtgaagcacaggaaccgaaagcacgtgatgtccccttagagatggcagagccaccagacccgccccaggagttgccaataccctcttcggaacccccaccattaagctagtaatgaactagtccgtaacttgaaagtatttcgatttcttggctttatatatcttgtggaaaggacgaaagtccgcttaatgcattactcat

SEQ ID NO: 212 - DNA, 866 bp, Homo sapiens
  source 1..866: mol_type = genomic DNA
accgccaccatgcagcggccgggggagccgggcgccgcgcgcttcggcccgcccgagggctgcgcggaccaccggccgcaccgctatcgcagcttcatgattgaggagatcctcacggagccacccgggcccaagggcgccgcgcccgcagccgccgctgccgcggcgggcgagctgctgaagttcggcgtgcaggcgctgctggcggcgcggcccttccacagccacctggccgtgctgaaggccgagcaggcggcggtgttcaagttcccactggcgccgctgggctgttcagggctgagctctgcgttgctggcggcagggcccgggctgcccggcgccgcgggtgcgccacacctgccgctcgagttgcagctccgcgggaagctggaggcggcaggccctggggagccaggcaccaaagccaagaaggggcgtcggagccgcactgtgttcaccgagctgcagctgatgggcctggagaaacgcttcgagaagcagaagtacctttccacgccggacagaatagatcttgctgagtccctgggcctgagccagttgcaggtgaagacgtggtaccagaatcggaggatgaagtggaagaaaatagtgctgcagggcggcggcctggagtctcccaccaagcccaaggggcggcccaagaagaactcaattccaacgagcgagcagcttactgagcaggagcgcgccaaggatgcagagaaaccggcggaggtgccgggcgagcccagcgacaggagccgcgaggactagtaatgaactagtccgtaacttgaaagtatttcgatttcttggctttatatatcttgtggaaaggacgataccggctttgggtactataatcg

SEQ ID NO: 213 - DNA, 1073 bp, Homo sapiens
  source 1..1073: mol_type = genomic DNA
accgccaccatggactcggacgccagcctggtgtccagccgcccgtcgtcgccagagcccgatgacctttttctgccggcccggagtaagggcagcagcggcagcgccttcactgggggcaccgtgtcctcgtccaccccgagtgactgcccgccggagctgagcgccgagctgcgcggcgctatgggctctgcgggcgcgcatcctggggacaagctaggaggcagtggcttcaagtcatcctcgtccagcacctcgtcgtctacgtcgtcggcggctgcgtcgtccaccaagaaggacaagaagcaaatgacagagccggagctgcagcagctgcgtctcaagatcaacagccgcgagcgcaagcgcatgcacgacctcaacatcgccatggatggcctccgcgaggtcatgccgtacgcacacggcccttcggtgcgcaagctttccaagatcgccacgctgctgctggcgcgcaactacatcctcatgctcaccaactcgctggaggagatgaagcgactggtgagcgagatctacgggggccaccacgctggcttccacccgtcggcctgcggcggcctggcgcactccgcgcccctgcccgccgccaccgcgcacccggcagcagcagcgcacgccgcacatcaccccgcggtgcaccaccccatcctgccgcccgccgccgcagcggctgctgccgccgctgcagccgcggctgtgtccagcgcctctctgcccggatccgggctgccgtcggtcggctccatccgtccaccgcacggcctactcaagtctccgtctgctgccgcggccgccccgctggggggcgggggcggcggcagtggggcgagcgggggcttccagcactggggcggcatgccctgcccctgcagcatgtgccaggtgccgccgccgcaccaccacgtgtcggctatgggcgccggcagcctgccgcgcctcacctccgacgccaagtagtaatgaactagtccgtaacttgaaagtatttcgatttcttggctttatatatcttgtggaaaggacgacttgcctgtatgcgggccctggcc

SEQ ID NO: 214 - DNA, 917 bp, Homo sapiens
  source 1..917: mol_type = genomic DNA
accgccaccatgtactatgcggtttcccaggcgcgcgtgaacgcggtccccgggaccatgctgcggccacagcggcccggagacttgcagctcggggcctccctctacgagctggtgggctacaggcagccgccctcctcctcctcctcctccacctcctccacctcctccacttcctcctcctccacgacggcccccctcctccccaaggctgcgcgcgagaagccggaggcgccggccgagcctccaggccccgggcccgggtcaggcgcgcacccgggcggcagcgcccggccggacgccaaggaggagcagcagcagcagctgcggcgcaagatcaacagccgcgagcggaagcgcatgcaggacctgaacctggccatggacgccctgcgcgaggtcatcctgccctactcagcggcgcactgccagggcgcgcccggccgcaagctctccaagatagccacgctgctgctcgcccgcaactacatcctactgctgggcagctcgctgcaggagctgcgccgcgcgctgggcgagggcgccgggcccgccgcgccgcgcctgctgctggccgggctgcccctgctcgccgccgcgcccggctccgtgctgctggcgcccggcgccgtaggaccccccgacgcgctgcgccccgccaagtacctgtcgctggcgctggacgagccgccgtgcggccagttcgctctccccggcggcggcgcaggcggccccggcctctgcacctgcgccgtgtgcaagttcccgcacctggtcccggccagcctgggcctggccgccgtgcaggcgcaattctccaagtagtaatgaactagtccgtaacttgaaagtatttcgatttcttggctttatatatcttgtggaaaggacgaaacaaatcgaggataacaacttat

SEQ ID NO: 215 - DNA, 5846 bp, Homo sapiens
  source 1..5846: mol_type = genomic DNA
accgccaccatggcggacggaaagggagacgccgccgctgtcgccggggctggggctgaggctccggcggtagcgggagccggagatggagtcgagactgagtccatggttcggggtcatcgccccgtatctccagcgccgggagcctcgggactgcggccgtgtctgtggcagctggagacagagctgagggagcaagaggtgtcggaggtctcatctttgaactactgccggagcttctgccagaccttattgcaatatgcaagcaacaagaatgcatcagaacatattgtgtatcttctggaggtatatcgacttgccatccaaagctttgccagtgcacgtccatacttaactactgaatgtgaagatgtcctcttagtgcttggcagattagtactgagttgtttcgaattactgctttcagtgtctgaaagtgaactgccatgtgaagtctggctaccattccttcagtctctacaggagtcacatgatgcattattggaatttgggaataataacctacaaatattggttcatgttaccaaggaaggggtgtggaaaaacccagttcttcttaaaattctgtctcaacagccagtagaaacggaggaagtcaataaattgattgcacaagaaggaccttcctttctgcaaatgcgaataaaacatttgttgaaatctaactgcatcccccaggctactgctttatcaaaactatgtgcagaatctaaagaaatttcaaatgtgtcatcttttcagcaagcctatatcacatgtttatgttctatgctccctaatgaagatgctattaaggagattgcaaaggtcgactgcaaggaagtactagacatcatttgtaatctggaatctgaggggcaggataacacagcatttgttctttgtacgacttaccttacccagcagctccaaactgcaagtgtatattgttcttgggaactgactcttttttggagtaaactgcaaagaagaattgacccttctttagatacttttttggagcgctgtcgtcagtttggtgtcatagctaaaacgcagcagcatttattttgcctcattagagttatacaaactgaagcacaagatgctggtcttggggtgtcaattttactgtgtgtcagagctcttcaactcagatcaagtgaagatgaggaaatgaaggcatcagtttgtaaaacaattgcctgtcttttaccagaagatttagaagttagacgagcctgtcagcttacagaattcttaattgaacccagtttggatggatttaatatgttagaagaactatatttgcaaccagatcaaaaatttgatgaagaaaatgcaccggttccaaattctcttcgatgtgagctcttactagctttaaaagcccactggccttttgatcctgagttttgggactggaaaactttaaaacgacactgccaccaacttttaggacaagaagcctcagattctgatgatgatttaagtggctatgaaatgtccattaatgacacagatgttttagagtcatttctcagtgactatgatgagggtaaagaagataaacaatatagaagaagagatttgacagatcagcataaggagaaaagagacaaaaaacctattggctcttctgaaagatatcagaggtggcttcagtacaagtttttctgtttgttatgtaagcgggaatgtatagaggctagaattcttcatcattctaagatgcatatggaagatggaatttacacctgtccagtttgtattaaaaaatttaagagaaaagaaatgtttgttcctcatgtgatggagcatgttaaaatgccaccaagcagaagggaccgctctaaaaagaaattactgttaaaaggctctcaaaagggtatttgtcctaagagcccctctgcaatcccagagcaaaaccattcattgaatgaccaagccaaaggagagtctcatgaatatgtcacattcagcaaattagaagattgccacctgcaagacagagatttgtatccatgtcccggtacagactgttcccgtgtgtttaagcaatttaaatacttaagtgtgcatcttaaagctgaacaccaaaataatgatgaaaatgccaagcactacttggatatgaaaaatagaagagagaagtgtacttactgtcgacgacattttatgtctgcttttcaccttcgagagcacgaacaagtgcattgtgggcctcagccttatatgtgtgtatctatagattgctatgctaggtttggatcagtaaatgaactacttaaccataaacaaaagcatgacgatctgcgttacaaatgtgaattaaatggctgtaatattgttttcagtgacttgggacagctttaccaccatgaagcacaacactttagggatgcatcttacacatgcaacttccttggctgtaaaaagttctattactccaaaattgaataccagaatcacctctcaatgcataatgttgaaaattcaaatggagacataaagaaatcagtgaaacttgaggagtctgcaacaggtgaaaagcaagattgtattaatcagccccatctacttaaccaaactgataaatcacatttacctgaagatcttttctgtgcagaatcagctaattctcaaatagatacagaaactgcagaaaacctgaaagaaaacagtgacagtaattctagtgatcagttaagtcatagctcttcagcttcaatgaatgaagagctaattgacacactagatcactctgaaactatgcaggatgtattgttatctaatgagaaagtctttgggccctccagtttaaaagaaaaatgttccagtatggcagtttgttttgacgggactaagtttacctgtggttttgatggctgtggttccacatacaaaaatgcaagaggaatgcagaaacatttacggaaggttcatccataccatttcaagcccaaaaagataaagacgaaagatctgtttccctctttgggtaatgaacataatcagacaactgaaaagttggatgcagaacctaaaccctgctcagatacaaacagtgactccccagatgaaggtctagatcacaatattcacattaaatgtaaacgagaacatcaaggttattcctcagaatcctccatttgtgcttctaaaaggccctgtacagaggataccatgttggaacttctgttacgcttgaaacatttaagcttgaaaaactcaataacacatggatctttctcagggtcattgcaggggtacccatccagtggtgctaagtctcttcagtcagtttcatctatctcagaccttaattttcagaatcaagatgaaaacatgccaagtcagtaccttgcacagttggcggctaagccgtttttctgtgagcttcaaggatgcaaatatgaatttgtgaccagagaggctctgttaatgcattatcttaaaaagcataattattcaaaagaaaaagtccttcagttaaccatgttccaacatcggtattccccatttcagtgtcatatttgccaaaggtcatttacaagaaaaacacaccttaggattcattataaaaataaacatcaaattggcagtgacagagcaactcacaaactattagataatgaaaagtgtgatcatgaaggcccatgttcagtagataggttgaaaggtgattgttctgcagaacttggaggtgatcccagtagtaactctgagaaaccacactgtcatcctaaaaaggatgaatgtagttctgaaacagatttggaatcatcttgtgaagaaacagaaagtaaaacatctgacatttcatcaccaataggcagccatagagaagaacaagaaggaagagagggcagaggtagcaggcgaactgttgctaaaggaaatctgtgttatattttgaataaataccacaaaccattccattgtattcataaaacttgcaactcctcattcaccaatctaaaaggcttaattcgccattacagaactgtacatcagtacaacaaagaacagttatgtttggagaaagacaaagcaagaaccaaaagggaacttgtcaaatgtaaaaagatatttgcttgcaaatataaggaatgtaataaacgcttcctgtgttccaaagctcttgctaagcactgtagtgattctcataacctagaccatattgaagagcctaaagtactttccgaagctggatctgcagcaaggttttcttgtaaccagcctcagtgccctgctgttttttatacattcaacaagttgaagcaccacttgatggaacagcataatattgaaggggaaatacattcagattatgaaattcattgtgatcttaatggctgtggccagattttcacccatcgcagtaattactcacaacatgtatattaccgacataaagactattatgatgatttgtttagaagccagaaagtagcaaatgagagactactaaggagtgaaaaggtatgtcaaacagctgatactcaggggcatgaacatcagaccaccaggagatcatttaatgctaagtctaaaaaatgtggcttaatcaaagaaaagaaagccccaataagttttaaaaccagagctgaggccctccatatgtgtgtggagcactctgagcacacacagtacccctgcatggttcaaggatgcttatctgtggtgaagttggagagcagcattgtgaggcattacaaacgcactcatcagatgagtagtgcctatttagagcaacagatggagaatcttgttgtttgcgttaagtacggtaccaaaattaaggaggaacccccttctgaagcagatccctgtataaagaaagaagaaaatagaagctgtgaatcagagcgcacagaacacagccattccccgggtgacagtagtgcacccatccagaacactgattgctgtcattcaagtgaaagggatggaggtcagaaagggtgcatagaaagcagctcagtatttgatgcagatactctgctctacaggggaactttgaaatgtaatcatagttccaaaaccacttccctagaacagtgtaatatagttcagcctcctcctccttgtaaaatagaaaattccatacctaatcccaatgggactgaaagtgggacttatttcacaagtttccagctgcctttaccaaggatcaaagaatcagaaactaggcagcatagttcagggcaagaaaacactgtaaaaaatccaacccatgtcccaaaagagaattttaggaaacattcacagccccggtcatttgatttgaagacttacaaacctatgggatttgaatcttcatttctgaaatttattcaggaaagtgaagagaaagaagatgattttgatgattgggagccttcagagcacttaacattaagtaattcttcacagtccagtaatgatttaacagggaatgttgtggcaaataatatggtgaatgacagtgaacctgaagttgacatacctcattcttccagtgactctacaattcatgagaacctgactgcaatcccacctttaatagtagctgaaacaacaacagttccttccttggaaaacctgagggttgtattggacaaagcattaacagactgtggagagcttgccttaaaacagcttcattatcttcggccagtggtggttcttgaaagatctaagttttccacaccaattttagacttatttccaacaaaaaagacagatgagctttgtgtaggaagttcatagtaatgaactagtccgtaacttgaaagtatttcgatttcttggctttatatatcttgtggaaaggacgagcacgggccgtttaaaggatacca

SEQ ID NO: 216 - DNA, 2072 bp, Homo sapiens
  source 1..2072: mol_type = genomic DNA
accgccaccatggagggagatggttcagacccagagcctccagatgccggggaggacagcaagtccgagaatggggagaatgcgcccatctactgcatctgccgcaaaccggacatcaactgcttcatgatcgggtgtgacaactgcaatgagtggttccatggggactgcatccggatcactgagaagatggccaaggccatccgggagtggtactgtcgggagtgcagagagaaagaccccaagctagagattcgctatcggcacaagaagtcacgggagcgggatggcaatgagcgggacagcagtgagccccgggatgagggtggagggcgcaagaggcctgtccctgatccagacctgcagcgccgggcagggtcagggacaggggttggggccatgcttgctcggggctctgcttcgccccacaaatcctctccgcagcccttggtggccacacccagccagcatcaccagcagcagcagcagcagatcaaacggtcagcccgcatgtgtggtgagtgtgaggcatgtcggcgcactgaggactgtggtcactgtgatttctgtcgggacatgaagaagttcgggggccccaacaagatccggcagaagtgccggctgcgccagtgccagctgcgggcccgggaatcgtacaagtacttcccttcctcgctctcaccagtgacgccctcagagtccctgccaaggccccgccggccactgcccacccaacagcagccacagccatcacagaagttagggcgcatccgtgaagatgagggggcagtggcgtcatcaacagtcaaggagcctcctgaggctacagccacacctgagccactctcagatgaggacctacctctggatcctgacctgtatcaggacttctgtgcaggggcctttgatgaccatggcctgccctggatgagcgacacagaagagtccccattcctggaccccgcgctgcggaagagggcagtgaaagtgaagcatgtgaagcgtcgggagaagaagtctgagaagaagaaggaggagcgatacaagcggcatcggcagaagcagaagcacaaggataaatggaaacacccagagagggctgatgccaaggaccctgcgtcactgccccagtgcctggggcccggctgtgtgcgccccgcccagcccagctccaagtattgctcagatgactgtggcatgaagctggcagccaaccgcatctacgagatcctcccccagcgcatccagcagtggcagcagagcccttgcattgctgaagagcacggcaagaagctgctcgaacgcattcgccgagagcagcagagtgcccgcactcgccttcaggaaatggaacgccgattccatgagcttgaggccatcattctacgtgccaagcagcaggctgtgcgcgaggatgaggagagcaacgagggtgacagtgatgacacagacctgcagatcttctgtgtttcctgtgggcaccccatcaacccacgtgttgccttgcgccacatggagcgctgctacgccaagtatgagagccagacgtcctttgggtccatgtaccccacacgcattgaaggggccacacgactcttctgtgatgtgtataatcctcagagcaaaacatactgtaagcggctccaggtgctgtgccccgagcactcacgggaccccaaagtgccagctgacgaggtatgcgggtgcccccttgtacgtgatgtctttgagctcacgggtgacttctgccgcctgcccaagcgccagtgcaatcgccattactgctgggagaagctgcggcgtgcggaagtggacttggagcgcgtgcgtgtgtggtacaagctggacgagctgtttgagcaggagcgcaatgtgcgcacagccatgacaaaccgcgcgggattgctggccctgatgctgcaccagacgatccagcacgatcccctcactaccgacctgcgctccagtgccgaccgctagtaatgaactagtccgtaacttgaaagtatttcgatttcttggctttatatatcttgtggaaaggacgagttggatagagatacatgaacgtg

SEQ ID NO: 217 - DNA, 1574 bp, Homo sapiens
  source 1..1574: mol_type = genomic DNA
accgccaccatgcttgccgctacctgtaataagataggcagccccagcccgtctccctcctccctctcggacagctcttcttccttcggcaaaggcttccacccctggaaacgctcctcgtcctcttcttccgccagctgcaacgtagtgggttccagtctctcaagcttcggcgtgtccggggcctccaggaacggcggctcgtcctcggcggctgcggcggccgcggcagcagccgcggctgccgcggccctggtgtccgactcgttcagctgcggcggctcgcctggctccagcgccttctccctcacctccagcagcgccgcagccgccgccgccgccgccgcagccgccgcctccagctcgcccttcgccaacgactactctgttttccaggcccccggagtttccgggggcagcggcggcggcggcgggggcggcggcggcggctcctccgcgcactcgcaggacggctcccaccagccggtgttcatctccaaggtgcacacctctgtggacgggctgcagggcatctacccgcgggtgggcatggcgcacccgtacgagtcgtggtttaagccctcgcacccgggcctgggtgctgcgggcgaggtgggctcggccggcgcctccagctggtgggacgtgggggccggctggatcgacgtgcagaacccgaacagcgcggctgcgctgcccggctcgctgcaccctgccgccggggggctccaaacctcgctgcactcgccgctcggaggctacaactcggattactcgggcctgagtcactcggccttcagcagcggcgcctcctcgcacctgctcagccccgccgggcagcacctcatggacggcttcaagccagtgctacccggctcctacccggactcggccccgtcgccgctggccggcgcggggggctccatgttgagcgctgggccttcggcgccgctggggggctccccgcgctcctcagctcgccgctactccggccgcgccacctgcgactgccccaactgccaggaggcagagcggctgggccctgccggggcgagcttgcggcgcaagggcctgcacagctgccacatcccgggctgcggcaaggtgtacggcaagacttcgcacctcaaggcgcacctgcgctggcacacgggcgagcggcccttcgtgtgcaactggcttttctgcggcaagcgcttcacgcgctccgacgagctgcagcggcacctgcggacccacaccggcgagaagcgcttcgcctgtccagtttgcaacaagcgcttcatgcgcagcgaccacctcagcaagcacgtgaagacgcacagtggcggcggcggcggcggcggctcggcgggctcgggcagcggcggcaagaagggcagcgacaccgacagcgagcacagcgccgcgggcagcccgccctgccactccccagagctgctgcagccccccgagcccgggcaccgcaacggcctagagtagtaatgaactagtccgtaacttgaaagtatttcgatttcttggctttatatatcttgtggaaaggacgaagcgaccgctcgtcaatgatcagg

SEQ ID NO: 218 - DNA, 1628 bp, Homo sapiens
  source 1..1628: mol_type = genomic DNA
accgccaccatggcaacttcacttctaggggaagaaccgaggttgggatcgactcctctggccatgcttgccgctacctgtaataagataggcagccccagcccgtctccctcctccctctcggacagctcttcttccttcggcaaaggcttccacccctggaaacgctcctcgtcctcttcttccgccagctgcaacgtagtgggttccagtctctcaagcttcggcgtgtccggggcctccaggaacggcggctcgtcctcggcggctgcggcggccgcggcagcagccgcggctgccgcggccctggtgtccgactcgttcagctgcggcggctcgcctggctccagcgccttctccctcacctccagcagcgccgcagccgccgccgccgccgccgcagccgccgcctccagctcgcccttcgccaacgactactctgttttccaggcccccggagtttccgggggcagcggcggcggcggcgggggcggcggcggcggctcctccgcgcactcgcaggacggctcccaccagccggtgttcatctccaaggtgcacacctctgtggacgggctgcagggcatctacccgcgggtgggcatggcgcacccgtacgagtcgtggtttaagccctcgcacccgggcctgggtgctgcgggcgaggtgggctcggccggcgcctccagctggtgggacgtgggggccggctggatcgacgtgcagaacccgaacagcgcggctgcgctgcccggctcgctgcaccctgccgccggggggctccaaacctcgctgcactcgccgctcggaggctacaactcggattactcgggcctgagtcactcggccttcagcagcggcgcctcctcgcacctgctcagccccgccgggcagcacctcatggacggcttcaagccagtgctacccggctcctacccggactcggccccgtcgccgctggccggcgcggggggctccatgttgagcgctgggccttcggcgccgctggggggctccccgcgctcctcagctcgccgctactccggccgcgccacctgcgactgccccaactgccaggaggcagagcggctgggccctgccggggcgagcttgcggcgcaagggcctgcacagctgccacatcccgggctgcggcaaggtgtacggcaagacttcgcacctcaaggcgcacctgcgctggcacacgggcgagcggcccttcgtgtgcaactggcttttctgcggcaagcgcttcacgcgctccgacgagctgcagcggcacctgcggacccacaccggcgagaagcgcttcgcctgtccagtttgcaacaagcgcttcatgcgcagcgaccacctcagcaagcacgtgaagacgcacagtggcggcggcggcggcggcggctcggcgggctcgggcagcggcggcaagaagggcagcgacaccgacagcgagcacagcgccgcgggcagcccgccctgccactccccagagctgctgcagccccccgagcccgggcaccgcaacggcctagagtagtaatgaactagtccgtaacttgaaagtatttcgatttcttggctttatatatcttgtggaaaggacgaaagtaacagttctggaactttaat

SEQ ID NO: 219 - DNA, 1556 bp, Homo sapiens
  source 1..1556: mol_type = genomic DNA
accgccaccatggccacgtctatactcggggaagagccgcgcttcggaacgaccccgttggccatgctggcggcgacctgcaacaagatcggcaacacgagcccgctgacgacgctgccagagtcgagcgccttcgccaaaggcggctttcacccctggaagcgctcctcgtccagctgcaacctcggctccagcctctcgggcttcgcggtggccaccgggggccgtggctcgggcggcctggcgggcggctcgggcgccgccaacagcgccttctgcctggcctccacgtcgcccacgtcgtccgccttcagcagcgactacggcggcctcttctccaactcggcggctgccgcggcggcagcggccggggtgtccccgcaggaggcgggtggccagtcggccttcatttccaaggtgcacacgacggcagccgacgggctgtacccgcgcgtgggcatggcgcacccgtacgagtcctggtacaagtcgggcttccattcgacgctggcggccggcgaggtgaccaacggcgcggcgtcgtcgtggtgggacgtgcacagcagcccgggctcgtggctggaagtgcagaaccccgctggggggctccagagctcgctgcactcgggcgccccccaggcctcgctgcactcgcagctgggcacctacaaccccgacttcagctcgctcacgcactccgccttcagctccacgggcctcggctcctccgccgccgccgcctcccacctgctctccaccagccagcacctgctggcccaggacggcttcaagccggtgttgccctcctattcggactccagcgccgccgtggcagccgccgccgccagcgccatgatatcgggcgccgcggctgccgccgccggggggagctcggcacgctctgcccgccgctactcgggccgcgccacctgcgactgccccaactgccaggaggcggagcggctgggcccggccggggcgagcctgcggcgcaagggcctgcacagctgccacattccgggctgcggcaaggtgtacgggaagacgtcgcacctgaaggcgcacctgcgctggcacacgggcgagcggcccttcgtgtgcaactggctcttctgcggcaagcgcttcacgcgctcggacgagctgcagcggcatctgcggactcacacgggcgagaagcgcttcgcctgtccggtgtgcaacaagcgcttcatgcgcagcgaccacctgagcaaacacattaagacgcacaacgggggcggcgggggcaaaaagggcagcgacagtgacacggacgccagcaacctggagacgccccgttccgaatcccccgacctcatcctgcatgactccggcgtcagtgccgcccgggcggcggcagcggcggcggcggcagcggcggcggcggcggcggcggcctccgcgggaggcaaggaagcagcgtctggccccaacgactcttagtaatgaactagtccgtaacttgaaagtatttcgatttcttggctttatatatcttgtggaaaggacgaaaggagcgcggatatgatcgcaca

SEQ ID NO: 220 - DNA, 704 bp, Homo sapiens
  source 1..704: mol_type = genomic DNA
accgccaccatggctaaaggtgaccccaagaaaccaaagggcaagatgtccgcttatgccttctttgtgcagacatgcagagaagaacataagaagaaaaacccagaggtccctgtcaattttgcggaattttccaagaagtgctctgagaggtggaagacgatgtccgggaaagagaaatctaaatttgatgaaatggcaaaggcagataaagtgcgctatgatcgggaaatgaaggattatggaccagctaagggaggcaagaagaagaaggatcctaatgctcccaaaaggccaccgtctggattcttcctgttctgttcagaattccgccccaagatcaaatccacaaaccccggcatctctattggagacgtggcaaaaaagctgggtgagatgtggaataatttaaatgacagtgaaaagcagccttacatcactaaggcggcaaagctgaaggagaagtatgagaaggatgttgctgactataagtcgaaaggaaagtttgatggtgcaaagggtcctgctaaagttgcccggaaaaaggtggaagaggaagatgaagaagaggaggaggaagaagaggaggaggaggaggaggaggatgaatagtaatgaactagtccgtaacttgaaagtatttcgatttcttggctttatatatcttgtggaaaggacgatttcacaaatcgctcccgagtcct

SEQ ID NO: 221 - DNA, 662 bp, Homo sapiens
  source 1..662: mol_type = genomic DNA
accgccaccatgggaaaagaaatccagctaaagcctaaggcaaatgtctcttcttacgttcactttttgctgaattacagaaacaaattcaaggagcagcagccaaatacctatgttggctttaaagagttctctagaaagtgttcggaaaaatggagatccatctcaaagcatgaaaaggccaaatatgaagccctggccaaactcgacaaagcccgataccaggaagaaatgatgaattatgttggcaagaggaagaaacggagaaagcgggatccccaggaacccagacggcctccatcatccttcctactcttctgccaagaccactatgctcagctgaagagggagaacccgaactggtcggtggtgcaggtggccaaggccacagggaagatgtggtcaacagcgacagacctggagaagcacccttatgagcaaagagtggctctcctgagagctaagtacttcgaggaacttgaactctaccgtaaacaatgtaatgccaggaagaagtaccgaatgtcagctagaaaccggtgcagagggaaaagagtcaggcagagctagtaatgaactagtccgtaacttgaaagtatttcgatttcttggctttatatatcttgtggaaaggacgatctctggatgtttcagcgtagtgc

SEQ ID NO: 222 - DNA, 1592 bp, Homo sapiens
  source 1..1592: mol_type = genomic DNA
accgccaccatggatgacgtccccgccccaacccctgcaccagcaccgcccgccgctgccgcccccagggtcccgtttcactgcagtgaatgtggcaagagcttccgctaccgctcagacctgcggcgccactttgcccggcacacagcgctcaagccccacgcatgtccgcgctgcggcaagggtttcaagcacagcttcaacctagccaaccacctgcgctcgcacaccggggagcggccctaccgctgctctgcctgccccaaggggttccgcgactccaccggcctgctgcaccaccaggtcgtccacactggtgagaaaccctactgctgcctggtctgcgagctccgcttctcctcacgctccagcctgggccgccacctcaagcgccagcaccgtggggttctcccctctcccctgcagcccggccctggcctgcccgccttgagtgcgccctgctccgtctgctgcaatgtggggccctgctcggtgtgcgggggctcaggggccggcggcggagagggccccgagggggcaggcgcgggtctgggcagctgggggctggcagaggcggcagctgcggccgcggcctccttgcccccatttgcgtgcggcgcctgcgcgcggcgcttcgaccacggccgcgagctggcggcccactgggcggcgcacaccgacgtgaagcccttcaagtgcccgcgctgcgagcgcgacttcaacgcgcccgcgctgctggagcggcacaagctgacgcacgacctgcagggcccgggcgcgcccccagcgcaggcctgggccgcggggccaggcgcagggcccgagacggcgggcgaaggcaccgctgcggaggcgggcgacgctcctctggcttcggaccgcaggctgctcctgggccccgcggggggcggcgtgcccaagctcggggggctgctccccgagggcggtggggaggcgcctgcacctgcggcggccgccgagccctcggaagacaccctgtaccagtgcgactgcgggaccttctttgcgtcggccgcggccctggccagtcacctggaggcccactcgggcccggccacctacggctgcggccactgcggggctctgtacgcggcgctggccgccttggaggagcaccggcgggtcagccacggtgagggcggcggggaggaggcggcgaccgccgcccgggaaagggaaccggcgtccggggaacccccgtctggctccggccgcggcaagaagatcttcggctgctccgagtgcgagaagctgttccgctcaccgcgagacctggagcggcacgtgctggtgcacactggcgagaagccgttcccgtgcctggagtgcggcaagttcttccgccacgagtgctacctcaagcgccaccggctgctgcacggcaccgagcggcccttcccttgccacatctgcggcaagggcttcatcacgctcagcaacctctccaggcacctgaagctgcaccggggcatggactagtaatgaactagtccgtaacttgaaagtatttcgatttcttggctttatatatcttgtggaaaggacgattacgcgggcccagcaattccaga

SEQ ID NO: 223 - DNA, 578 bp, Homo sapiens
  source 1..578: mol_type = genomic DNA
accgccaccatggggagaagcccgaggaagattgaccagttttgtaattctagcaacatggtccatggatcagtgacattcagggatgtggccattgacttctctcaggaggagtgggagtgcctgcagcctgatcagaggaccttgtacagggatgtgatgttggagaactacagccacctgatctcactgggaagttccatttctaaaccagatgtaattacgttactagagcaagagaaagagccctggatggttgtaaggaaagaaacaagcagacggtatccagatttggagttaaaatatggacctgagaaagtatctccagaaaatgatacctctgaagtaaatttacccaaacagatttcttcattggcttccaaaccatcttttacagctattcatattcaaaggagaatccattgcagaatctgcattgcatttggttatctctctttagtgtattgtagcctggaaatcctatagtaatgaactagtccgtaacttgaaagtatttcgatttcttggctttatatatcttgtggaaaggacgaacataccctgttctacttcgtgtt

SEQ ID NO: 224 - DNA, 2030 bp, Homo sapiens
  source 1..2030: mol_type = genomic DNA
accgccaccatggtccatggatcagtgacattcagggatgtggccattgacttctctcaggaggagtgggagtgcctgcagcctgatcagaggaccttgtacagggatgtgatgttggagaactacagccacctgatctcactggcaggaagttccatttctaaaccagatgtaattacgttactagagcaagagaaagagccctggatggttgtaaggaaagaaacaagcagacggtatccagatttggagttaaaatatggacctgagaaagtatctccagaaaatgatacctctgaagtaaatttacccaaacaggttataaagcaaataagtacaactcttggcattgaggccttttattttagaaatgactcagaatatagacaatttgagggactacagggatatcaagaaggaaatatcaatcaaaagatgatcagctatgaaaaactgcctactcatactcctcatgcttctcttatttgcaatacacataaaccgtatgaatgtaaggaatgtgggaaatactttagtcgtagtgcaaatcttattcagcatcagagtattcatactggagagaaaccctttgaatgtaaggagtgtgggaaagcctttcgacttcacatacaatttactcgacatcagaaatttcatactggtgagaaaccttttgaatgtaacgaatgtggaaaggcctttagtcttcttaccctgcttaatcgccataagaacattcacacaggtgagaaactgtttgaatgtaaggaatgtgggaagtcctttaatcgtagctcaaaccttgttcaacatcagagtattcattctggtgtaaaaccatatgaatgtaaggagtgtgggaaaggctttaatcgtggtgcacaccttattcagcatcagaaaattcattccaatgagaaaccctttgtatgtaaggaatgtgggatggcctttcgatatcattaccaacttattgaacattgccaaattcatactggtgagaaaccctttgaatgtaaagaatgtggaaaggcgtttactcttctgacaaagcttgttcgacatcagaagattcatactggtgagaaaccctttgaatgcagggaatgtgggaaggcctttagtcttctcaaccagcttaatcgccataagaacattcacacaggtgaaaaaccgtttgaatgtaaggaatgtgggaagtcctttaatcgtagctcaaaccttgttcaacatcagagtattcatgctggtataaaaccatatgaatgtaaggagtgtgggaaaggctttaatcgtggtgcacaccttattcagcatcagaaaattcattccaatgagaaaccttttgtatgtagggaatgtgagatggcctttagatatcattgccaacttattgaacattctcgaattcatactggtgacaagccatttgaatgtcaagactgtgggaaggccttcaatcgtggctcaagccttgttcaacatcagagtattcacactggtgagaagccctatgaatgtaaggagtgtgggaaggcttttagactttacctacaactttcccaacatcagaaaactcacacaggtgaaaaaccatttgaatgtaaggaatgtgggaaattctttcgtcgtggttcaaatcttaatcaacatcgaagtattcatactggaaagaaaccctttgaatgtaaggaatgtgggaaagcctttcgacttcatatgcaccttattcgacatcagaaattgcatactggtgagaaaccctttgaatgtaaggagtgtgggaaagcctttcgacttcatatgcaacttattcgacatcagaaattgcatactggtgagaaaccctttgaatgtaaggaatgtggaaaggtttttagtcttcccacccagcttaatcgccataagaacattcacacaggtgagaaggcatcttagtaatgaactagtccgtaacttgaaagtatttcgatttcttggctttatatatcttgtggaaaggacgattccgccgagatatctactgtaca

SEQ ID NO: 225 - DNA, 2027 bp, Homo sapiens
  source 1..2027: mol_type = genomic DNA
accgccaccatggtccatggatcagtgacattcagggatgtggccattgacttctctcaggaggagtgggagtgcctgcagcctgatcagaggaccttgtacagggatgtgatgttggagaactacagccacctgatctcactgggaagttccatttctaaaccagatgtaattacgttactagagcaagagaaagagccctggatggttgtaaggaaagaaacaagcagacggtatccagatttggagttaaaatatggacctgagaaagtatctccagaaaatgatacctctgaagtaaatttacccaaacaggttataaagcaaataagtacaactcttggcattgaggccttttattttagaaatgactcagaatatagacaatttgagggactacagggatatcaagaaggaaatatcaatcaaaagatgatcagctatgaaaaactgcctactcatactcctcatgcttctcttatttgcaatacacataaaccgtatgaatgtaaggaatgtgggaaatactttagtcgtagtgcaaatcttattcagcatcagagtattcatactggagagaaaccctttgaatgtaaggagtgtgggaaagcctttcgacttcacatacaatttactcgacatcagaaatttcatactggtgagaaaccttttgaatgtaacgaatgtggaaaggcctttagtcttcttaccctgcttaatcgccataagaacattcacacaggtgagaaactgtttgaatgtaaggaatgtgggaagtcctttaatcgtagctcaaaccttgttcaacatcagagtattcattctggtgtaaaaccatatgaatgtaaggagtgtgggaaaggctttaatcgtggtgcacaccttattcagcatcagaaaattcattccaatgagaaaccctttgtatgtaaggaatgtgggatggcctttcgatatcattaccaacttattgaacattgccaaattcatactggtgagaaaccctttgaatgtaaagaatgtggaaaggcgtttactcttctgacaaagcttgttcgacatcagaagattcatactggtgagaaaccctttgaatgcagggaatgtgggaaggcctttagtcttctcaaccagcttaatcgccataagaacattcacacaggtgaaaaaccgtttgaatgtaaggaatgtgggaagtcctttaatcgtagctcaaaccttgttcaacatcagagtattcatgctggtataaaaccatatgaatgtaaggagtgtgggaaaggctttaatcgtggtgcacaccttattcagcatcagaaaattcattccaatgagaaaccttttgtatgtagggaatgtgagatggcctttagatatcattgccaacttattgaacattctcgaattcatactggtgacaagccatttgaatgtcaagactgtgggaaggccttcaatcgtggctcaagccttgttcaacatcagagtattcacactggtgagaagccctatgaatgtaaggagtgtgggaaggcttttagactttacctacaactttcccaacatcagaaaactcacacaggtgaaaaaccatttgaatgtaaggaatgtgggaaattctttcgtcgtggttcaaatcttaatcaacatcgaagtattcatactggaaagaaaccctttgaatgtaaggaatgtgggaaagcctttcgacttcatatgcaccttattcgacatcagaaattgcatactggtgagaaaccctttgaatgtaaggagtgtgggaaagcctttcgacttcatatgcaacttattcgacatcagaaattgcatactggtgagaaaccctttgaatgtaaggaatgtggaaaggtttttagtcttcccacccagcttaatcgccataagaacattcacacaggtgagaaggcatcttagtaatgaactagtccgtaacttgaaagtatttcgatttcttggctttatatatcttgtggaaaggacgaccgcaccgggtgaatactggaaca

SEQ ID NO: 226 - DNA, 2603 bp, Homo sapiens
  source 1..2603: mol_type = genomic DNA
accgccaccatggtccatggatcagtgacattcagggatgtggccattgacttctctcaggaggagtgggagtgcctgcagcctgatcagaggaccttgtacagggatgtgatgttggagaactacagccacctgatatcactgggaagttccatttctaagccagatgtgattacattactagagcaagagaaagagccctggattgttgtaagtaaagaaacaagcagatggtatccagatttggagtcaaaatatggacctgagaaaatatctccagaaaatgatatttttgaaataaatttacccaaacatgttataaagcaaataagtaaaacacttggcctcgaggccttttattttagaaatgactcagaatatagaagtagatttgagggacgacagggacatcaagaaggatatatcaaccagaagatcatcagctatgaagaaatgcctgcttatactcatgcttctcctattcataatacacataaaccatatgaatgtaaggaatgtgggaaatactttagttgtggttcaaatcttattcagcatcagagtattcatactggagagaaaccctataaatgcaaagaatgtgggaaagcctttcaacttcacatacaacttactcgacatcagaaatttcatactggtgagaaaacttttgaatgtaaggaatgtggaaaagcctttaatcttcccacccagcttaatcgccataagaacattcacacagttaagaaactgtttgaatgtaaggaatgtgggaagtcttttaatcgtagctcaaaccttactcagcatcaaagtattcatgctggtgtaaaaccatatcaatgtaaggagtgtgggaaagcctttaatcgtggttcaaatcttattcagcatcaaaaaattcattccaatgagaaaccctttgtatgtagggaatgtgagatggcctttcgatatcattaccaactcattgaacattgccgaattcatactggcgagaaaccctttgaatgtaaagaatgcagaaaggcctttactcttctgacaaagcttgttcgacatcagaagattcatatgggtgagaagccctttgaatgcagggaatgcgggaaggcctttagtctcctcaatcagcttaatcgccataagaatattcacacaggtgaaaaaccatttgaatgtaaagaatgtgggaagtcctttaatcgtagttcaaaccttattcaacaccagagtattcatgctgatgtaaaaccatatgaatgtaaggagtgtgggaaaggctttaatcgtggtgcaaatcttattcagcatcaaaaaattcattccaatgagaaaccctttgtatgtagggaatgtgagatggcctttcgatatcattaccaacttattcaacattgccaaattcatactggtgggaaaccctttgaatgtaaagaatgtggaaaggcctttagtcttctgacacagcttgctcgacataagaacattcatactggtgagaaaccatttgaatgtaaagactgtgggaaggccttcaatcgtggctcgaaccttgttcaacatcagagtattcacactggtgagaagccctatgaatgtaaggagtgtgggaaggcttttagacttcacctacaactttctcaacatgagaaaactcatacaggtgagaaaccctttgaatgtaaggaatgtgggaaattctttcgtcgtggttcaaatcttaatcaacatcgaagtattcataccggaaagaaaccctttgaatgtaaggaatgtgggaaagcctttcgacttcatatgcaccttattcgacatcagaaatttcatactggtgagaagccctttgaatgtaaggaatgtggcaaggccttcagtcttcacacccagcttaatcaccataagaacattcacacaggtgagaagccatttaaatgtaaagaatgtgggaagtcctttaatcgtgtctcaaaccttgttcaacatcagagtattcatgctggtgtaaaaccatatgaatgtaaggagtgtgggaaaggctttagtcgtgtttcaaaccttattcagcatcagaaaactcattccagtgcgaaaccctttgtatgtaaggagtgtaggaagacctttagatatcattaccagcttactgaacattaccgaattcatactggtgagaaaccctttgaatgtaaagaatgcggaaaggcctttggtcttctgacacagcttgctcaacatcagatcattcatactggtgagaagccatttaaatgtaaggagtgtgggaaggcctttaatcgtggctcaaaccttgttcaacctcagagtattcatactggtgagaaaccctatgaatgtaaggagtgtgggaaggcttttagacttcacctacaactttctctgcatcaaaaacttgtacaggtgagaaaccctttgaatgtaagaaatgtgggacagccttcagacatcagtagcaacttactgaacatcagaaaattcatacttgggtagtaatgaactagtccgtaacttgaaagtatttcgatttcttggctttatatatcttgtggaaaggacgattgcggtagatgagaaggagtggc

SEQ ID NO: 227 - DNA, 3464 bp, Homo sapiens
  source 1..3464: mol_type = genomic DNA
accgccaccatggcggaggcgcctcctgtctcaggtacttttaaattcaatacagatgctgctgaattcattcctcaggagaaaaaaaattctggtctaaattgtgggactcaaaggagactagactctaataggattggtagaagaaattacagttcaccacctccctgtcacctttccaggcaggtcccttatgatgaaatctctgctgttcatcagcatagttatcatccgtcaggaagcaaacctaagagtcagcagacgtctttccagtcctctccttgtaataaatcgcccaagagccatggccttcagaatcaaccttggcagaaattgaggaatgagaagcaccatatcagagtcaagaaagcacagagtcttgctgagcagacctcagatacagctggattagagagctcgaccagatcagagagtgggacagacctcagagagcatagtccttctgagagtgagaaggaagttgtgggtgcagatcccaggggagcaaaacccaaaaaagcaacacagtttgtatacagctatggtagaggaccaaaagtcaaggggaaactcaaatgtgaatggagtaaccgaacaactccaaaaccggaggatgctggacccgaaagtaccaaacctgtgggggttttccaccctgactcttcagaggcatcctctagaaaaggagtattggatgggtatggagccagacgaaatgagcagagaagatacccacagaaaaggcctccctgggaagtggagggggccaggccacgaccaggcagaaatccaccaaaacaggagggccaccgacatacaaacgcaggacacagaaacaacatgggccccattccaaaggatgacctcaatgaaagaccagcaaaatctacctgtgacagtgagaacttggcagtcatcaacaagtcttccaggagggttgaccaagagaaatgcactgtacggaggcaggatcctcaagtagtatctcctttctcccgaggcaaacagaaccatgtgctaaagaatgtggaaacgcacacaggttctctaattgaacaactaacaacagaaaaatacgagtgcatggtgtgctgtgaattggttcgtgtcacggccccagtgtggagttgtcagagctgttaccatgtgtttcatttgaactgcataaagaaatgggcaaggtctccagcatctcaagcagatggccagagtggttggaggtgccctgcctgtcagaatgtttctgcacatgttcctaatacctacacttgtttctgtggcaaggtaaagaatcctgagtggagcagaaatgaaattccacatagctgtggtgaggtttgtagaaagaaacagcctggccaggactgcccacattcctgtaaccttctctgccatccaggaccctgcccaccctgccctgcctttatgacaaaaacatgtgaatgtggacgaaccaggcacacagttcgctgtggtcaggctgtctcagtccactgttctaacccatgtgagaatattttgaactgtggtcagcaccagtgtgctgagctgtgccatgggggtcagtgccagccttgccagatcattttgaaccaggtatgctattgcggcagcacctcccgagatgtgttatgtggaaccgatgtaggaaagtctgatggatttggggatttcagctgtttaaagatatgtggcaaggacttgaaatgcggtaaccatacatgttcgcaagtgtgccaccctcagccctgccagcaatgcccacggctcccccagctggtgcgctgttgcccctgtggccaaactcctctcagccaattgctagaacttggaagtagtagtcggaaaacatgcatggaccctgtgccttcatgtggaaaagtgtgcggcaagcctctgccttgtggttccttagatttcattcatacctgtgaaaagctctgccatgaaggagactgtggaccatgctctcgcacatcagttatttcctgcagatgctctttcagaacaaaggagcttccatgtaccagtctcaaaagtgaagatgctacatttatgtgtgacaagcggtgtaacaagaaacggttgtgtggacggcataaatgtaatgagatatgctgtgtggataaggagcacaagtgtcctttgatttgtgggaggaaactccgttgtggccttcataggtgtgaagaaccttgtcatcgtggaaactgccagacatgctggcaagccagttttgatgaattaacctgccattgtggtgcatcagtgatttaccctccagttccctgtggtactaggccccctgaatgtacccaaacctgcgctagagtccatgagtgtgaccatccagtatatcattcttgtcatagtgaggagaagtgtcccccttgcactttcctaactcagaagtggtgcatgggcaagcatgagtttcggagcaacatcccctgtcacctggttgatatctcttgcggattaccctgcagtgccacgctaccatgtgggatgcacaaatgtcagagactctgtcacaaaggggagtgtcttgtggatgagccctgcaagcagccctgcaccacccccagagctgactgtggtcacccgtgtatggcaccctgccataccagctcaccctgccctgtgactgcttgtaaagctaaggtagagctacagtgtgaatgtggacgaagaaaagagatggtgatttgctctgaagcatctagtacttatcaaagaatagctgcaatctccatggcctctaagataacagacatgcagcttggaggttcagtggagatcagcaagttaattaccaaaaaggaagttcatcaagccaggctggagtgtgatgaggagtgttcagccttggaaaggaaaaagagattagcagaggcatttcatatcagtgaggattctgatcctttcaatatacgttcttcagggtcaaaattcagtgatagtttgaaagaagatgccaggaaggacttaaagtttgtcagtgacgttgagaaggaaatggaaaccctcgtggaggccgtgaataagggaaagaatagtaagaaaagccacagcttccctcccatgaacagagaccaccgccggatcatccatgacttggcccaagtttatggcctggagagcgtgagctatgacagtgaaccgaagcgcaatgtggtggtcactgccatcagggggaagtccgtttgtcctcctaccacgctgacaggtgtgcttgaaagggaaatgcaggcacggcctccaccaccgattcctcatcacagacatcagtcagacaagaatcctgggagcagtaatttacagaaaataaccaaggagccaataattgactattttgacgtccaggactagtaatgaactagtccgtaacttgaaagtatttcgatttcttggctttatatatcttgtggaaaggacgagtttgccgttccgcgacgttccta

SEQ ID NO: 228 - DNA, 2603 bp, Homo sapiens
  source 1..2603: mol_type = genomic DNA
accgccaccatggcggaggcgcctcctgtctcaggtacttttaaattcaatacagatgctgctgaattcattcctcaggagaaaaaaaattctggtctaaattgtgggactcaaaggagactagactctaataggattggtagaagaaattacagttcaccacctccctgtcacctttccaggcaggtcccttatgatgaaatctctgctgttcatcagcatagttatcatccgtcaggaagcaaacctaagagtcagcagacgtctttccagtcctctccttgtaataaatcgcccaagagccatggccttcagaatcaaccttggcagaaattgaggaatgagaagcaccatatcagagtcaagaaagcacagagtcttgctgagcagacctcagatacagctggattagagagctcgaccagatcagagagtgggacagacctcagagagcatagtccttctgagagtgagaaggaagttgtgggtgcagatcccaggggagcaaaacccaaaaaagcaacacagtttgtatacagctatggtagaggaccaaaagtcaaggggaaactcaaatgtgaatggagtaaccgaacaactccaaaaccggaggatgctggacccgaaagtaccaaacctgtgggggttttccaccctgactcttcagaggcatcctctagaaaaggagtattggatgggtatggagccagacgaaatgagcagagaagatacccacagaaaaggcctccctgggaagtggagggggccaggccacgaccaggcagaaatccaccaaaacaggagggccaccgacatacaaacgcaggacacagaaacaacatgggccccattccaaaggatgacctcaatgaaagaccagcaaaatctacctgtgacagtgagaacttggcagtcatcaacaagtcttccaggagggttgaccaagagaaatgcactgtacggaggcaggatcctcaagtagtatctcctttctcccgaggcaaacagaaccatgtgctaaagaatgtggaaacgcacacaggttctctaattgaacaactaacaacagaaaaatacgagtgcatggtgtgctgtgaattggttcgtgtcacggccccagtgtggagttgtcagagctgttaccatgtgtttcatttgaactgcataaagaaatgggcaaggtctccagcatctcaagcagatggccagagtggttggaggtgccctgcctgtcagaatgtttctgcacatgttcctaatacctacacttgtttctgtggcaaggtaaagaatcctgagtggagcagaaatgaaattccacatagctgtggtgaggtttgtagaaagaaacagcctggccaggactgcccacattcctgtaaccttctctgccatccaggaccctgcccaccctgccctgcctttatgacaaaaacatgtgaatgtggacgaaccaggcacacagttcgctgtggtcaggctgtctcagtccactgttctaacccatgtgagaatattttgaactgtggtcagcaccagtgtgctgagctgtgccatgggggtcagtgccagccttgccagatcattttgaaccaggtatgctattgcggcagcacctcccgagatgtgttatgtggaaccgatgtaggaaagtctgatggatttggggatttcagctgtttaaagatatgtggcaaggacttgaaatgcggtaaccatacatgttcgcaagtgtgccaccctcagccctgccagcaatgcccacggctcccccagctggtgcgctgttgcccctgtggccaaactcctctcagccaattgctagaacttggaagtagtagtcggaaaacatgcatggaccctgtgccttcatgtggaaaagtgtgcggcaagcctctgccttgtggttccttagatttcattcatacctgtgaaaagctctgccatgaaggagactgtggaccatgctctcgcacatcagttatttcctgcagatgctctttcagaacaaaggagcttccatgtaccagtctcaaaagtgaagatgctacatttatgtgtgacaagcggtgtaacaagaaacggttgtgtggacggcataaatgtaatgagatatgctgtgtggataaggagcacaagtgtcctttgatttgtgggaggaaactccgttgtggccttcataggtgtgaagaaccttgtcatcgtggaaactgccagacatgctggcaagccagttttgatgaattaacctgccattgtggtgcatcagtgatttaccctccagttccctgtggtactaggccccctgaatgtacccaaacctgcgctagagtccatgagtgtgaccatccagtatatcattcttgtcatagtgaggagaagtgtcccccttgcactttcctaactcagaagtggtgcatgggcaagcatgagcagtcccactactgggcgtctacccagaagaaaagaagtcattatatgaaaaagatacctgcacacgcatgtttatagtaatgaactagtccgtaacttgaaagtatttcgatttcttggctttatatatcttgtggaaaggacgatgtactccctttacaagaggtaga

SEQ ID NO: 229 - DNA, 2285 bp, Homo sapiens
  source 1..2285: mol_type = genomic DNA
accgccaccatgaacggagaagccgactgccccacagacctggaaatggccgcccccaaaggccaagaccgttggtcccaggaagacatgctgactttgctggaatgcatgaagaacaaccttccatccaatgacagctccaagttcaaaaccaccgaatcacacatggactgggaaaaagtagcatttaaagacttttctggagacatgtgcaagctcaaatgggtggagatttctaatgaggtgaggaagttccgtacattgacagaattgatcctcgatgctcaggaacatgttaaaaatccttacaaaggcaaaaaactcaagaaacacccagacttcccaaagaagcccctgaccccttatttccgcttcttcatggagaagcgggccaagtatgcgaaactccaccctgagatgagcaacctggacctaaccaagattctgtccaagaaatacaaggagcttccggagaagaagaagatgaaatatattcaggacttccagagagagaaacaggagttcgagcgaaacctggcccgattcagggaggatcaccccgacctaatccagaatgccaagaaatcggacatcccagagaagcccaaaaccccccagcagctgtggtacacccacgagaagaaggtgtatctcaaagtgcggccagatgagatcatgagagactatatccagaagcacccagagctgaacatcagtgaggagggtatcaccaagtccaccctcaccaaggccgaacgccagctcaaggacaagtttgacgggcgacccaccaagccacctccgaacagctactcgctgtactgcgcagagctcatggccaacatgaaggacgtgcccagcacagagcgcatggtgctgtgcagccagcagtggaagctgctgtcccagaaggagaaggacgcctatcacaagaagtgtgatcagaaaaagaaagattacgaggtggagctgctccgtttcctcgagagcctgcctgaggaggagcagcagcgggtcttgggggaagagaagatgctgaacatcaacaagaagcaggccaccagccccgcctccaagaagccagcccaggaagggggcaagggcggctccgagaagcccaagcggcccgtgtcggccatgttcatcttctcggaggagaaacggcggcagctgcaggaggagcggcctgagctctccgagagcgagctgacccgcctgctggcccgaatgtggaacgacctgtctgagaagaagaaggccaagtacaaggcccgagaggcggcgctcaaggctcagtcggagaggaagcccggcggggagcgcgaggaacggggcaagctgcccgagtcccccaaaagagctgaggagatctggcaacagagcgttatcggcgactacctggcccgcttcaagaatgaccgggtgaaggccttgaaagccatggaaatgacctggaataacatggaaaagaaggagaaactgatgtggattaagaaggcagccgaagaccaaaagcgatatgagagagagctgagtgagatgcgggcacctccagctgctacaaattcttccaagaagatgaaattccagggagaacccaagaagcctcccatgaacggttaccagaagttctcccaggagctgctgtccaatggggagctgaaccacctgccgctgaaggagcgcatggtggagatcggcagtcgctggcagcgcatctcccagagccagaaggagcactacaaaaagctggccgaggagcagcaaaagcagtacaaggtgcacctggacctctgggttaagagcctgtctccccaggaccgtgcagcatataaagagtacatctccaataaacgtaagagcatgaccaagctgcgaggcccaaaccccaaatccagccggactactctgcagtccaagtcggagtccgaggaggatgatgaagaggatgaggatgacgaggacgaggatgaagaagaggaagatgatgagaatggggactcctctgaagatggcggcgactcctctgagtccagcagcgaggacgagagcgaggatggggatgagaatgaagaggatgacgaggacgaagacgacgacgaggatgacgatgaggatgaagataatgagtccgagggcagcagctccagctcctcctcctcaggggactcctcagactctgactccaactagtaatgaactagtccgtaacttgaaagtatttcgatttcttggctttatatatcttgtggaaaggacgacgccgcacaagtgtcacagcggtg

SEQ ID NO: 230 - DNA, 2396 bp, Homo sapiens
  source 1..2396: mol_type = genomic DNA
accgccaccatgaacggagaagccgactgccccacagacctggaaatggccgcccccaaaggccaagaccgttggtcccaggaagacatgctgactttgctggaatgcatgaagaacaaccttccatccaatgacagctccaagttcaaaaccaccgaatcacacatggactgggaaaaagtagcatttaaagacttttctggagacatgtgcaagctcaaatgggtggagatttctaatgaggtgaggaagttccgtacattgacagaattgatcctcgatgctcaggaacatgttaaaaatccttacaaaggcaaaaaactcaagaaacacccagacttcccaaagaagcccctgaccccttatttccgcttcttcatggagaagcgggccaagtatgcgaaactccaccctgagatgagcaacctggacctaaccaagattctgtccaagaaatacaaggagcttccggagaagaagaagatgaaatatattcaggacttccagagagagaaacaggagttcgagcgaaacctggcccgattcagggaggatcaccccgacctaatccagaatgccaagaaatcggacatcccagagaagcccaaaaccccccagcagctgtggtacacccacgagaagaaggtgtatctcaaagtgcggccagatgccactacgaaggaggtgaaggactccctggggaagcagtggtctcagctctcggacaaaaagaggctgaaatggattcataaggccctggagcagcggaaggagtacgaggagatcatgagagactatatccagaagcacccagagctgaacatcagtgaggagggtatcaccaagtccaccctcaccaaggccgaacgccagctcaaggacaagtttgacgggcgacccaccaagccacctccgaacagctactcgctgtactgcgcagagctcatggccaacatgaaggacgtgcccagcacagagcgcatggtgctgtgcagccagcagtggaagctgctgtcccagaaggagaaggacgcctatcacaagaagtgtgatcagaaaaagaaagattacgaggtggagctgctccgtttcctcgagagcctgcctgaggaggagcagcagcgggtcttgggggaagagaagatgctgaacatcaacaagaagcaggccaccagccccgcctccaagaagccagcccaggaagggggcaagggcggctccgagaagcccaagcggcccgtgtcggccatgttcatcttctcggaggagaaacggcggcagctgcaggaggagcggcctgagctctccgagagcgagctgacccgcctgctggcccgaatgtggaacgacctgtctgagaagaagaaggccaagtacaaggcccgagaggcggcgctcaaggctcagtcggagaggaagcccggcggggagcgcgaggaacggggcaagctgcccgagtcccccaaaagagctgaggagatctggcaacagagcgttatcggcgactacctggcccgcttcaagaatgaccgggtgaaggccttgaaagccatggaaatgacctggaataacatggaaaagaaggagaaactgatgtggattaagaaggcagccgaagaccaaaagcgatatgagagagagctgagtgagatgcgggcacctccagctgctacaaattcttccaagaagatgaaattccagggagaacccaagaagcctcccatgaacggttaccagaagttctcccaggagctgctgtccaatggggagctgaaccacctgccgctgaaggagcgcatggtggagatcggcagtcgctggcagcgcatctcccagagccagaaggagcactacaaaaagctggccgaggagcagcaaaagcagtacaaggtgcacctggacctctgggttaagagcctgtctccccaggaccgtgcagcatataaagagtacatctccaataaacgtaagagcatgaccaagctgcgaggcccaaaccccaaatccagccggactactctgcagtccaagtcggagtccgaggaggatgatgaagaggatgaggatgacgaggacgaggatgaagaagaggaagatgatgagaatggggactcctctgaagatggcggcgactcctctgagtccagcagcgaggacgagagcgaggatggggatgagaatgaagaggatgacgaggacgaagacgacgacgaggatgacgatgaggatgaagataatgagtccgagggcagcagctccagctcctcctcctcaggggactcctcagactctgactccaactagtaatgaactagtccgtaacttgaaagtatttcgatttcttggctttatatatcttgtggaaaggacgagtattcgttacacagcgcagcgcc

SEQ ID NO: 231 - DNA, 1181 bp, Homo sapiens
  source 1..1181: mol_type = genomic DNA
accgccaccatggcgggacacctggcttcggatttcgccttctcgccccctccaggcggtgggggtgatgggccatggggggcggagccgggctgggttgatcctctgacctggctaagcttccaaggccctcctggagggccaggaatcgggccgggggttgggccaggctctgaggtgtgggggattcccccttgccccccgccgtatgagttatgtggggggatggcgtactgtgggcctcaggttggagtggggctagtgccccaaggcggcttggagacctctcagcctgagagcgaagcaggagtcggggtggagagcaactccaatggggcctccccggaaccctgcaccgtcccccctggtgccgtgaagctggagaaggagaagctagagcaaaacccggagaagtcccaggacatcaaagctctgcagaaagaactcgagcaatttgccaagctcctgaagcagaagaggatcaccctgggatatacacaggccgatgtggggctcatcctgggggttctatttgggaaggtgttcagccaaaagaccatctgccgctttgaggctctgcagcttagcttcaagaacatgtgtaagctgcggcccttgctgcagaagtgggtggaggaagctgacaacaatgaaaatcttcaggagatatgcaaagcagaaaccctcatgcaggcccgaaagagaaagcgaaccagtatcgagaaccgagtgagaggcaacctggagaatttgttcctgcagtgcccgaaacccacactgcagatcagccacatcgcccagcagcttgggctcgagaaggatgtggtccgagtgtggttctgtaaccggcgccagaagggcaagcgatcaagcagcgactatgcacaacgagaggattttgaggctgctgggtctcctttctcagggggaccagtgtcctttcctccggccccagggccccattttggtaccccaggctatgggagccctcacttcactgcactgtactcctcagtccctttccctgagggggaagtctttcccccagtctccgtcatcactctgggctctcccatgcattcaaactagtaatgaactagtccgtaacttgaaagtatttcgatttcttggctttatatatcttgtggaaaggacgaggtgaaaggtttgaggaacccggc

SEQ ID NO: 232 - DNA, 617 bp, Homo sapiens
  source 1..617: mol_type = genomic DNA
accgccaccatgtggactctcgggcgccgcgcagtagccggcctcctggcgtcacccagcccagcccaggcccagaccctcacccgggtcccgcggccggcagagttggccccactctgcggccgccgtggcctgcgcaccgacatcgatgcgacctgcacgccccgccgcgcaagttcgaaccaacgtggcctcaaccagatttggaatgtcaaaaagcagagtgtctatttgatgaatttgaggaaatctggaactttgggccacccaggctctctagatgagaccacctatgaaagactagcagaggaaacgctggactctttagcagagttttttgaagaccttgcagacaagccatacacgtttgaggactatgatgtctcctttgggagtggtgtcttaactgtcaaactgggtggagatctaggaacctatgtgatcaacaagcagacgccaaacaagcaaatctggctatcttctccatccaggttaacgtggctcctgtggctgttccatccctagtaatgaactagtccgtaacttgaaagtatttcgatttcttggctttatatatcttgtggaaaggacgagctttcaactaacgatgcgtcaaa

SEQ ID NO: 233 - DNA, 692 bp, Homo sapiens
  source 1..692: mol_type = genomic DNA
accgccaccatgtggactctcgggcgccgcgcagtagccggcctcctggcgtcacccagcccagcccaggcccagaccctcacccgggtcccgcggccggcagagttggccccactctgcggccgccgtggcctgcgcaccgacatcgatgcgacctgcacgccccgccgcgcaagttcgaaccaacgtggcctcaaccagatttggaatgtcaaaaagcagagtgtctatttgatgaatttgaggaaatctggaactttgggccacccaggctctctagatgagaccacctatgaaagactagcagaggaaacgctggactctttagcagagttttttgaagaccttgcagacaagccatacacgtttgaggactatgatgtctcctttgggagtggtgtcttaactgtcaaactgggtggagatctaggaacctatgtgatcaacaagcagacgccaaacaagcaaatctggctatcttctccatccaggtatgtagtggacctaagcgttatgactggactgggaaaaactgggtgtactcccacgacggcgtgtccctccatgagctgctggccgcagagctcactaaagccttagtaatgaactagtccgtaacttgaaagtatttcgatttcttggctttatatatcttgtggaaaggacgaattcaggacacgttccagcacgat

SEQ ID NO: 234 - DNA, 956 bp, Homo sapiens
  source 1..956: mol_type = genomic DNA
accgccaccatggactactcctacctcaattcgtacgactcgtgcgtggcggccatggaggcgtccgcctacggcgactttggcgcctgcagccagcccggcggcttccaatacagccccctgcggcccgctttccccgcggcagggccgccctgccccgcgctcggctcctccaactgcgcacttggcgccctacgcgaccaccagcccgcgccctactcggcagtgccctacaagttcttcccagagccatccggcctgcacgagaagcgcaagcagcggcgcatccgcaccacgttcaccagcgcgcagctcaaggagctggagcgcgttttcgctgagacccactaccccgacatttacacgcgtgaggagctggcgctcaagatcgacctcactgaggctcgcgtgcaggtctggttccagaaccgccgggccaagttccgcaaacaggagcgcgcggccagcgccaagggcgcggcgggcgcggcgggcgccaaaaagggcgaggcgcgctgctcctccgaggacgacgattccaaggagtccacgtgcagccccacgcccgatagcaccgcctcgctgccgccgccgcctgcgcccggcctggccagcccgcgcctgagccccagcccgctgcccgtcgcactgggctccgggccgggacctgggccggggccacagccgctcaagggcgcactgtgggccggtgtggcgggcggtgggggcggcgggcctggcgcgggagcggccgaactacttaaggcttggcagccggcggagtccggccccgggcccttctccggggttctgtcctcctttcaccggaagcccggccccgccctgaagaccaatctcttctagtaatgaactagtccgtaacttgaaagtatttcgatttcttggctttatatatcttgtggaaaggacgaacatatggtgttagaagatctgtg

SEQ ID NO: 235 - DNA, 1046 bp, Homo sapiens
  source 1..1046: mol_type = genomic DNA
accgccaccatgtataaaatggaatattcttacctcaattcctctgcctacgagtcctgtatggctgggatggacacctcgagcctggcttcagcctatgctgacttcagttcctgcagccaggccagtggcttccagtataacccgataaggaccacttttggggccacgtccggctgcccttccctcacgccgggatcctgcagcctgggcaccctcagggaccaccagagcagtccgtacgccgcagttccttacaaactcttcacggaccacggcggcctcaacgagaagcgcaagcagcggcgcatccgcaccactttcaccagtgcccagctcaaagagctggaaagggtcttcgcggagactcactaccccgacatctacactcgggaggagctggccctgaagatcgacctcacagaggcgcgagtccaggtgtggttccagaaccgccgcgccaagtttcgcaagcaggagcgcgcagcggcagccgcagcggccgcggccaagaacggctcctcgggcaaaaagtctgactcttccagggacgacgagagcaaagaggccaagagcactgacccggacagcactgggggcccaggtcccaatcccaaccccacccccagctgcggggcgaatggaggcggcggcggcgggcccagcccggctggagctccgggggcggcggggcccgggggcccgggaggcgaacccggcaagggcggcgcagcagcagcggcggcggccgcggcagcggcggcggcggcagcggcagcggcggcagctggaggcctggctgcggctgggggccctggacaaggctgggctcccggccccggccccatcacctccatcccggattcgcttgggggtcccttcgccagcgtcctatcttcgctccaaagacccaacggtgccaaagccgccttagtgaagagcagtatgttctagtaatgaactagtccgtaacttgaaagtatttcgatttcttggctttatatatcttgtggaaaggacgaaaagctcgttgattccgagaaatg

SEQ ID NO: 236 - DNA, 263 bp, Homo sapiens
  source 1..263: mol_type = genomic DNA
accgccaccatggtgcagtcctgctccgcctacggctgcaagaaccgctacgacaaggacaagcccgtttctttccacaaaaagaagatcttctggagccacaggaacagcttcccccacctcctttaccgcctcctgtttcccaggttgatgctgctattggattactagtaatgaactagtccgtaacttgaaagtatttcgatttcttggctttatatatcttgtggaaaggacgataagtgcacatccacttatgttta

SEQ ID NO: 237 - DNA, 1817 bp, Homo sapiens
  source 1..1817: mol_type = genomic DNA
accgccaccatggcgctcaccagctttttacctgcacctactcagctatctcaggaccagcttgaggctgaagaaaaggcaagatcccagagatcacggcagacctcactggtctcctcccgaagagaacctcccccgtacggataccggaaaggctggatacctcggttattagaggattttggagatggaggtgcttttccagagatccatgtggcccagtatccactggatatgggacgaaagaaaaaaatgtcgaatgcgctggccattcaggtggattctgaaggaaaaattaaatatgatgcaattgctcgacaaggacagtcaaaagacaaggtcatttatagcaaatacactgacctggttccaaaggaggttatgaatgcagatgatccagacctgcaaaggcccgatgaagaagctattaaagagataacagaaaagacaagagtagccttagaaaaatctgtatcacagaaggtcgccgcagccatgccagttcgagcagctgacaaattggctcctgctcagtatatccgatacacaccatctcagcaaggagtggcattcaactctggagctaaacagagggttattcggatggtagaaatgcagaaagatccaatggagcctccaaggttcaagattaataagaaaattccccggggaccaccttctcctcctgcgcctgtcatgcattctcctagccgaaagatgactgtaaaggaacaacaagagtggaagattcctccttgtatttctaactggaaaaatgcaaagggttatacaattccattagacaaacgtctggctgctgatggaagaggactacagacagtacacataaatgaaaatttcgccaaattggcagaagccctctacattgctgatcggaaggctcgtgaagctgtggaaatgcgtgcccaagtagagagaaaaatggctcagaaagaaaaggaaaaacatgaagagaaacttagagaaatggcccagaaagccagggagagaagagctgggatcaaaactcatgtggaaaaagaggatggggaggcacgtgagagggatgaaatccggcatgacaggcgaaaagagagacagcatgaccggaatctttccagggcagctcctgataagaggtcgaaacttcagagaaatgaaaatcgggatatcagtgaagttattgctctcggtgttcctaatcctcggacttccaatgaagttcagtatgaccaaaggctcttcaaccaatccaagggtatggacagtggatttgcaggtggagaagatgaaatttataatgtttatgatcaagcctggagaggtggtaaagatatggcccagagtatttataggcccagtaaaaatctggacaaggacatgtatggtgatgacctagaagccagaataaagaccaacaggtgccaagccatacaactcaatttcagtgtttacactggtgaaagcaaagtagttcatagttttttctccttttccttagatttgttcccgacaaggagttttctggttcagaccgtagacagagaggccgagaaggaccagtgcagtttgaggaagatccttttggtttggacaagtttttggaagaagccaaacagcatggtggctctaaaagaccctcagatagcagccgccccaaggaacacgagcatgaaggcaagaagaggaggaaggaataggcacaggtctctccaaagtgaatagtaatgaactagtccgtaacttgaaagtatttcgatttcttggctttatatatcttgtggaaaggacgacgtccgtcgtttcacctgtactac

SEQ ID NO: 238 - DNA, 599 bp, Homo sapiens
  source 1..599: mol_type = genomic DNA
accgccaccatggagccccccaagatgaacccagtggtggagccactgtcctggatgctgggcacctggctgtcggacccacctggagccgggacctaccccacactgcagcccttccagtacctggaggaggttcacatctcccacgtgggccagcccatgctgaacttctcgttcaactccttccacccggacacgcgcaagccgatgcacagagagtgtggcttcattcgcctcaagcccgacaccaacaaggtggcctttgtcagcgcccagaacacaggcgtggtggaagtggaggagggcgaggtgaacgggcaggagctgtgcatcgcatcccactccatcgccaggatctccttcgccaaggagccccacgtagagcagatcacccggaagttcaggctgaattctgaaggcaaacttgagcagacggtctccatggcaaccacgacacagccaatgactcagcatcttcacgtcacctacaagaaggtgaccccgtagtaatgaactagtccgtaacttgaaagtatttcgatttcttggctttatatatcttgtggaaaggacgagtcccgaatcgcgatgactaggag

SEQ ID NO: 239 - DNA, 1835 bp, Homo sapiens
  source 1..1835: mol_type = genomic DNA
accgccaccatggtgatctgctgtgcggccgtgaactgctccaaccggcagggaaagggcgagaagcgcgccgtctccttccacaggttccccctaaaggactcaaaacgtctaatccaatggttaaaagctgttcagagggataactggactcccactaagtattcatttctctgtagtgagcatttcaccaaagacagcttctccaagaggctggaggaccagcatcgcctgctgaagcccacggccgtgccatccatcttccacctgaccgagaagaagaggggggctggaggccatggccgcacccggagaaaagatgccagcaaggccacagggggtgtgaggggacactcgagtgccgccaccagcagaggagctgcaggttggtcaccgtcctcgagtggaaacccgatggccaagccagagtcccgcaggttgaagcaagctgctctgcaaggtgaagccacacccagggcggcccaggaggccgccagccaggagcaggcccagcaagctctggaacggactccaggagatggactggccaccatggtggcaggcagtcagggaaaagcagaagcgtctgccacagatgctggcgatgagagcgccacttcctccatcgaagggggcgtgacagataagagtggcatttctatggatgactttacgcccccaggatctggggcgtgcaaatttatcggctcacttcattcgtacagtttctcctctaagcacacccgagaaaggccatctgtcccccgagagcccattgaccgcaagaggctgaagaaagatgtggaaccaagctgcagtgggagcagcctgggacccgacaagggcctggcccagagccctcccagctcatcacttaccgcgacaccgcagaagccttcccagagcccctctgcccctcctgccgacgtcaccccaaagccagccacggaagccgtgcagagcgagcacagcgacgccagccccatgtccatcaacgaggtcatcctgtcggcgtcaggggcctgcaagctcatcgactcactgcactcctactgcttctcctcccggcagaacaagagccaggtgtgctgcctgcgggagcaggtggagaagaagaacggcgagctgaagagcctgcggcagagggtcagccgctccgacagccaggtgcggaagctacaggagaagctggatgagctgaggagagtgagcgtcccctatccaagtagcctgctgtcgcccagccgcgagccccccaagatgaacccagtggtggagccactgtcctggatgctgggcacctggctgtcggacccacctggagccgggacctaccccacactgcagcccttccagtacctggaggaggttcacatctcccacgtgggccagcccatgctgaacttctcgttcaactccttccacccggacacgcgcaagccgatgcacagagagtgtggcttcattcgcctcaagcccgacaccaacaaggtggcctttgtcagcgcccagaacacaggcgtggtggaagtggaggagggcgaggtgaacgggcaggagctgtgcatcgcatcccactccatcgccaggatctccttcgccaaggagccccacgtagagcagatcacccggaagttcaggctgaattctgaaggcaaacttgagcagacggtctccatggcaaccacgacacagccaatgactcagcatcttcacgtcacctacaagaaggtgaccccgtagtaatgaactagtccgtaacttgaaagtatttcgatttcttggctttatatatcttgtggaaaggacgatgaccactatcgtcaagatccatc

SEQ ID NO: 240 - DNA, 1163 bp, Homo sapiens
  source 1..1163: mol_type = genomic DNA
accgccaccatgaagcgagattcatgggttcccagtaaataccagtttctatgtagtgaccattttactcctgactctcttgacatcagatggggtattcgatatttaaaacaaactgcagttccaacaatattttctttgcctgaagacaatcagggaaaagacccttctaaaaaaaaatcccagaagaaaaacttggaagatgagaaagaagtatgcccaaaagccaagtcagaagaatcatttgtattaaatgagacaaagaaaaatatagttaacacagatgtgccccatcaacatccagaattacttcattcatcttccttggtaaagccaccagctcccaaaacaggaagtatacaaaataacatgttaactcttaatctagttaaacaacatactgggaaaccagaatctaccttggaaacatcagttaaccaagatacaggtagaggtggttttcacacatgttttgagaatctaaattctacaactattactttgacaacttcaaattcagaaagtattcatcaatctttggaaactcaagaagttcttgaagtaactaccagtcatcttgctaatccaaactttacaagtaattccatggaaataaagtcagcacaggaaaatccattcttattcagcacaattaatcaaacagttgaagaattaaacacaaataaagaatctgttattgccatttttgtacctgctgaaaattctaaaccctcagttaattcttttatatctgcacaaaaagaaaccacggaaatggaagacacagacattgaagactccttgtataaggatgtagactatgggacagaagttttacaaatcgaacattcttactgcagacaagatataaataaggaacatctttggcagaaagtctctaagctacattcaaagataactcttctagagttaaaagagcaacaaactctaggtagattgaagtctttggaagctcttataaggcagctaaagcaggaaaactggctatctgaagaaaacgtcaagattatagaaaaccattttacaacatatgaagtcactatgatatagtaatgaactagtccgtaacttgaaagtatttcgatttcttggctttatatatcttgtggaaaggacgacttggagctcaggccaggtgtcgc

SEQ ID NO: 241 - DNA, 1289 bp, Homo sapiens
  source 1..1289: mol_type = genomic DNA
accgccaccatgccccgctattgcgcagcgatttgttgtaagaaccgccggggacgaaacaataaagaccggaagctgagtttttatccatttcctctacatgacaaagaaagactggaaaagtggttaaagaatatgaagcgagattcatgggttcccagtaaataccagtttctatgtagtgaccattttactcctgactctcttgacatcagatggggtattcgatatttaaaacaaactgcagttccaacaatattttctttgcctgaagacaatcagggaaaagacccttctaaaaaaaaatcccagaagaaaaacttggaagatgagaaagaagtatgcccaaaagccaagtcagaagaatcatttgtattaaatgagacaaagaaaaatatagttaacacagatgtgccccatcaacatccagaattacttcattcatcttccttggtaaagccaccagctcccaaaacaggaagtatacaaaataacatgttaactcttaatctagttaaacaacatactgggaaaccagaatctaccttggaaacatcagttaaccaagatacaggtagaggtggttttcacacatgttttgagaatctaaattctacaactattactttgacaacttcaaattcagaaagtattcatcaatctttggaaactcaagaagttcttgaagtaactaccagtcatcttgctaatccaaactttacaagtaattccatggaaataaagtcagcacaggaaaatccattcttattcagcacaattaatcaaacagttgaagaattaaacacaaataaagaatctgttattgccatttttgtacctgctgaaaattctaaaccctcagttaattcttttatatctgcacaaaaagaaaccacggaaatggaagacacagacattgaagactccttgtataaggatgtagactatgggacagaagttttacaaatcgaacattcttactgcagacaagatataaataaggaacatctttggcagaaagtctctaagctacattcaaagataactcttctagagttaaaagagcaacaaactctaggtagattgaagtctttggaagctcttataaggcagctaaagcaggaaaactggctatctgaagaaaacgtcaagattatagaaaaccattttacaacatatgaagtcactatgatatagtaatgaactagtccgtaacttgaaagtatttcgatttcttggctttatatatcttgtggaaaggacgatacagtaatgactatcaagactaa

SEQ ID NO: 242 - DNA, 644 bp, Homo sapiens
  source 1..644: mol_type = genomic DNA
accgccaccatggtgaaatgctgctccgccattggatgtgcttctcgctgcttgccaaattcgaagttaaaaggactgacatttcacgtattccccacagatgaaaacatcaaaaggaaatgggtattagcaatgaaaagacttgatgtgaatgcagccggcatttgggagcctaaaaaaggagatgtgttgtgttcgaggcactttaagaagacagattttgacagaagtgctccaaatattaaactgaaacctggagtcataccttctatctttgattctccatatcacctacaggaacatagctacagtgtaatggacagtccaaagaaacttaagcataaattagatcatgtgatcggcgagctagaggatacaaaggaaagtctacggaatgttttagaccgagaaaaacgttttcagaaatcattgaggaagacaatcagggaattaaaggatgaatgtctgatcagccaagaaacagcaaatagactggacactttctgttgggactgttgtcaggagagcatagaacaggactatatttcatagtaatgaactagtccgtaacttgaaagtatttcgatttcttggctttatatatcttgtggaaaggacgatagcaagcgaaccgtagaataatt

SEQ ID NO: 243 - DNA, 584 bp, Homo sapiens
  source 1..584: mol_type = genomic DNA
accgccaccatggtgaaatgctgctccgccattggatgtgcttctcgctgcttgccaaattcgaagttaaaaggactgacatttcacgtattccccacagatgaaaacatcaaaaggaaatgggtattagcaatgaaaagacttgatgtgaatgcagccggcatttgggagcctaaaaaaggagatgtgttgtgttcgaggcactttaagaagacagattttgacagaagtgctccaaatattaaactgaaacctggagtcataccttctatctttgattctccatatcacctacaggggaaaagagaaaaacttcattgtagaaaaaacttcaccctcaaaaccgttccagccactaactacaatcaccatcttgttggtgcttcctcatgtattgaagaattccaatcccagttcatttttaaacacaggaaaaggaaacaagaacaggaagaagaacaaaaaccaagaagagagaaatgcatttcatagtaatgaactagtccgtaacttgaaagtatttcgatttcttggctttatatatcttgtggaaaggacgaggaaccagacactgaacaaacagg

SEQ ID NO: 244 - DNA, 1031 bp, Homo sapiens
  source 1..1031: mol_type = genomic DNA
accgccaccatgccgcgtcactgctccgccgccggctgctgcacacgggacacgcgcgagacgcgcaaccgcggcatctccttccacagacttcccaagaaggacaacccgaggcgaggcttgtggctggccaactgccagcggctggaccccagcggccagggcctgtgggacccggcatccgagtacatctacttctgctccaaacactttgaggaggactgctttgagctggtgggaatcagtggatatcacaggctaaaggagggggcagtccccaccatatttgagtctttctccaagttgcgccggacaaccaagaccaaaggacacagttacccacctggccccgctgaagtcagccggctcagacgatgcaggaagcgctgctccgagggccgagggcccacaactccattttctccacctccacctgctgatgtcacctgctttcctgtggaagaggcctcagcacctgccactttgccggcctccccagctgggaggctggagcctggccttagcagccccttttcagacctactgggccccttgggtgcccaggcagatgaagcaggctgcagcgcccagccttcaccagagcggcagccctcccctctcgaaccacggccagtctccccctcagcgtatatgctgcgcctgcccccacccgccggagcctacatccagaatgaacacagctaccaggtgggcagcgccttactctggaagcggcgagccgaggcagcccttgatgcccttgacaaggcccagcgccagctgcaggcctgcaagcggcgggagcagcggctgcggttgagactgaccaagctgcagcaggagcgggcacgggagaagcgggcacaggcagatgcccgccagactctgaaggagcatgtgcaggactttgccatgcagctgagcagcagcatggcctagtaatgaactagtccgtaacttgaaagtatttcgatttcttggctttatatatcttgtggaaaggacgaaatggcccataatgcaaagagaat

SEQ ID NO: 245 - DNA, 2813 bp, Homo sapiens
  source 1..2813: mol_type = genomic DNA
accgccaccatgacccgaagttgctccgcagtgggctgcagcacccgtgacaccgtgctcagccgggagcgcggcctctccttccaccaatttccaactgataccatacagcgctcaaaatggatcagggctgttaatcgtgtggaccccagaagcaaaaagatttggattccaggaccaggtgctatactgtgttccaaacattttcaagaaagtgactttgagtcatatggcataagaagaaagctgaaaaaaggagctgtgccttctgtttctctatacaagattcctcaaggtgtacatcttaaaggtaaagcaagacaaaaaatcctaaaacaacctcttccagacaattctcaagaagttgctactgaggaccataactatagtttaaagacacctttgacgataggtgcagagaaactggctgaggtgcaacaaatgttacaagtgtccaaaaaaagacttatctccgtaaagaactacaggatgatcaagaagagaaagggtttacgattaattgatgcacttgtagaagagaaactactttctgaagaaacagagtgtctgctacgagctcaattttcagattttaagtgggagttatataattggagagaaacagatgagtactccgcagaaatgaaacaatttgcatgtacactctacttgtgcagtagcaaagtctatgattatgtaagaaagattcttaagctgcctcattcttccatcctcagaacgtggttatccaaatgccaacccagtccaggtttcaacagcaacattttttcttttcttcaacgaagagtagagaatggagatcagctctatcaatactgttcattgttaataaaaagtatgcctctcaagcaacagcttcagtgggatcctagcagtcacagtttgcaggggtttatggactttggtcttggaaaacttgatgctgatgaaacgccacttgcttcagaaactgttttgttaatggcagtgggtatttttggccattggagaacacctcttggttatttttttgtaaacagagcatctggatatttgcaggctcagctgcttcgtctgactattggtaaactgagtgacataggaatcacagttctggctgttacatctgatgccacagcacatagtgttcagatggcaaaagcattggggatacatattgatggagacgacatgaaatgtacatttcagcatccttcatcttctagtcaacagattgcatacttctttgactcttgccacttgctaagattaataagaaatgcatttcagaattttcaaagcattcagtttattaatggtatagcacattggcagcacctcgtggagttagtagcactggaggaacaggaattatcaaatatggaaagaataccaagtacacttgcaaatttgaaaaatcatgtactgaaagtgaatagtgccacccaactctttagtgagagtgtagccagtgcattagaatatttgttatccttagacctgccaccttttcaaaactgtattggtaccatccattttttacgtttaattaacaatctgtttgacatctttaatagtaggaactgttatggaaagggacttaaagggcctctgttgcctgaaacttacagtaaaataaaccacgtgttaattgaagccaagactatttttgttacattatctgacactagcaataatcaaataattaaaggtaagcaaaaactaggattcctgggatttttgctcaatgctgagagcttaaaatggctctaccaaaattatgttttcccaaaggtcatgccttttccttatcttctgacttacaaattcagtcatgatcatctggaattatttctaaagatgcttaggcaggtattagtaacaagttctagccctacctgcatggcattccagaaagcttactataatttggagaccagatacaaatttcaagatgaagtttttctaagcaaagtaagcatctttgacatttcaattgctcgaaggaaagacttggcgctttggacagttcaacgtcagtatggtgtcagcgttacaaagactgtctttcacgaagagggtatttgtcaagactggtctcattgttcactaagtgaggcattactagacctgtcagatcataggcgaaatctcatctgttatgctggttatgttgcaaacaagttatcagctcttttaacttgtgaggactgcatcactgcactgtatgcatcggatctcaaagcctctaaaattgggtcactattatttgttaaaaagaagaatggtttgcattttccttcagaaagtctgtgtcgggtcataaatatttgtgagcgagttgtaagaacccattcaagaatggcaatttttgaactagtttctaaacaaagggaattgtatcttcaacagaaaatattatgtgagctttctgggcatattaatctttttgtagatgtgaataagcatctctttgatggagaagtgtgtgccatcaatcactttgtcaagttgctaaaggatataataatctgtttcttaaatatcagagctaaaaatgttgcacagaatcctttaaaacatcattcagagagaactgatatgaaaactttatcaaggaaacactggtcatctgtacaggattataaatgttcaagttttgctaataccagtagtaaattcaggcatttgctaagtaacgatggatatccattcaaatagtaatgaactagtccgtaacttgaaagtatttcgatttcttggctttatatatcttgtggaaaggacgacactaactattgtagggatacggt

SEQ ID NO: 246 - DNA, 2087 bp, Homo sapiens
  source 1..2087: mol_type = genomic DNA
accgccaccatggcgtccacggattacagtacctatagccaagctgcagcgcagcagggctacagtgcttacaccgcccagcccactcaaggatatgcacagaccacccaggcatatgggcaacaaagctatggaacctatggacagcccactgatgtcagctatacccaggctcagaccactgcaacctatgggcagaccgcctatgcaacttcttatggacagcctcccactgtagaagggaccagtacaggttatactactccaactgccccccaggcatacagccagcctgtccaggggtatggcactggtgcttatgataccaccactgctacagtcaccaccacccaggcctcctatgcagctcagtctgcatatggcactcagcctgcttatccagcctatgggcagcagccagcagccactgcacctacaagaccgcaggatggaaacaagcccactgagactagtcaacctcaatctagcacagggggttacaaccagcccagcctaggatatggacagagtaactacagttatccccaggtacctgggagctaccccatgcagccagtcactgcacctccatcctaccctcctaccagctattcctctacacagccgactagttatgatcagagcagttactctcagcagaacacctatgggcaaccgagcagctatggacagcagagtagctatggtcaacaaagcagctatgggcagcagcctcccactagttacccaccccaaactggatcctacagccaagctccaagtcaatatagccaacagagcagcagctacgggcagcagagttcattccgacaggaccaccccagtagcatgggtgtttatgggcaggagtctggaggattttccggaccaggagagaaccggagcatgagtggccctgataaccggggcaggggaagagggggatttgatcgtggaggcatgagcagaggtgggcggggaggaggacgcggtggaatgggcgctggagagcgaggtggcttcaataagcctggtggacccatggatgaaggaccagatcttgatctaggcccacctgtagatccagatgaagactctgacaacagtgcaatttatgtacaaggattaaatgacagtgtgactctagatgatctggcagacttctttaagcagtgtggggttgttaagatgaacaagagaactgggcaacccatgatccacatctacctggacaaggaaacaggaaagcccaaaggcgatgccacagtgtcctatgaagacccacccactgccaaggctgccgtggaatggtttgatgggaaagattttcaagggagcaaacttaaagtctcccttgctcggaagaagcctccaatgaacagtatgcggggtggtctgccaccccgtgagggcagaggcatgccaccaccactccgtggaggtccaggaggcccaggaggtcctgggggacccatgggtcgcatgggaggccgtggaggagatagaggaggcttccctccaagaggaccccggggttcccgagggaacccctctggaggaggaaacgtccagcaccgagctggagactggcagtgtcccaatccgggttgtggaaaccagaacttcgcctggagaacagagtgcaaccagtgtaaggccccaaagcctgaaggcttcctcccgccaccctttccgcccccgggtggtgatcgtggcagaggtggccctggtggcatgcggggaggaagaggtggcctcatggatcgtggtggtcccggtggaatgttcagaggtggccgtggtggagacagaggtggcttccgtggtggccggggcatggaccgaggtggctttggtggaggaagacgaggtggccctggggggccccctggacctttgatggaacagatgggaggaagaagaggaggacgtggaggacctggaaaaatggataaaggcgagcaccgtcaggagcgcagagatcggccctactagtaatgaactagtccgtaacttgaaagtatttcgatttcttggctttatatatcttgtggaaaggacgaagaggtgaatactttgatcattcc

SEQ ID NO: 247 - DNA, 1904 bp, Homo sapiens
  source 1..1904: mol_type = genomic DNA
accgccaccatggcgtccacggattacagtacctatagccaagctgcagcgcagcagggctacagtgcttacaccgcccagcccactcaaggatatgcacagaccacccaggcatatgggcaacaaagctatggaacctatggacagcccactgatgtcagctatacccaggctcagaccactgcaacctatgggcagaccgcctatgcaacttcttatggacagcctcccactggttatactactccaactgccccccaggcatacagccagcctgtccaggggtatggcactggtgcttatgataccaccactgctacagtcaccaccacccaggcctcctatgcagctcagtctgcatatggcactcagcctgcttatccagcctatgggcagcagccagcagccactgcacctacaagctattcctctacacagccgactagttatgatcagagcagttactctcagcagaacacctatgggcaaccgagcagctatggacagcagagtagctatggtcaacaaagcagctatgggcagcagcctcccactagttacccaccccaaactggatcctacagccaagctccaagtcaatatagccaacagagcagcagctacgggcagcagagttcattccgacaggaccaccccagtagcatgggtgtttatgggcaggagtctggaggattttccggaccaggagagaaccggagcatgagtggccctgataaccggggcaggggaagagggggatttgatcgtggaggcatgagcagaggtgggcggggaggaggacgcggtggaatgggcagcgctggagagcgaggtggcttcaataagcctggtggacccatggatgaaggaccagatcttgatctaggcccacctgtagatccagatgaagactctgacaacagtgcaatttatgtacaaggattaaatgacagtgtgactctagatgatctggcagacttctttaagcagtgtggggttgttaagatgaacaagagaactgggcaacccatgatccacatctacctggacaaggaaacaggaaagcccaaaggcgatgccacagtgtcctatgaagacccacccactgccaaggctgccgtggaatggtttgatgggaaagattttcaagggagcaaacttaaagtctcccttgctcggaagaagcctccaatgaacagtatgcggggtggtctgccaccccgtgagggcagaggcatgccaccaccactccgtggaggtccaggaggcccaggaggtcctgggggacccatgggtcgcatgggaggccgtggaggagatagaggaggcttccctccaagaggaccccggggttcccgagggaacccctctggaggaggaaacgtccagcaccgagctggagactggcagtgtcccaatccgggttgtggaaaccagaacttcgcctggagaacagagtgcaaccagtgtaaggccccaaagcctgaaggcttcctcccgccaccctttccgcccccgggtggtgatcgtggcagaggtggccctggtggcatgcggggaggaagaggtggcctcatggatcgtggtggtcccggtggaatgttcagaggtggccgtggtggagacagaggtggcttccgtggtggccggggcatggaccgaggtggctttggtggaggaagacgaggtggccctggggggccccctggacctttgatggaacagatgggaggaagaagaggaggacgtggaggacctggaaaaatggataaaggcgagcaccgtcaggagcgcagagatcggccctactagtaatgaactagtccgtaacttgaaagtatttcgatttcttggctttatatatcttgtggaaaggacgatttaacatttcctggatcattaag

SEQ ID NO: 248 - DNA, 2072 bp, Homo sapiens
  source 1..2072: mol_type = genomic DNA
accgccaccatggcgtccacggattacagtacctatagccaagctgcagcgcagcagggctacagtgcttacaccgcccagcccactcaaggatatgcacagaccacccaggcatatgggcaacaaagctatggaacctatggacagcccactgatgtcagctatacccaggctcagaccactgcaacctatgggcagaccgcctatgcaacttcttatggacagcctcccactggttatactactccaactgccccccaggcatacagccagcctgtccaggggtatggcactggtgcttatgataccaccactgctacagtcaccaccacccaggcctcctatgcagctcagtctgcatatggcactcagcctgcttatccagcctatgggcagcagccagcagccactgcacctacaagaccgcaggatggaaacaagcccactgagactagtcaacctcaatctagcacagggggttacaaccagcccagcctaggatatggacagagtaactacagttatccccaggtacctgggagctaccccatgcagccagtcactgcacctccatcctaccctcctaccagctattcctctacacagccgactagttatgatcagagcagttactctcagcagaacacctatgggcaaccgagcagctatggacagcagagtagctatggtcaacaaagcagctatgggcagcagcctcccactagttacccaccccaaactggatcctacagccaagctccaagtcaatatagccaacagagcagcagctacgggcagcagagttcattccgacaggaccaccccagtagcatgggtgtttatgggcaggagtctggaggattttccggaccaggagagaaccggagcatgagtggccctgataaccggggcaggggaagagggggatttgatcgtggaggcatgagcagaggtgggcggggaggaggacgcggtggaatgggcagcgctggagagcgaggtggcttcaataagcctggtggacccatggatgaaggaccagatcttgatctaggcccacctgtagatccagatgaagactctgacaacagtgcaatttatgtacaaggattaaatgacagtgtgactctagatgatctggcagacttctttaagcagtgtggggttgttaagatgaacaagagaactgggcaacccatgatccacatctacctggacaaggaaacaggaaagcccaaaggcgatgccacagtgtcctatgaagacccacccactgccaaggctgccgtggaatggtttgatgggaaagattttcaagggagcaaacttaaagtctcccttgctcggaagaagcctccaatgaacagtatgcggggtggtctgccaccccgtgagggcagaggcatgccaccaccactccgtggaggtccaggaggcccaggaggtcctgggggacccatgggtcgcatgggaggccgtggaggagatagaggaggcttccctccaagaggaccccggggttcccgagggaacccctctggaggaggaaacgtccagcaccgagctggagactggcagtgtcccaatccgggttgtggaaaccagaacttcgcctggagaacagagtgcaaccagtgtaaggccccaaagcctgaaggcttcctcccgccaccctttccgcccccgggtggtgatcgtggcagaggtggccctggtggcatgcggggaggaagaggtggcctcatggatcgtggtggtcccggtggaatgttcagaggtggccgtggtggagacagaggtggcttccgtggtggccggggcatggaccgaggtggctttggtggaggaagacgaggtggccctggggggccccctggacctttgatggaacagatgggaggaagaagaggaggacgtggaggacctggaaaaatggataaaggcgagcaccgtcaggagcgcagagatcggccctactagtaatgaactagtccgtaacttgaaagtatttcgatttcttggctttatatatcttgtggaaaggacgaatactcgcgcggccgtcatcacac

SEQ ID NO: 249 - DNA, 1166 bp, Homo sapiens
  source 1..1166: mol_type = genomic DNA
accgccaccatggcgtccacggattacagtacctatagccaagctgcagcgcagcagggctacagtgcttacaccgcccagcccactcaaggatatgcacagaccacccaggcatatgggcaacaaagctatggaacctatggacagcccactgatgtcagctatacccaggctcagaccactgcaacctatgggcagaccgcctatgcaacttcttatggacagcctcccactggttatactactccaactgccccccaggcatacagccagcctgtccaggggtatggcactggtgcttatgataccaccactgctacagtcaccaccacccaggcctcctatgcagctcagtctgcatatggcactcagcctgcttatccagcctatgggcagcagccagcagccactgcacctacaagaccgcaggatggaaacaagcccactgagactagtcaacctcaatctagcacagggggttacaaccagcccagcctaggatatggacagagtaactacagttatccccaggtacctgggagctaccccatgcagccagtcactgcacctccatcctaccctcctaccagctattcctctacacagccgactagttatgatcagagcagttactctcagcagaacacctatgggcaaccgagcagctatggacagcagagtagctatggtcaacaaagcagctatgggcagcagcctcccactagttacccaccccaaactggatcctacagccaagctccaagtcaatatagccaacagagcagcagctacgggcagcagagttcattccgacaggaccaccccagtagcatgggtgtttatgggcaggagtctggaggattttccggaccaggagagaaccggagcatgagtggccctgataaccggggcaggggaagagggggatttgatcgtggaggcatgagcagaggtgggcggggaggaggacgcggtggaatggggttacaaagtgagagccttgtatacacttcaatacttaaaaagtacccgtactcagtactcagccggcagcataatgaaaagtgggactagtaatgaactagtccgtaacttgaaagtatttcgatttcttggctttatatatcttgtggaaaggacgagtcagggttgatagtggctaactc

SEQ ID NO: 250 - DNA, 2069 bp, Homo sapiens
  source 1..2069: mol_type = genomic DNA
accgccaccatggcgtccacggattacagtacctatagccaagctgcagcgcagcagggctacagtgcttacaccgcccagcccactcaaggatatgcacagaccacccaggcatatgggcaacaaagctatggaacctatggacagcccactgatgtcagctatacccaggctcagaccactgcaacctatgggcagaccgcctatgcaacttcttatggacagcctcccactggttatactactccaactgccccccaggcatacagccagcctgtccaggggtatggcactggtgcttatgataccaccactgctacagtcaccaccacccaggcctcctatgcagctcagtctgcatatggcactcagcctgcttatccagcctatgggcagcagccagcagccactgcacctacaagaccgcaggatggaaacaagcccactgagactagtcaacctcaatctagcacagggggttacaaccagcccagcctaggatatggacagagtaactacagttatccccaggtacctgggagctaccccatgcagccagtcactgcacctccatcctaccctcctaccagctattcctctacacagccgactagttatgatcagagcagttactctcagcagaacacctatgggcaaccgagcagctatggacagcagagtagctatggtcaacaaagcagctatgggcagcagcctcccactagttacccaccccaaactggatcctacagccaagctccaagtcaatatagccaacagagcagcagctacgggcagcagagttcattccgacaggaccaccccagtagcatgggtgtttatgggcaggagtctggaggattttccggaccaggagagaaccggagcatgagtggccctgataaccggggcaggggaagagggggatttgatcgtggaggcatgagcagaggtgggcggggaggaggacgcggtggaatgggcgctggagagcgaggtggcttcaataagcctggtggacccatggatgaaggaccagatcttgatctaggcccacctgtagatccagatgaagactctgacaacagtgcaatttatgtacaaggattaaatgacagtgtgactctagatgatctggcagacttctttaagcagtgtggggttgttaagatgaacaagagaactgggcaacccatgatccacatctacctggacaaggaaacaggaaagcccaaaggcgatgccacagtgtcctatgaagacccacccactgccaaggctgccgtggaatggtttgatgggaaagattttcaagggagcaaacttaaagtctcccttgctcggaagaagcctccaatgaacagtatgcggggtggtctgccaccccgtgagggcagaggcatgccaccaccactccgtggaggtccaggaggcccaggaggtcctgggggacccatgggtcgcatgggaggccgtggaggagatagaggaggcttccctccaagaggaccccggggttcccgagggaacccctctggaggaggaaacgtccagcaccgagctggagactggcagtgtcccaatccgggttgtggaaaccagaacttcgcctggagaacagagtgcaaccagtgtaaggccccaaagcctgaaggcttcctcccgccaccctttccgcccccgggtggtgatcgtggcagaggtggccctggtggcatgcggggaggaagaggtggcctcatggatcgtggtggtcccggtggaatgttcagaggtggccgtggtggagacagaggtggcttccgtggtggccggggcatggaccgaggtggctttggtggaggaagacgaggtggccctggggggccccctggacctttgatggaacagatgggaggaagaagaggaggacgtggaggacctggaaaaatggataaaggcgagcaccgtcaggagcgcagagatcggccctactagtaatgaactagtccgtaacttgaaagtatttcgatttcttggctttatatatcttgtggaaaggacgaaatgcctccgtagcgatgtacatg

SEQ ID NO: 251 - DNA, 1781 bp, Homo sapiens
  source 1..1781: mol_type = genomic DNA
accgccaccatggacaatcagtgcaccgtccaggtgaggttagagctggggcatcgcgcccaactgcgcaagaagcccaccacggaggggttcactcacgactggatggtgtttgtccgcggccccgagcaatgtgacatccagcacttcgtggagaaggtggtcttctggctgcacgacagcttccccaagcccagacgcgtgtgcaaggagcccccctacaaagtagaggagtcggggtacgctggcttcatcatgcccatcgaggtgcacttcaaaaacaaggaggagccgaggaaggtctgcttcacctacgacctgttcctgaacctggaaggcaacccgcccgtgaaccacctgcgctgcgagaagctcaccttcaacaaccccaccacggagttccggtacaagctcctgcgggccggcggggtgatggtaatgcccgaaggagcagacacggtgtccaggcccagtcccgactaccccatgttacccacaattccactctctgccttctctgaccccaagaagaccaaaccatcccacggctccaaggacgccaacaaggagagcagcaagacctccaagccacacaaggtgaccaaggagcaccgggagcggccccgcaaagactccgagagcaagagctcctccaaggagctggagcgtgagcaggccaaaagctccaaggacacctcgcggaagctgggcgagggccggctgcccaaggaggagaaggcgccaccgcccaaggctgccttcaaggaacccaagatggccctgaaagagaccaagctggaaagcacgtcccccaagggtgggcccccacccccacccccacccccaccccgggcttccagcaagcggccggccaccgccgactcgccaaagcccagcgccaagaagcagaagaagagcagctcgaaggggtcccggagtgctccaggcacctcgccccgcacctcctcctcctcctccttctcggacaagaagccggccaaggacaagagcagcaccagaggggagaaggtgaaggccgagagtgagccccgggaggccaaaaaggccctggaggtggaggagtccaactcagaggacgaggcctccttcaagtccgagtctgcccagtcaagcccgtccaactccagctccagctcagactccagctcagactcagacttcgagccatcccagaaccacagccaaggacccctgcgctccatggtggaggacctgcagtccgaggagtccgacgaggacgactcttcgtcaggcgaggaggctgccggcaagaccaacccggggagggactccaggttgagcttcagcgacagcgagagtgacaacagcgccgactcctccctgcccagccgtgagcccccacccccccagaagccacccccgcccaacagcaaggtgtcaggccggaggagccccgagtcctgcagcaagcctgagaagatcctcaagaagggcacctacgacaaggcctacacggatgagctggtggagctacaccggaggctgatggcgctgcgggagcgcaacgtgctgcagcagattgtgaatctgatcgaggagactggccacttcaatgtcaccaacaccaccttcgacttcgacctcttctccctggacgagaccaccgtgcgcaaactgcagagctgcctggaggccgtggccacatagtaatgaactagtccgtaacttgaaagtatttcgatttcttggctttatatatcttgtggaaaggacgacgcagcgtcgcgcccggagggagt

SEQ ID NO: 252 - DNA, 1451 bp, Homo sapiens
  source 1..1451: mol_type = genomic DNA
accgccaccatgtgcttcctgttttccaccttcccgcggactggcaagtgccacgtgcagaccattcagctgtgccgccggctcactgtggagttcatgcactacattatcgctgcccgtgccctgcgcaaggtcttcctgtccatcaaaggcatttactaccaggccgaggtactggggcagcccatcgtgtggatcactccctatgccttctcccatgaccacccgacagacgtggactacagggtcatggccaccttcaccgagttctacaccacgctgctgggctttgtcaacttccgcctttaccagttgctcaacctccactatcccccgaagctcgagggtcaggcccaagcagaggcaaaggccggtgagggcacctacgcgttggactccgagagttgtatggagaaactggcagccctcagtgccagcctggcccgcgtggtggtgcctgccacagaggaggaggccgaggtggatgagtttcccaccgatggggagatgtcagcgcaggaggaagaccgcaggaaggagctggaggcgcaggagaagcacaagaagctttttgagggcctgaagttcttcctgaaccgagaggtgccccgtgaggccctggccttcatcatcaggagttttggtggggaagtgtcctgggacaaatctttgtgcattggggccacctatgacgtcacagactcccgcatcacccatcagattgtcgaccggcctgggcagcagacctcagtcattggcaggtgctacgtgcagccccagtgggtgtttgactcagtgaacgccaggctccttctccccgtggcagagtacttctctggggtgcagctgcccccacacctttcaccctttgtgaccgagaaggaaggagattacgttccacctgagaagctgaagctgctggctctgcagcggggagaggacccaggaaacctgaatgagtcagaagaggaggaggaagaggacgacaacaacgaaggtgatggtgatgaagagggagaaaatgaggaggaggaggaagatgcagaggctggttcagaaaaggaggaagaggcccggctggcagccctggaagagcagaggatggaggggaagaagcccagggtgatggcaggcaccttgaagctggaggataagcagcggctggcccaggaggaggagagtgaggccaagcgcctggccattatgatgatgaagaagcgggagaagtacctgtaccagaagatcatgtttggcaagaggcgaaaaatccgagaggccaacaagctggcggagaagcggaaagcccacgatgaggcggtgaggtctgagaagaaggccaagaaggcaaggccggagtagtaatgaactagtccgtaacttgaaagtatttcgatttcttggctttatatatcttgtggaaaggacgatcttctaatgtataaacgattagg

SEQ ID NO: 253 - DNA, 1853 bp, Homo sapiens
  source 1..1853: mol_type = genomic DNA
accgccaccatgggaggccttgagaagaagaagtatgaacgaggctcggccaccaactacatcacccggaacaaagcccggaagaagctccagctgagcttggctgactttaggcggctgtgcattctgaagggcatttatccccatgaacccaaacacaagaagaaggttaacaagggttctacagcagcccgaacgttttaccttatcaaagacatcaggtttctcctccacgaacccattgtcaacaagttccgtgaatacaaggtgttcgtccggaagctccggaaggcttatgggaagagcgagtggaacactgtagagcgtttaaaggacaataagcccaactacaaactcgaccacatcatcaaggaacggtatcccacgttcatcgatgccctgcgggacctggacgatgccctctccatgtgcttcctgttttccaccttcccgcggactggcaagtgccacgtgcagaccattcagctgtgccgccggctcactgtggagttcatgcactacattatcgctgcccgtgccctgcgcaaggtcttcctgtccatcaaaggcatttactaccaggccgaggtactggggcagcccatcgtgtggatcactccctatgccttctcccatgaccacccgacagacgtggactacagggtcatggccaccttcaccgagttctacaccacgctgctgggctttgtcaacttccgcctttaccagttgctcaacctccactatcccccgaagctcgagggtcaggcccaagcagaggcaaaggccggtgagggcacctacgcgttggactccgagagttgtatggagaaactggcagccctcagtgccagcctggcccgcgtggtggtgcctgccacagaggaggaggccgaggtggatgagtttcccaccgatggggaggaagaccgcaggaaggagctggaggcgcaggagaagcacaagaagctttttgagggcctgaagttcttcctgaaccgagaggtgccccgtgaggccctggccttcatcatcaggagttttggtggggaagtgtcctgggacaaatctttgtgcattggggccacctatgacgtcacagactcccgcatcacccatcagattgtcgaccggcctgggcagcagacctcagtcattggcaggtgctacgtgcagccccagtgggtgtttgactcagtgaacgccaggctccttctccccgtggcagagtacttctctggggtgcagctgcccccacacctttcaccctttgtgaccgagaaggaaggagattacgttccacctgagaagctgaagctgctggctctgcagcggggagaggacccaggaaacctgaatgagtcagaagaggaggaggaagaggacgacaacaacgaaggtgatggtgatgaagagggagaaaatgaggaggaggaggaagatgcagaggctggttcagaaaaggaggaagaggcccggctggcagccctggaagagcagaggatggaggggaagaagcccagggtgatggcaggcaccttgaagctggaggataagcagcggctggcccaggaggaggagagtgaggccaagcgcctggccattatgatgatgaagaagcgggagaagtacctgtaccagaagatcatgtttggcaagaggcgaaaaatccgagaggccaacaagctggcggagaagcggaaagcccacgatgaggcggtgaggtctgagaagaaggccaagaaggcaaggccggagtagtaatgaactagtccgtaacttgaaagtatttcgatttcttggctttatatatcttgtggaaaggacgaatcgcgtaaagtcgtccatctagt

SEQ ID NO: 254 - DNA, 2447 bp, Homo sapiens
  source 1..2447: mol_type = genomic DNA
accgccaccatgtcctcttcctcccccaccgggcagatcgcaagtgcggcggacatcaagcaagagaatgggatggaaagcgcctcggaagggcaggaggcgcaccgagaagtggcggggggcgcggcggtagggctgagccccccggctccagccccttttcccctggagccgggggacgccgcgaccgctgccgccagggtgagcggagaggaaggggcagtggcggcggcggcggccggagcggcggcggatcaggtacaactccactcggaacttctgggcaggcaccaccacgccgccgccgccgccgcgcagaccccgctggccttctcgcccgaccacgtcgcctgcgtgtgcgaggcactgcagcaggggggcaacctggaccgcctggcccggttcctgtggtccctgccccagagcgacctgctacgtggcaacgagagcctgctgaaggcgcgggcgctcgtggccttccaccagggcatctaccccgagctctacagcatcctcgagagccacagcttcgagtcggccaaccacccgctgctgcagcagctctggtacaaggcgcgctacaccgaggccgagcgagcccgcggccggccgctgggagccgtagacaagtaccggctgcgcaggaaattccccctgccccgcaccatctgggacggcgaggagacggtgtattgtttcaaggagaagtcgcgcaacgcgctcaaggagctctacaagcagaatcgctacccttcgcccgccgagaagcggcacctggccaagatcaccggcctctccctcacccaggtcagcaactggttcaagaaccgccggcagcgcgacaggaacccctccgagacccagtccaaaagtgagtcagatggcaaccccagcactgaagatgaatccagcaagggacatgaggatttatctcctcacccactctccagttcatctgatggcatcaccaacctcagcctttccagtcatatggagccagtatatatgcaacaaattggaaatgctaagatatcattaagctcttctggagttctgttgaatggaagcttggtacctgcaagtacttcacctgtcttccttaatggaaattcttttattcagggacccagtggagttatccttaatggattaaatgtgggaaatacacaggcagtggcattgaacccaccaaaaatgtcatcaaacattgtgagcaatggtatatccatgactgacatactggggtctacttcccaggacgtgaaggaattcaaagtcctccagagttctgctaactcagcaaccaccacgtcctacagccccagtgtccctgtctcattcccaggcctgatacccagcactgaggtgaaaagagaaggcattcaaacagtggcttcccaagatggagggtctgtagtgacttttactacaccagtgcaaattaaccagtatggcattgtccagatccccaattccggagcaaacagccagttccttaatgggagcattggattctctccactgcagctgccccctgtgtcagtggcagcttcacaaggtaatatctcagtaagctcaagcacttcagatggaagcacatttacaagtgagtctaccacagtccagcaaggaaaggttttcttgagctctcttgctcccagtgcagtggtatacacggttcctaatacaggccagactataggatctgtgaaacaggaaggcttggaaaggagcctggtattttctcagttgatgcctgtcaatcagaatgcacaagtaaatgcaaacctgtcttctgaaaacatctcggggagtggcctgcatccactggcctcctcattagttaatgtatctccaactcacaatttttctctcagtccctctacactactaaatcccactgagctaaaccgcgacattgccgatagccaaccaatgtctgcaccggtggcaagcaaatctactgtgacatctgtcagcaacactaactatgcaactcttcagaactgctcccttattactggtcaagacctattgtcagtccctatgactcaggctgcccttggggaaatagttcctacagctgaagatcaggtaggtcacccctccccagcagtacatcaggattttgtccaagaacatcgtttggttctgcaatcggtagctaacatgaaagagaatttcttatcaaattctgagagcaaagcaacaagtagcttaatgatgctggactctaaatccaagtatgtcttagatggcatggttgatactgtctgtgaagacctggaaacagacaaaaaagagcttgccaagctccagactgtccagctggatgaagatatgcaagacttatagtaatgaactagtccgtaacttgaaagtatttcgatttcttggctttatatatcttgtggaaaggacgattcacttggccagcttaggagagg

SEQ ID NO: 255 - DNA, 2321 bp, Homo sapiens
  source 1..2321: mol_type = genomic DNA
accgccaccatggctaccttgcctgcggagccgagcgcggggccggcggctgggggggaggcggtggcggcggcggcggcgaccgaagaggaggaggaggaagcgcgccagctcttgcagactttgcaggcggccgagggtgaggcggcggcggcggccggggccggggcgggcgcagcggctgcgggagctgagggcccgggatccccgggcgtccccgggtcgccccccgaggccgcttccgaaccgcccacgggcctccgcttctcgcccgagcaggtggcgtgcgtctgcgaggcgctgctccaggcgggccacgccggccgcttgagccgcttcctgggcgcactgcccccggccgagcgcctacgtggcagcgacccggtgttgcgcgcgcgggccctggtggccttccagcggggcgagtacgccgagctctaccggctactcgagagccgccccttccccgccgcccaccacgccttcctgcaggacctctacctgcgcgcgcgctaccatgaggccgagcgggcccgcggccgcgcgcttggcgcagtggacaagtatcgactgcgcaagaagttcccgctgcccaagaccatctgggacggcgaggagacagtctactgcttcaaggagcgctcccgcgcagcgctcaaggcctgctaccgcggcaaccgctaccccacgccggacgagaagcgccgcctggccacactcaccggcctgtcgctcacgcaggtcagcaactggttcaagaaccggcgacagcgcgaccggaccggggccggaggcggcgcgccctgcaagagcgagtctgatgggaatcccacgactgaggacgagtccagccgaagtcctgaggacctggagagaggggcggccccagtgtccgccgaggccgctgcccagggctccatattcctggcagggaccggccctcccgcgccttgcccggcttcctcctccatcctggtgaacgggagcttcctggcagccagcggctccccagcagtgctcctcaacgggggccccgtcatcatcaacggcctggccctgggcgaggcctccagcctgggcccgctgctgctcactgggggcgggggtgcccctccaccgcagcccagccctcagggggccagcgagaccaagacctctctggtcctggaccctcagacaggggaggtgcggctggaggaggctcagtcggaggcccctgagaccaaaggggcccaggtggctgctccgggaccagcccttggagaggaggtcctggggcccctggcccaagtggtgcctggccccccgacggctgccacctttcctctgcccccggggccagtgcctgctgtggctgccccacaagtggtaccgctctccccacccccggggtatcccacgggcctgagccccacctccccactattgaacctgccccaggtagtacccacctcacaggtggtgaccctgccccaggctgtggggcccctgcagctgttggcagccgggccaggcagccctgtgaaggtggcagctgcagcaggccctgccaatgtgcacctcatcaactccggggtgggcgtgactgccctgcagctgccttcggccactgccccaggaaacttcctcctggccaaccctgtgtctggcagccccatcgtgacgggtgtggccctgcagcagggcaagatcatcctcaccgccaccttccccaccagcatgctcgtctcccaggtcctgccgccagcccccggcctggccctgccactgaagccagagacggccatctccgtgcctgagggaggcctcccggtggcccccagccctgctctcccagaggctcacgccctaggcaccctttctgcacagcagccaccccccgccgctgccaccacctccagcaccagcctgcccttctcccctgactcccctggcctcctgcccaacttcccggcgcccccaccagaggggctgatgttgtcacccgcggccgtgcctgtctggtcagcagggctggaactaagcgcaggaacagaggggctgctggaagcggaaaaggggctggggacacaggccccccacaccgtgctgaggctgccagaccccgaccctgaggggctgctcctgggggccaccgcagggggtgaggttgacgaggggttggaagctgaggccaaggttctgacccagctccagtcggtgcctgtggaggagcccttggaactgtagtaatgaactagtccgtaacttgaaagtatttcgatttcttggctttatatatcttgtggaaaggacgacatgtagataaagacctccttcat

SEQ ID NO: 256 - DNA, 842 bp, Homo sapiens
  source 1..842: mol_type = genomic DNA
accgccaccatgttccagctgcccatcttgaatttcagcccccagcaagtggccggggtatgtgagaccctggaagagagcggcgatgtggagcgcctgggtcgcttcctctggtcgctgcccgtggcccctgcggcctgcgaggccctcaacaagaatgagtcggtgctacgcgcacgagccatcgtggcctttcacggtggcaactaccgcgagctctatcatatcctggaaaaccacaagttcaccaaggagtcgcacgccaagctgcaggcgctgtggcttgaagcacactaccaggaggctgagaagctgcgtggaagacccctgggacctgtggacaagtaccgagtaaggaagaagttcccgctgccgcgcaccatttgggacggcgaacagaagacacactgcttcaaggagcgcacgcggcacctgctacgcgagtggtacctgcaggatccataccctaaccccagcaaaaaacgtgagctcgcccaggcaaccggactgacccctacgcaggtgggcaactggttcaaaaaccgccgacaaagggaccgagcggctgcagccaagaacagactccagcagcaggtcctgtcacagggttccgggcgggcactacgggcggagggcgacggcacgccagaggtgctgggcgtcgccaccagcccggccgccagtctatccagcaaggcggccacttcagccatctccatcacgtccagcgacagcgagtgcgacatctagtaatgaactagtccgtaacttgaaagtatttcgatttcttggctttatatatcttgtggaaaggacgacttatgcgcaaggtaggctaatct

SEQ ID NO: 257 - DNA, 956 bp, Homo sapiens
  source 1..956: mol_type = genomic DNA
accgccaccatgtcgatgctgccgtcgtttggctttacgcaggagcaagtggcgtgcgtgtgcgaggttctgcagcaaggcggaaacctggagcgcctgggcaggttcctgtggtcactgcccgcctgcgaccacctgcacaagaacgagagcgtactcaaggccaaggcggtggtcgccttccaccgcggcaacttccgtgagctctacaagatcctggagagccaccagttctcgcctcacaaccaccccaaactgcagcaactgtggctgaaggcgcattacgtggaggccgagaagctgcgcggccgacccctgggcgccgtgggcaaatatcgggtgcgccgaaaatttccactgccgcgcaccatctgggacggcgaggagaccagctactgcttcaaggagaagtcgaggggtgtcctgcgggagtggtacgcgcacaatccctacccatcgccgcgtgagaagcgggagctggccgaggccaccggcctcaccaccacccaggtcagcaactggtttaagaaccggaggcaaagagaccgggccgcggaggccaaggaaagggagaacaccgaaaacaataactcctcctccaacaagcagaaccaactctctcctctggaagggggcaagccgctcatgtccagctcagaagaggaattctcacctccccaaagtccagaccagaactcggtccttctgctgcagggcaatatgggccacgccaggagctcaaactattctctcccgggcttaacagcctcgcagcccagtcacggcctgcagacccaccagcatcagctccaagactctctgctcggccccctcacctccagtctggtggacttggggtcctagtaatgaactagtccgtaacttgaaagtatttcgatttcttggctttatatatcttgtggaaaggacgagcgagcgtcacacatgtcctggcc

SEQ ID NO: 258 - DNA, 977 bp, Homo sapiens
  source 1..977: mol_type = genomic DNA
accgccaccatgtccatgctgcccaccttcggcttcacgcaggagcaagtggcgtgcgtgtgcgaggtgctgcagcagggcggcaacatcgagcggctgggccgcttcctgtggtcgctgcccgcctgcgagcaccttcacaagaatgaaagcgtgctcaaggccaaggccgtggtggccttccaccgcggcaacttccgcgagctctacaagatcctggagagccaccagttctcgccgcacaaccacgccaagctgcagcagctgtggctcaaggcacactacatcgaggcggagaagctgcgcggccgacccctgggcgccgtgggcaaataccgcgtgcgccgcaaattcccgctgccgcgctccatctgggacggcgaggagaccagctactgcttcaaggaaaagagtcgcagcgtgctgcgcgagtggtacgcgcacaacccctacccttcaccccgcgagaagcgtgagctggcggaggccacgggcctcaccaccacacaggtcagcaactggttcaagaaccggcggcagcgcgaccgggcggccgaggccaaggaaagggagaacaacgagaactccaattctaacagccacaacccgctgaatggcagcggcaagtcggtgttaggcagctcggaggatgagaagactccatcggggacgccagaccactcatcatccagccccgcactgctcctcagcccgccgccccctgggctgccgtccctgcacagcctgggccaccctccgggccccagcgcagtgccagtgccggtgccaggcggaggtggagcggacccactgcaacaccaccatggcctgcaggactccatcctcaaccccatgtcagccaacctcgtggacctgggctcctagtaatgaactagtccgtaacttgaaagtatttcgatttcttggctttatatatcttgtggaaaggacgagaacccatccagtaacaaacatta

SEQ ID NO: 259 - DNA, 1100 bp, Homo sapiens
  source 1..1100: mol_type = genomic DNA
accgccaccatggtattccgctcccccctagacctctattcctcccacttcttgttgccaaacttcgccgattctcaccaccgctccatacttctggcgagtagcggcggcgggaacggtgcgggaggcggcggcggcgcgggaggcggcagcggcggcgggaacggtgcgggaggcggcggtgctggcggagcaggcggcggcggcggcggcggctccagggcccccccggaagagttgtccatgttccagctgcccaccctcaacttctcgccggagcaggtggccagcgtctgtgagacgctggaggagacgggcgacatcgagcggctgggccgcttcctctggtcgctgcccgtggcccccggggcgtgcgaggccatcaacaaacacgagtcgatcctgcgcgcgcgcgccgtggtcgccttccacacgggcaacttccgcgacctctaccacatccttgagaaccacaagttcaccaaggagtctcacggcaagctgcaggccatgtggctcgaggcgcactaccaggaggccgagaagctgcgcggccgcccactcggcccggtggacaagtaccgcgtgcgcaagaagttcccgctgccacgcaccatctgggacggcgagcagaagacgcattgcttcaaggagcggactcggagcctgttgcgggagtggtacctacaggacccctaccccaaccccagcaagaaacgcgaactggcgcaggccaccggcctcactcccacacaagtaggcaactggtttaagaaccggcggcagcgcgaccgcgccgcggcggccaagaacaggctccagcaccaggccattggaccgagcggcatgcgctcgctggccgagcccggctgccccacgcacggctcggcagagtcgccgtccacggcggccagcccgaccaccagcgtgtccagcctgacggagcgcgcagacaccggcacctccatcctctcggtaacctccagcgactcggaatgtgatgtatagtaatgaactagtccgtaacttgaaagtatttcgatttcttggctttatatatcttgtggaaaggacgatcaatgtaagggacctggaggtga

SEQ ID NO: 260 - DNA, 1310 bp, Homo sapiens
  source 1..1310: mol_type = genomic DNA
accgccaccatggcggtggtggccacgctgaggctctctgctcagggcacagtgacttttgaagacgtggctgtgaaatttacccaggaggaatggaatctccttagtgaggctcagagatgcctgtaccgtgatgtgactctggagaacctggcacttatgtcctccctgggttgttggtgtggagtggaagatgaggcggcaccttctaagcagagtatttatatacaaagagagactcaggtcaggactcctgtgacaggtgtgtctcccaagaaggcccacccctgtgagatgtgtggcccgatcttgggagacattttgcatgtggcagatcatcagggaacacatcacaagcagaaactgcacaggtgtgaggcctgggggaataaattgtatgacagtggaaactttcatcagcaccagaatgagcacattggagagaaaccctacagagggagtgttgaggaggcgttgtttgtgaagaggtgtaagttgcatgtgtcaggggagtcatctgtcttcagtgagagtgggaaggactttttgcccaggtcaggattactccagcaggaggccagtcacactggggagaagtcaaacagcaaaactgagtgtgtgtctccctttcagtgtgggggagctcactatagccatggagattccatgaaacattttagcaccaaacatatactcagtcagcaccagagacttctccctcgagaagaatgttatgtgtgctgtgaatgtgggaaatcctttagcaaatatgttagcttcagtaatcatcagagagttcacagtggaaaaagaccttatgaatgtggagaatgtgagaaatcttttagtcaaaagagcagcctcattcaacatcagcaatttcacactggaggaaaaccttatgggtgtgaagaatgtgggaaatattttagcttagaaggatatcttaggcgccatcaaaaagttcacgctggaaaagggccttatgagtgtggagaatgtgggaaatcttttagttcaaacgtgaaccttaagagtcatcagcgcattcacactggagagagaccttacaagtgtggagaatgtgagaaatcttttagtcggaagcccagccttagttaccatcagcgctttgggaggccgaggtgggtggatcacaaggacaggaaggagttcaagaccagcctgggcaatatagtgaaatcctgtctcttctagtaatgaactagtccgtaacttgaaagtatttcgatttcttggctttatatatcttgtggaaaggacgagggttatggagatccagccgctag

SEQ ID NO: 261 - DNA, 1682 bp, Homo sapiens
  source 1..1682: mol_type = genomic DNA
accgccaccatgccacagcagctcctgatcaccctgcctaccgaggccagcacctgggtgaagctgcaacatccaaagaaggccgtggagggggcgcccctgtgggaggatgtgactaaaatgtttgaaggagaagctctgctgtctcaggatgctgaggacgtaaagacccagagagaaagtttagaggatgaagtgacccctggactcccgacagcagaatcccaggaattgttgactttcaaggacatatctattgacttcacccaggaagagtgggggcagctggctcctgctcaccagaatctataccgagaggtgatgctggagaactacagcaacttggtgtcagtgggatatcaactttccaaacctagtgtgatatcccagttagagaaaggagaagagccatggatggcagagaaagaaggcccaggagatcccagttcagacttgaagagtaaaatagaaaccattgagtcaactgcaaagagtaccatttcacaggagcgcttatatcatggcattatgatggaaagtttcatgagggatgatataatttattccacgttgagaaaagtctccacatatgatgatgtcttagaaaggcaccaggaaacttgtatgagagatgtgagacaagccatcttgacccataagaagagagtccaagaaactaacaaatttggggaaaatatcattgtgcattcaaatgttattattgaacagaggcaccataaatatgatacacctacaaagcggaacacatacaaattagatttgattaatcatccaacaagttacataagaacaaaaacctatgaatgtaatatatgtgaaaaaatcttcaaacaacctattcaccttactgaacatatgagaattcatactggtgagaaacctttcagatgtaaggaatgtggaagggcctttagtcaaagtgcatccctcagtacacaccagagaatccatactggtgagaaaccctttgaatgtgaggaatgtgggaaagccttcagacatcgctcatcacttaatcagcatcatagaactcacactggggagaaaccctatgtatgtgataaatgtcagaaagctttcagccagaacattagcttggttcaacatttgaggactcattctggagagaaaccttttacttgcaatgaatgtgggaaaacctttagacagattagacaccttagtgaacatataagaattcataccggggagaagccctatgcatgcactgcatgttgtaaaacctttagtcatagagcgtatctaacacatcaccagagaatccatactggggagagaccctacaaatgtaaagaatgtggaaaagcctttaggcagaggatacaccttagcaaccataaaactgttcatacaggagtgaaagcatatgaatgcaaccgctgtggaaaagcctataggcatgattcatcctttaaaaaacatcagagacatcacactggagaaaaaccttacgaatgtaacgaatgtggaaaagccttcagctataactcttcacttagtcgacatcatgaaatacacaggaggaacgccttccgaaataaggtgtagtaatgaactagtccgtaacttgaaagtatttcgatttcttggctttatatatcttgtggaaaggacgaatctttccacaccctgtaacagga

SEQ ID NO: 262 - DNA, 1616 bp, Homo sapiens
  source 1..1616: mol_type = genomic DNA
accgccaccatgaaggctgcctacaccgcctatcgatgcctcaccaaagacctagaaggctgcgccatgaacccggagctgacaatggaaagtctgggcactttgcacgggccggccggcggcggcagtggcgggggcggcggcgggggcggcgggggcggcggcgggggcccgggccatgagcaggagctgctggccagccccagcccccaccacgcgggccgcggcgccgctggctcgctgcggggccctccgccgcctccaaccgcgcaccaggagctgggcacggcggcagcggcggcagcggcggcgtcgcgctcggccatggtcaccagcatggcctcgatcctggacggcggcgactaccggcccgagctctccatcccgctgcaccacgccatgagcatgtcctgcgactcgtctccgcctggcatgggcatgagcaacacctacaccacgctgacaccgctccagccgctgccacccatctccaccgtgtctgacaagttccaccaccctcacccgcaccaccatccgcaccaccaccaccaccaccaccaccagcgcctgtccggcaacgtcagcggcagcttcaccctcatgcgcgacgagcgcgggctcccggccatgaacaacctctacagtccctacaaggagatgcccggcatgagccagagcctgtccccgctggccgccacgccgctgggcaacgggctaggcggcctccacaacgcgcagcagagtctgcccaactacggtccgccgggccacgacaaaatgctcagccccaacttcgacgcgcaccacactgccatgctgacccgcggtgagcaacacctgtcccgcggcctgggcaccccacctgcggccatgatgtcgcacctgaacggcctgcaccacccgggccacactcagtctcacgggccggtgctggcacccagtcgcgagcggccaccctcgtcctcatcgggctcgcaggtggccacgtcgggccagctggaagaaatcaacaccaaagaggtggcccagcgcatcacagcggagctgaagcgctacagtatcccccaggcgatctttgcgcagagggtgctgtgccggtctcaggggactctctccgacctgctccggaatccaaaaccgtggagtaaactcaaatctggcagggagaccttccgcaggatgtggaagtggcttcaggagcccgagttccagcgcatgtccgccttacgcctggcagcgtgcaaacgcaaagagcaagaaccaaacaaagacaggaacaattcccagaagaagtcccgcctggtgttcactgacctccaacgccgaacactcttcgccatcttcaaggagaacaaacgcccgtcaaaggagatgcagatcaccatttcccagcagctgggcctggagctcacaaccgtcagcaacttcttcatgaacgcccggcgccgcagcctggagaagtggcaagacgatctgagcacagggggctcctcgtccacctccagcacgtgtaccaaagcatagtaatgaactagtccgtaacttgaaagtatttcgatttcttggctttatatatcttgtggaaaggacgattacaggcatgctctagccctaag

SEQ ID NO: 263 - DNA, 1832 bp, Homo sapiens
  source 1..1832: mol_type = genomic DNA
accgccaccatgcttcggtctgggccagcctctgggccgtccgtccccactggccgggccatgccgagtcgccgcgtcgccagaccgccggctgcgccggagctgggggccttagggtcccccgacctctcctcactctcgctcgccgtttccaggagcacagagatcatcgacgagtacatcaaggagaacggcttcggcctggacgggggacagccgggcccgggcgaggggctgccacgcctggtgtctcgcggggctgcgtccctgagcacggtcaccctgggccctgtggcgcccccagccacgccgccgccttggggctgccccctgggccgactagtgtccccagcgccgggcccgggcccgcagccgcacctggtcatcacggagcagcccaagcagcgcggcatgcgcttccgctacgagtgcgagggccgctcggccggcagcatccttggggagagcagcaccgaggccagcaagacgctgcccgccatcgagctccgggattgtggagggctgcgggaggtggaggtgactgcctgcctggtgtggaaggactggcctcaccgagtccacccccacagcctcgtggggaaagactgcaccgacggcatctgcagggtgcggctccggcctcacgtcagcccccggcacagttttaacaacctgggcatccagtgtgtgaggaagaaggagattgaggctgccattgagcggaagattcaactgggcattgacccctacaacgctgggtccctgaagaaccatcaggaagtagacatgaatgtggtgaggatctgcttccaggcctcatatcgggaccagcagggacagatgcgccggatggatcctgtgctttccgagcccgtctatgacaagaaatccacaaacacatcagagctgcggatttgccgaattaacaaggaaagcgggccgtgcaccggtggcgaggagctctacttgctctgcgacaaggtgcagaaagaggacatatcagtggtgttcagcagggcctcctgggaaggtcgggctgacttctcccaggccgacgtgcaccgccagattgccattgtgttcaagacgccgccctacgaggacctggagattgtcgagcccgtgacagtcaacgtcttcctgcagcggctcaccgatggggtctgcagcgagccattgcctttcacgtacctgcctcgcgaccatgacagctacggcgtggacaagaagcggaaacgggggatgcccgacgtccttggggagctgaacagctctgacccccatggcatcgagagcaaacggcggaagaaaaagccggccatcctggaccacttcctgcccaaccacggctcaggcccgttcctcccgccgtcagccctgctgccagaccctgacttcttctctggcaccgtgtccctgcccggcctggagccccctggcgggcctgacctcctggacgatggctttgcctacgaccctacggcccccacactcttcaccatgctggacctgctgcccccggcaccgccacacgctagcgctgttgtgtgcagcggaggtgccggggccgtggttggggagacccccggccctgaaccactgacactggactcgtaccaggccccgggccccggggatggaggcaccgccagccttgtgggcagcaacatgttccccaatcattaccgcgaggcggcctttgggggcggcctcctatccccggggcctgaagccacgtagtaatgaactagtccgtaacttgaaagtatttcgatttcttggctttatatatcttgtggaaaggacgagccgactaccaaattctagggtta

SEQ ID NO: 264 - DNA, 1757 bp, Homo sapiens
  source 1..1757: mol_type = genomic DNA
accgccaccatggacgaactgttccccctcatcttcccggcagagccagcccaggcctctggcccctatgtggagatcattgagcagcccaagcagcggggcatgcgcttccgctacaagtgcgaggggcgctccgcgggcagcatcccaggcgagaggagcacagataccaccaagacccaccccaccatcaagatcaatggctacacaggaccagggacagtgcgcatctccctggtcaccaaggaccctcctcaccggcctcacccccacgagcttgtaggaaaggactgccgggatggcttctatgaggctgagctctgcccggaccgctgcatccacagtttccagaacctgggaatccagtgtgtgaagaagcgggacctggagcaggctatcagtcagcgcatccagaccaacaacaaccccttccaagttcctatagaagagcagcgtggggactacgacctgaatgctgtgcggctctgcttccaggtgacagtgcgggacccatcaggcaggcccctccgcctgccgcctgtcctttctcatcccatctttgacaatcgtgcccccaacactgccgagctcaagatctgccgagtgaaccgaaactctggcagctgcctcggtggggatgagatcttcctactgtgtgacaaggtgcagaaagaggacattgaggtgtatttcacgggaccaggctgggaggcccgaggctccttttcgcaagctgatgtgcaccgacaagtggccattgtgttccggacccctccctacgcagaccccagcctgcaggctcctgtgcgtgtctccatgcagctgcggcggccttccgaccgggagctcagtgagcccatggaattccagtacctgccagatacagacgatcgtcaccggattgaggagaaacgtaaaaggacatatgagaccttcaagagcatcatgaagaagagtcctttcagcggacccaccgacccccggcctccacctcgacgcattgctgtgccttcccgcagctcagcttctgtccccaagccagcaccccagccctatccctttacgtcatccctgagcaccatcaactatgatgagtttcccaccatggtgtttccttctgggcagatcagccaggcctcggccttggccccggcccctccccaagtcctgccccaggctccagcccctgcccctgctccagccatggtatcagctctggcccaggccccagcccctgtcccagtcctagccccaggccctcctcaggctgtggccccacctgcccccaagcccacccaggctggggaaggaacgctgtcagaggccctgctgcagctgcagtttgatgatgaagacctgggggccttgcttggcaacagcacagacccagctgtgttcacagacctggcatccgtcgacaactccgagtttcagcagctgctgaaccagggcatacctgtggccccccacacaactgagcccatgctgatggagtaccctgaggctataactcgcctagtgacaggggcccagaggccccccgacccagctcctgctccactgggggccccggggctccccaatggcctcctttcaggagatgaagacttctcctccattgcggacatggacttctcagccctgctgagtcagatcagctcctagtaatgaactagtccgtaacttgaaagtatttcgatttcttggctttatatatcttgtggaaaggacgaacttaccgcttagggacgtatgta

SEQ ID NO: 265 - DNA, 1448 bp, Homo sapiens
  source 1..1448: mol_type = genomic DNA
accgccaccatggacgaactgttccccctcatcttcccggcagagccagcccaggcctctggcccctatgtggagatcattgagcagcccaagcagcggggcatgcgcttccgctacaagtgcgaggggcgctccgcgggcagcatcccaggcgagaggagcacagataccaccaagacccaccccaccatcaagatcaatggctacacaggaccagggacagtgcgcatctccctggtcaccaaggaccctcctcaccggcctcacccccacgagcttgtaggaaaggactgccgggatggcttctatgaggctgagctctgcccggaccgctgcatccacagtttccagaacctgggaatccagtgtgtgaagaagcgggacctggagcaggctatcagtcagcgcatccagaccaacaacaaccccttccaagttcctatagaagagcagcgtggggactacgacctgaatgctgtgcggctctgcttccaggtgacagtgcgggacccatcaggcaggcccctccgcctgccgcctgtcctttctcatcccatctttgacaatcgtgcccccaacactgccgagctcaagatctgccgagtgaaccgaaactctggcagctgcctcggtggggatgagatcttcctactgtgtgacaaggtgcagaaagaggacattgaggtgtatttcacgggaccaggctgggaggcccgaggctccttttcgcaagctgatgtgcaccgacaagtggccattgtgttccggacccctccctacgcagaccccagcctgcaggctcctgtgcgtgtctccatgcagctgcggcggccttccgaccgggagctcagtgagcccatggaattccagtacctgccagatacagacgatcgtcaccggattgaggagaaacgtaaaaggacatatgagaccttcaagagcatcatgaagaagagtcctttcagcggacccaccgacccccggcctccacctcgacgcattgctgtgccttcccgcagctcagcttctgtccccaagccagcaccccagccctatccctttacgtcatccctgagcaccatcaactatgatgagtttcccaccatggtgtttccttctgggcagatcagccaggcctcggccttggccccggcccctccccaagtcctgccccaggctccagcccctgcccctgctccagccatggtatcagctctggcccagaggccccccgacccagctcctgctccactgggggccccggggctccccaatggcctcctttcaggagatgaagacttctcctccattgcggacatggacttctcagccctgctgagtcagatcagctcctagtaatgaactagtccgtaacttgaaagtatttcgatttcttggctttatatatcttgtggaaaggacgacatcatgagtaaatcgcgtgagtc

SEQ ID NO: 266 - DNA, 1748 bp, Homo sapiens
  source 1..1748: mol_type = genomic DNA
accgccaccatggacgaactgttccccctcatcttcccggcagagccagcccaggcctctggcccctatgtggagatcattgagcagcccaagcagcggggcatgcgcttccgctacaagtgcgaggggcgctccgcgggcagcatcccaggcgagaggagcacagataccaccaagacccaccccaccatcaagatcaatggctacacaggaccagggacagtgcgcatctccctggtcaccaaggaccctcctcaccggcctcacccccacgagcttgtaggaaaggactgccgggatggcttctatgaggctgagctctgcccggaccgctgcatccacagtttccagaacctgggaatccagtgtgtgaagaagcgggacctggagcaggctatcagtcagcgcatccagaccaacaacaaccccttccaagaagagcagcgtggggactacgacctgaatgctgtgcggctctgcttccaggtgacagtgcgggacccatcaggcaggcccctccgcctgccgcctgtcctttctcatcccatctttgacaatcgtgcccccaacactgccgagctcaagatctgccgagtgaaccgaaactctggcagctgcctcggtggggatgagatcttcctactgtgtgacaaggtgcagaaagaggacattgaggtgtatttcacgggaccaggctgggaggcccgaggctccttttcgcaagctgatgtgcaccgacaagtggccattgtgttccggacccctccctacgcagaccccagcctgcaggctcctgtgcgtgtctccatgcagctgcggcggccttccgaccgggagctcagtgagcccatggaattccagtacctgccagatacagacgatcgtcaccggattgaggagaaacgtaaaaggacatatgagaccttcaagagcatcatgaagaagagtcctttcagcggacccaccgacccccggcctccacctcgacgcattgctgtgccttcccgcagctcagcttctgtccccaagccagcaccccagccctatccctttacgtcatccctgagcaccatcaactatgatgagtttcccaccatggtgtttccttctgggcagatcagccaggcctcggccttggccccggcccctccccaagtcctgccccaggctccagcccctgcccctgctccagccatggtatcagctctggcccaggccccagcccctgtcccagtcctagccccaggccctcctcaggctgtggccccacctgcccccaagcccacccaggctggggaaggaacgctgtcagaggccctgctgcagctgcagtttgatgatgaagacctgggggccttgcttggcaacagcacagacccagctgtgttcacagacctggcatccgtcgacaactccgagtttcagcagctgctgaaccagggcatacctgtggccccccacacaactgagcccatgctgatggagtaccctgaggctataactcgcctagtgacaggggcccagaggccccccgacccagctcctgctccactgggggccccggggctccccaatggcctcctttcaggagatgaagacttctcctccattgcggacatggacttctcagccctgctgagtcagatcagctcctagtaatgaactagtccgtaacttgaaagtatttcgatttcttggctttatatatcttgtggaaaggacgacgcgaggacgggagtcttcagata

SEQ ID NO: 267 - DNA, 803 bp, Homo sapiens
  source 1..803: mol_type = genomic DNA
accgccaccatggagcagagggcaggcggaaaccgtgtacagacgtccacacttaactgcgctggggccgcggtgattgacgagatgcctgaggctgccgtgaaatcaacagccaacaaataccaagtcttttttttcgggacccacgagacggcattcctgggccccaaagacctcttcccttacgaggaatccaaggagaagtttggcaagcccaacaagaggaaagggttcagcgaggggctgtgggagatcgagaacaaccctactgtcaaggcttccggctatcagtcctcccagaaaaagagctgtgtggaagagcctgaaccagagcccgaagctgcagagggtgacggtgataagaaggggaatgcagagggcagcagcgacgaggaagggaagctggtcattgatgagccagccaaggagaagaacgagaaaggagcgttgaagaggagagcaggggacttgctggaggactctcctaaacgtcccaaggaggcagaaaaccctgaaggagaggagaaggaggcagccaccttggaggttgagaggccccttcctatggaggtggaaaagaatagcaccccctctgagcccggctctggccgggggcctccccaagaggaagaagaggaggaggatgaagaggaagaggctaccaaggaagatgctgaggccccaggcatcagagatcatgagagcctgtagtaatgaactagtccgtaacttgaaagtatttcgatttcttggctttatatatcttgtggaaaggacgaagactgggtgcatacaaagtaagt

SEQ ID NO: 268 - DNA, 872 bp, Homo sapiens
  source 1..872: mol_type = genomic DNA
accgccaccatgcacccggaaggtggccaatttgtgcctcaactccttggccatctcctggctaccaaactcaagcgtttcctccttagcaaaggcggacgtagggctcaaatccccgacgtttccagggccaccccccatacgattgacgagatgcctgaggctgccgtgaaatcaacagccaacaaataccaagtcttttttttcgggacccacgagacggcattcctgggccccaaagacctcttcccttacgaggaatccaaggagaagtttggcaagcccaacaagaggaaagggttcagcgaggggctgtgggagatcgagaacaaccctactgtcaaggcttccggctatcagtcctcccagaaaaagagctgtgtggaagagcctgaaccagagcccgaagctgcagagggtgacggtgataagaaggggaatgcagagggcagcagcgacgaggaagggaagctggtcattgatgagccagccaaggagaagaacgagaaaggagcgttgaagaggagagcaggggacttgctggaggactctcctaaacgtcccaaggaggcagaaaaccctgaaggagaggagaaggaggcagccaccttggaggttgagaggccccttcctatggaggtggaaaagaatagcaccccctctgagcccggctctggccgggggcctccccaagaggaagaagaggaggaggatgaagaggaagaggctaccaaggaagatgctgaggccccaggcatcagagatcatgagagcctgtagtaatgaactagtccgtaacttgaaagtatttcgatttcttggctttatatatcttgtggaaaggacgatggctctacgactcggcagacatt

SEQ ID NO: 269 - DNA, 2705 bp, Homo sapiens
  source 1..2705: mol_type = genomic DNA
accgccaccatgcctgaatctaaggttggtgacacatgtgtttgggatagcaaggtagagaatcaacagaaaaagcctgtggaaaacaggatgaaggaggacaaaagcagcatcagggaagcaatcagcaaagccaagagtacagcaaatataaagacagaacaggaaggtgaggcatctgagaagagcttgcatctgagcccacagcatatcacacaccagactatgcctataggacagagaggcagtgagcaaggcaaacgtgtggagaacattaatggaacctcctaccctagtctacagcagaaaaccaatgctgttaagaaattacataaatgtgatgaatgtgggaaatccttcaaatataattcccgccttgttcaacataaaattatgcacactggggaaaagcgctatgaatgtgatgactgtggagggactttccggagcagctcgagccttcgggtccacaaacggatccacactggggagaagccgtacaagtgtgaggaatgtgggaaagcctacatgtcctactccagccttataaaccacaaaagcacccattctggggagaagaactgtaaatgtgatgaatgtggaaaatccttcaattatagctctgttctggaccagcataaaaggatccacactggggagaagccctatgaatgtggtgagtgtgggaaggccttcaggaacagctctgggctcagagtccacaaaaggatccacacgggggagaagccctatgaatgcgacatctgtgggaaaaccttcagtaacagctctggccttagggtccataaaaggatccacacaggtgagaaaccttacgaatgtgatgagtgtgggaaggccttcattacttgtagaacacttctcaaccataaaagcatccactttggagataaaccctataaatgtgatgagtgtgagaaatcttttaattatagctctcttctcattcagcataaagtcatccacactggagagaaaccttatgaatgtgatgaatgtgggaaggctttcaggaacagctcaggcctcatagtgcataaaaggatccacacaggagagaaaccttacaagtgtgatgtctgtggcaaagcattcagctatagctcaggcctcgcagtccataaaagcattcaccctgggaagaaagcccatgaatgtaaggagtgtgggaaatcctttagttataactcactacttcttcaacacagaactattcataccggagagagaccttatgtatgtgatgtgtgtgggaaaacgttcagaaacaatgcaggcctcaaagtccacaggaggctccatactggggaaaaaccatataagtgtgatgtgtgtgggaaagcctatatctcacgctctagccttaaaaatcacaaaggaatccaccttggggagaagccctataaatgtagctattgtgagaaatccttcaactacagctctgcccttgaacagcataaaaggattcataccagggaaaaaccctttgggtgtgatgagtgtggtaaagctttcagaaataattctggccttaaagtacataaacgaatccacactggggaacgaccttacaaatgtgaagaatgtgggaaagcatacatctctctctcgagccttataaatcataaaagtgtacaccctggggagaagccctttaagtgtgacgagtgtgagaaggccttcatcacataccgaacccttacaaaccacaaaaaagttcatcttggggagaagccctacaaatgtgatgtgtgtgagaaatcttttaattacacatcgctcctttctcagcacagaagggtccacactagagagaaaccctatgaatgtgacaggtgtgagaaggtcttcagaaacaactcaagccttaaagttcataaaagaatccatactggggagaggccctatgaatgtgatgtgtgtggaaaagcctacatctcacactcaagccttattaaccataagagtacccaccctggcaggacaccccatacatgtgatgaatgtggaaaagcttttttctcaagcagaactcttataagccataaaagagtccatcttggggagaaacccttcaagtgtgttgagtgtgggaaatctttcagttacagctctctcctttctcagcacaagaggatccacacaggggagaaaccctatgtgtgtgataggtgtgggaaggccttcaggaacagctcaggcctcacagtgcataaaaggatccacacaggtgagaaaccctatgaatgtgatgagtgtgggaaggcatacatctcacactcaagtcttatcaatcataaaagtgtccaccaggggaagcagccctataattgtgagtgtgggaaatccttcaattatagatcagtccttgaccagcacaaaaggatccacactggaaagaagccataccgatgtaatgagtgtggtaaggcttttaatatcagatcaaatctcaccaagcataaaagaacccatactggagaggaatctttaaatgtgatatatgtgggaagttatagtggcacatcccagaagagaacctatgagggagggaatgccctggatgggggcaggatgaggatgcctctgtagtaatgaactagtccgtaacttgaaagtatttcgatttcttggctttatatatcttgtggaaaggacgaaccaagaggccgataattaattta

SEQ ID NO: 270 - DNA, 2804 bp, Homo sapiens
  source 1..2804: mol_type = genomic DNA
accgccaccatgtcacatttgaagacgagcactgaggatgaggaaccaactgaagaatatgaaaatgttggaaatgcagcatctaagtggccaaaagtggaggatcctatgcctgaatctaaggttggtgacacatgtgtttgggatagcaaggtagagaatcaacagaaaaagcctgtggaaaacaggatgaaggaggacaaaagcagcatcagggaagcaatcagcaaagccaagagtacagcaaatataaagacagaacaggaaggtgaggcatctgagaagagcttgcatctgagcccacagcatatcacacaccagactatgcctataggacagagaggcagtgagcaaggcaaacgtgtggagaacattaatggaacctcctaccctagtctacagcagaaaaccaatgctgttaagaaattacataaatgtgatgaatgtgggaaatccttcaaatataattcccgccttgttcaacataaaattatgcacactggggaaaagcgctatgaatgtgatgactgtggagggactttccggagcagctcgagccttcgggtccacaaacggatccacactggggagaagccgtacaagtgtgaggaatgtgggaaagcctacatgtcctactccagccttataaaccacaaaagcacccattctggggagaagaactgtaaatgtgatgaatgtggaaaatccttcaattatagctctgttctggaccagcataaaaggatccacactggggagaagccctatgaatgtggtgagtgtgggaaggccttcaggaacagctctgggctcagagtccacaaaaggatccacacgggggagaagccctatgaatgcgacatctgtgggaaaaccttcagtaacagctctggccttagggtccataaaaggatccacacaggtgagaaaccttacgaatgtgatgagtgtgggaaggccttcattacttgtagaacacttctcaaccataaaagcatccactttggagataaaccctataaatgtgatgagtgtgagaaatcttttaattatagctctcttctcattcagcataaagtcatccacactggagagaaaccttatgaatgtgatgaatgtgggaaggctttcaggaacagctcaggcctcatagtgcataaaaggatccacacaggagagaaaccttacaagtgtgatgtctgtggcaaagcattcagctatagctcaggcctcgcagtccataaaagcattcaccctgggaagaaagcccatgaatgtaaggagtgtgggaaatcctttagttataactcactacttcttcaacacagaactattcataccggagagagaccttatgtatgtgatgtgtgtgggaaaacgttcagaaacaatgcaggcctcaaagtccacaggaggctccatactggggaaaaaccatataagtgtgatgtgtgtgggaaagcctatatctcacgctctagccttaaaaatcacaaaggaatccaccttggggagaagccctataaatgtagctattgtgagaaatccttcaactacagctctgcccttgaacagcataaaaggattcataccagggaaaaaccctttgggtgtgatgagtgtggtaaagctttcagaaataattctggccttaaagtacataaacgaatccacactggggaacgaccttacaaatgtgaagaatgtgggaaagcatacatctctctctcgagccttataaatcataaaagtgtacaccctggggagaagccctttaagtgtgacgagtgtgagaaggccttcatcacataccgaacccttacaaaccacaaaaaagttcatcttggggagaagccctacaaatgtgatgtgtgtgagaaatcttttaattacacatcgctcctttctcagcacagaagggtccacactagagagaaaccctatgaatgtgacaggtgtgagaaggtcttcagaaacaactcaagccttaaagttcataaaagaatccatactggggagaggccctatgaatgtgatgtgtgtggaaaagcctacatctcacactcaagccttattaaccataagagtacccaccctggcaggacaccccatacatgtgatgaatgtggaaaagcttttttctcaagcagaactcttataagccataaaagagtccatcttggggagaaacccttcaagtgtgttgagtgtgggaaatctttcagttacagctctctcctttctcagcacaagaggatccacacaggggagaaaccctatgtgtgtgataggtgtgggaaggccttcaggaacagctcaggcctcacagtgcataaaaggatccacacaggtgagaaaccctatgaatgtgatgagtgtgggaaggcatacatctcacactcaagtcttatcaatcataaaagtgtccaccaggggaagcagccctataattgtgagtgtgggaaatccttcaattatagatcagtccttgaccagcacaaaaggatccacactggaaagaagccataccgatgtaatgagtgtggtaaggcttttaatatcagatcaaatctcaccaagcataaaagaacccatactggagaggaatctttaaatgtgatatatgtgggaagttatagtggcacatcccagaagagaacctatgagggagggaatgccctggatgggggcaggatgaggatgcctctgtagtaatgaactagtccgtaacttgaaagtatttcgatttcttggctttatatatcttgtggaaaggacgagttcatgtgatcggtgtgatctaa

SEQ ID NO: 271 - DNA, 1322 bp, Homo sapiens
  source 1..1322: mol_type = genomic DNA
accgccaccatggagtctcttcgcgggtacacccacagtgatattggctaccgcagcctggcagtcggcgaggacatcgaggaagtgaatgatgagaaacttaccgtgacctcgctgatggcaaggggaggagaggacgaggagaatacacggtccaaacctgagtacggaacagaagcggaaaacaacgttggcacggaagggtccgtcccctcggacgaccaagaccgtgagggtggcggcggccacgagccggagcaacagcaggaggagccgcccctgaccaagccggagcaacagcaggaggagccgcccctgctcgagctgaagcaagagcaggaggagccgccccagacgaccgtggaggggccacagccggcggaggggccacaaaccgctgagggaccacagcccccagagaggaaacgccgccgccgcaccgcgttcacgcagtttcagctgcaggagctagagaactttttcgatgaatctcaatatcccgacgttgtggcgcgagagagacttgcagcacgcctgaatttgactgaagacagagtgcaggtttggtttcagaacagaagagccaagtggaaacgaaatcagagggtgctaatgttgagaaacactgctactgctgacctggcccaccctttggacatgttcttgggtggggcctattatgctgctcctgctctggatcctgctttgtgtgttcatctggtgccacaactacctagaccacctgtgctgcctgtgccacctatgccacccaggccacccatggtccctatgccacccaggccacccatagcacctatgccacccatggcgcctgtgccacccggctcacgcatggcgcctgtgccacccgggccacgcatggcgcctgtgccaccctggccgcccatggcgcctgtgccaccctggccgcccatggcgcctgtgccaaccgggccgcccatggcgcctgtgccacccgggccgcccatggcgcgtgtgccacccgggccgcccatggcgcgtgtgccacccgggccgcccatggcgcctctgccacccgggccgcccatggcgcctctgccacccgggccgcccatggcgcctctgccacccgggccgcccatggcgcctctgccacccaggtcacatgtgcctcacactggcctggctcctgtacacatcacatgggcccctgtcatcaacagttattatgcatgtccctttttctagtaatgaactagtccgtaacttgaaagtatttcgatttcttggctttatatatcttgtggaaaggacgaggcagggatacattacacatgtgc

SEQ ID NO: 272 - DNA, 1097 bp, Homo sapiens
  source 1..1097: mol_type = genomic DNA
accgccaccatggaagaacttacggcgttcgtctccaagtcttttgaccagaaagtgaaggagaagaaggaggcgatcacgtaccgggaggtgctggagagcgggccgctgcgcggggccaaggagccgaccggctgcaccgaggcgggccgcgacgaccgcagcagcccggcagtccgggcggccggcggaggcggcggcggaggaggcggaggcggcggcggaggaggcggaggaggtgtaggaggaggaggagcaggcggaggagctggaggagggcgctctcccgtccgggagctggacatgggcgccgccgagagaagcagggagccgggcagcccgcgactgacggaggtgtccccggagctgaaagatcgcaaagaggatgcgaaagggatggaggacgaaggccagaccaaaatcaagcagaggcgaagtcggaccaatttcaccctggaacaactcaatgagctggagaggctttttgacgagacccactatcccgacgccttcatgcgagaggaactgagccagcgactgggcctgtcggaggcccgagtgcaggtttggtttcaaaatcgaagagctaaatgtagaaaacaagaaaatcaactccataaaggtgttctcataggggccgccagccagtttgaagcttgtagagtcgcaccttatgtcaacgtaggtgctttaaggatgccatttcagcaggatagtcattgcaacgtgacgcccttgtcctttcaggttcaggcgcagctgcagctggacagcgctgtggcgcacgcgcaccaccacctgcatccgcacctggccgcgcacgcgccctacatgatgttcccagcaccgcccttcggactgccgctcgccacgctggccgcggattcggcttccgccgcctcggtagtggcggccgcagcagccgccaagaccaccagcaagaactccagcatcgccgatctcagactgaaagccaaaaagcacgccgcagccctgggtctgtagtaatgaactagtccgtaacttgaaagtatttcgatttcttggctttatatatcttgtggaaaggacgatccggaggatgcgcaaagtgacac

SEQ ID NO: 273 - DNA, 1061 bp, Homo sapiens
  source 1..1061: mol_type = genomic DNA
accgccaccatggaagaacttacggcgttcgtctccaagtcttttgaccagaaagtgaaggagaagaaggaggcgatcacgtaccgggaggtgctggagagcgggccgctgcgcggggccaaggagccgaccggctgcaccgaggcgggccgcgacgaccgcagcagcccggcagtccgggcggccggcggaggcggcggcggaggaggcggaggcggcggcggaggaggcggaggaggtgtaggaggaggaggagcaggcggaggagctggaggagggcgctctcccgtccgggagctggacatgggcgccgccgagagaagcagggagccgggcagcccgcgactgacggaggtgtccccggagctgaaagatcgcaaagaggatgcgaaagggatggaggacgaaggccagaccaaaatcaagcagaggcgaagtcggaccaatttcaccctggaacaactcaatgagctggagaggctttttgacgagacccactatcccgacgccttcatgcgagaggaactgagccagcgactgggcctgtcggaggcccgagtgcaggtttggtttcaaaatcgaagagctaaatgtagaaaacaagaaaatcaactccataaaggtgttctcataggggccgccagccagtttgaagcttgtagagtcgcaccttatgtcaacgtaggtgctttaaggatgccatttcagcaggttcaggcgcagctgcagctggacagcgctgtggcgcacgcgcaccaccacctgcatccgcacctggccgcgcacgcgccctacatgatgttcccagcaccgcccttcggactgccgctcgccacgctggccgcggattcggcttccgccgcctcggtagtggcggccgcagcagccgccaagaccaccagcaagaactccagcatcgccgatctcagactgaaagccaaaaagcacgccgcagccctgggtctgtagtaatgaactagtccgtaacttgaaagtatttcgatttcttggctttatatatcttgtggaaaggacgacacaaccctaacccgaatgcgaat

SEQ ID NO: 274 - DNA, 674 bp, Homo sapiens
  source 1..674: mol_type = genomic DNA
accgccaccatggaggacgaaggccagaccaaaatcaagcagaggcgaagtcggaccaatttcaccctggaacaactcaatgagctggagaggctttttgacgagacccactatcccgacgccttcatgcgagaggaactgagccagcgactgggcctgtcggaggcccgagtgcaggtttggtttcaaaatcgaagagctaaatgtagaaaacaagaaaatcaactccataaaggtgttctcataggggccgccagccagtttgaagcttgtagagtcgcaccttatgtcaacgtaggtgctttaaggatgccatttcagcaggttcaggcgcagctgcagctggacagcgctgtggcgcacgcgcaccaccacctgcatccgcacctggccgcgcacgcgccctacatgatgttcccagcaccgcccttcggactgccgctcgccacgctggccgcggattcggcttccgccgcctcggtagtggcggccgcagcagccgccaagaccaccagcaagaactccagcatcgccgatctcagactgaaagccaaaaagcacgccgcagccctgggtctgtagtaatgaactagtccgtaacttgaaagtatttcgatttcttggctttatatatcttgtggaaaggacgagggcccggatccgcatgcgctatt

SEQ ID NO: 275 - DNA, 1169 bp, Homo sapiens
  source 1..1169: mol_type = genomic DNA
accgccaccatggaagaacttacggcgttcgtctccaagtcttttgaccagaaagtgaaggagaagaaggaggcgatcacgtaccgggaggtgctggagagcgggccgctgcgcggggccaaggagccgaccggctgcaccgaggcgggccgcgacgaccgcagcagcccggcagtccgggcggccggcggaggcggcggcggaggaggcggaggcggcggcggaggaggcggaggaggtgtaggaggaggaggagcaggcggaggagctggaggagggcgctctcccgtccgggagctggacatgggcgccgccgagagaagcagggagccgggcagcccgcgactgacggagggtagaaggaagccaacgaaagctgaggtccaggctacgctgcttctcccgggcgaggcgtttcggtttcttgtgtccccggagctgaaagatcgcaaagaggatgcgaaagggatggaggacgaaggccagaccaaaatcaagcagaggcgaagtcggaccaatttcaccctggaacaactcaatgagctggagaggctttttgacgagacccactatcccgacgccttcatgcgagaggaactgagccagcgactgggcctgtcggaggcccgagtgcaggtttggtttcaaaatcgaagagctaaatgtagaaaacaagaaaatcaactccataaaggtgttctcataggggccgccagccagtttgaagcttgtagagtcgcaccttatgtcaacgtaggtgctttaaggatgccatttcagcaggatagtcattgcaacgtgacgcccttgtcctttcaggttcaggcgcagctgcagctggacagcgctgtggcgcacgcgcaccaccacctgcatccgcacctggccgcgcacgcgccctacatgatgttcccagcaccgcccttcggactgccgctcgccacgctggccgcggattcggcttccgccgcctcggtagtggcggccgcagcagccgccaagaccaccagcaagaactccagcatcgccgatctcagactgaaagccaaaaagcacgccgcagccctgggtctgtagtaatgaactagtccgtaacttgaaagtatttcgatttcttggctttatatatcttgtggaaaggacgattcgtggtgtagtagcttaataga

SEQ ID NO: 276 - DNA, 680 bp, Homo sapiens
  source 1..680: mol_type = genomic DNA
accgccaccatggctgcccctcccaaagctcccatccgtgtcaggaatttgaccatcagagcaggagccctcactgggaaggagaacaacatgctgcagcccgagacccacatcttcacagcccccgaggaggggagctcccaaggggctctgctgcttggccaggccccagaacctttgtctctgccctgtactccagtgaccttggagcagcaactggtttctccttctggggatccccacagggcccctgccctgcccagcatatgctcaactctgatcctccagccctgtgccacccttgaccctcttctactgcagccacaggtccccaaagtctctgaccaggctttggtttctgcccactcagagtggcagcggaagctggaggccgctgaggctctgctgactctgagaaactctgcccaggcccctcctgactccatctccctgcaccagccttgcaacccaccagctcctgctggagataaaggattccagcctcccagcccctctctccgccccaggccagccagctccatctcgctgcctattggacatctgggatgcatctccctcttgagctagtaatgaactagtccgtaacttgaaagtatttcgatttcttggctttatatatcttgtggaaaggacgaggcgtcgacgaatttagttgagaa

SEQ ID NO: 277 - DNA, 1358 bp, Homo sapiens
  source 1..1358: mol_type = genomic DNA
accgccaccatggaacccagtgacatgcctgctggctaccactgccccttagactctgccccctgggatgagaccagagacccccagagcacagagctgatccccaggagagccatcagccgctctccaacctgcgcccgctgccgcaaccatggtgtcaccgcccatctcaagggccacaagcgcctctgcctcttccaggcttgcgagtgtcacaaatgtgtcctcatcctggagcgccgcagggtcatggctgcccaggtggccttgcgtaggcagcaggaggcgcagctaaagaagcacctgatgaggagaggggaagcctctcccaaagctcccaaccacttcagaaagggaaccactcagccacaggtcccctctggaaaggagaacatagcaccccagcctcagaccccccatggggcagtcctgctggcaccgacaccccccgggaagaactcctgtgggcctctgctgctcagccatcccccggaagcctcgcccttgtcctggactccggtgcctcctggcccttgggtccctggacactggctgcctccaggcttctccatgccaccaccagtggtgtgccgcctgctgtaccaagaacctgctgtctctctgcctcccttccctggctttgaccctggcacctccctccagctgcccactcatgggcccttcaccacctgcccaggatctcacccagtactgacagctcctctttctggagagccccaagggccccctagccagccccgcacacactcaactctgatactccagccctgtggcaccccagaccctcttcagctacagccacaggtcctgggaaagaagtgggatctagggccctgggaggaggttgagcctggggaaggaaaaagcaggaaactgaaggaagcaggggctgaggaacacttagagggtgggcagaagcgggggttcccagtctgcttgtctccctttcccttgcaggcctctggagcctcgtgcctggcccggacatctggcccctcagagtggcagctgcagcaagaggcagctgaagccctcgtggggctgaaagattcatcccaggctcctcgtgtgaccccttctgtgccccccaaccctgcctggatctccctgcttcacccctgtggcccaccagctcctgctggaggaagaggattccagcctgttggcccctgtcttcgacccagcccagccccctctgttgctctgcatattggccgtctggggtccatctccctcctgagctagtaatgaactagtccgtaacttgaaagtatttcgatttcttggctttatatatcttgtggaaaggacgaaccgtagtcagccaaccattgcaa

SEQ ID NO: 278 - DNA, 1205 bp, Homo sapiens
  source 1..1205: mol_type = genomic DNA
accgccaccatggaacccagtgacatgcctgctggctaccactgccccttagactctgccccctgggatgagaccagagacccccagagcacagagctgatccccaggagagccatcagccgctctccaacctgcgcccgctgccgcaaccatggtgtcaccgcccatctcaagggccacaagcgcctctgcctcttccaggcttgcgagtgtcacaaatgtgtcctcatcctggagcgccgcagggtcatggctgcccaggtggccttgcgtaggcagcaggaggcgcagctaaagaagcacctgatgaggagaggggaagcctctcccaaagctcccaaccacttcagaaagggaaccactcagccacaggtcccctctggaaaggagaacatagcaccccagcctcagaccccccatggggcagtcctgctggcaccgacaccccccgggaagaactcctgtgggcctctgctgctcagccatcccccggaagcctcgcccttgtcctggactccggtgcctcctggcccttgggtccctggacactggctgcctccaggcttctccatgccaccaccagtggtgtgccgcctgctgtaccaagaacctgctgtctctctgcctcccttccctggctttgaccctggcacctccctccagctgcccactcatgggcccttcaccacctgcccaggatctcacccagtactgacagctcctctttctggagagccccaagggccccctagccagccccgcacacactcaactctgatactccagccctgtggcaccccagaccctcttcagctacagccacaggcctctggagcctcgtgcctggcccggacatctggcccctcagagtggcagctgcagcaagaggcagctgaagccctcgtggggctgaaagattcatcccaggctcctcgtgtgaccccttctgtgccccccaaccctgcctggatctccctgcttcacccctgtggcccaccagctcctgctggaggaagaggattccagcctgttggcccctgtcttcgacccagcccagccccctctgttgctctgcatattggccgtctggggtccatctccctcctgagctagtaatgaactagtccgtaacttgaaagtatttcgatttcttggctttatatatcttgtggaaaggacgagacagaatggcgagactcatctac

SEQ ID NO: 279 - DNA, 1523 bp, Homo sapiens
  source 1..1523: mol_type = genomic DNA
accgccaccatgtatgagatttacgtggagacctgtgggcaaaacactgagaaccaagtcaacccggccacctttgggaagtgtgaagatcattcaccgatgaagacagacccagttggatcccctttgtctgaattcaggagatgtccatttctggagcaagaacaggcaaagaaatactcctgtaatatgatggccttccttgctgacgaatactgcaactattgtcgagacattttacgaaatgtggaggacttgcttacttccttctggaagtctctgcagcaagacacagtcatgctgatgtcattgcctgacgtgtgccagctctttaaatgctacgacgtccagctgtacaagggaattgaggatgttctccttcatgacttcttggaagatgtttctattcagtacctgaaatctgtgcagttatttagtaagaaatttaagctgtggctccttaatgctttggaaggtgttccagccctcttgcagatctccaaactcaaagaagttactctatttgtcaaaagactaagaagaaagacgtacctttccaacatggctaagactatgcgaatggtattgaaaagtaagaggcgtgtcagcgttttgaagtcagatctacaggccatcatcaatcaaggcactttggctacttctaagaaagccctggcaagtgaccggagtggcgcagatgaactggagaacaacccagagatgaaatgtttaagaaacttaatttctttgctgggaacatcaacagatctcagggtattcctcagctgtctgtcttcacatctccaagcatttgtgttccagacaagcagaagcaaagaagagtttaccaaattggccgccagcttccagctgagatggaatcttcttctcactgctgtaagcaaagccatgaccctctgccacagagatagttttggctcctggcatctgtttcacttgttgcttttggaatatatgattcatatacttcagtcatgcctagaggaggaagaggaggaggaggacatggggactgtcaaggaaatgctaccagatgacccgactctcggccagccagaccaggcacttttccattctctgaattcctcactgtcgcaggcgtgtgccagccccagcatggagccactgggggtgatgcccacacacatgggccagggccgatatcccgtgggtgtgagcaacatggtcctcaggatcctgggcttcctggtggacactgccatgggcaataagctcatccaggtgctgttggaagatgaaaccactgaaagcgcagttaaactcagccttcctatgggacaagaagccctcataaccctaaaagatggacaacaatttgtgattcagatatcagatgtaccccaaagctctgaagatatttatttcagagaaaacaatgctaatgtgtagtaatgaactagtccgtaacttgaaagtatttcgatttcttggctttatatatcttgtggaaaggacgatgactcgtagggatgttcgtaggt

SEQ ID NO: 280 - DNA, 2309 bp, Homo sapiens
  source 1..2309: mol_type = genomic DNA
accgccaccatgcattgtgggttactggaggaacccgacatggattccacagagagctggattgaaagatgtctcaacgaaagtgaaaacaaacgttattccagccacacatctctggggaatgtttctaatgatgaaaatgaggaaaaagaaaataatagagcatccaagccccactccactcctgctactctgcaatggctggaggagaactatgagattgcagagggggtctgcatccctcgcagtgccctctatatgcattacctggatttctgcgagaagaatgatacccaacctgtcaatgctgccagctttggaaagatcataaggcagcagtttcctcagttaaccaccagaagactcgggacccgaggacagtcaaagtaccattactatggcattgcagtgaaagaaagctcccaatattatgatgtgatgtattccaagaaaggagctgcctgggtgagtgagacgggcaagaaagaagtgagcaaacagacagtggcatattcaccccggtccaaactcggaacactgctgccagaatttcccaatgtcaaagatctaaatctgccagccagcctgcctgaggagaaggtttctacctttattatgatgtacagaacacactgtcagagaatactggacactgtaataagagccaactttgatgaggttcaaagtttccttctgcacttttggcaaggaatgccgccccacatgctgcctgtgctgggctcctccacggtggtgaacattgtcggcgtgtgtgactccatcctctacaaagctatctccggggtgctgatgcccactgtgctgcaggcattacctgacagcttaactcaggtgattcgaaagtttgccaagcaactggatgagtggctaaaagtggctctccacgacctcccagaaaacttgcgaaacatcaagttcgaattgtcgagaaggttctcccaaattctgagacggcaaacatcactaaatcatctctgccaggcatctcgaacagtgatccacagtgcagacatcacgttccaaatgctggaagactggaggaacgtggacctgaacagcatcaccaagcaaaccctttacaccatggaagactctcgcgatgagcaccggaaactcatcacccaattatatcaggagtttgaccatctcttggaggagcagtctcccatcgagtcctacattgagtggctggataccatggttgaccgctgtgttgtgaaggtggctgccaagagacaagggtccttgaagaaagtggcccagcagttcctcttgatgtggtcctgtttcggcacaagggtgatccgggacatgaccttgcacagcgcccccagcttcgggtcttttcacctaattcacttaatgtttgatgactacgtgctctacctgttagaatctctgcactgtcaggagcgggccaatgagctcatgcgagccatgaagggagaaggaagcactgcagaagtccgagaagagatcatcttgacagaggctgccgcaccaaccccttcaccagtgccatcgttttctccagcaaaatctgccacatctgtggaagtgccacctccctcttcccctgttagcaatccttcccctgagtacactggcctcagcactacaggagcaatgcagtcttacacgtggtctctaacatacacagtgacgacggctgctgggtccccagctgagaactcccaacagctgccctgtatgaggaacactcatgtgccttcttcctccgtcacacacaggataccagtttatccccacagagaggaacatggatacacgggaagctataactatgggagctatggcaaccagcatcctcaccccatgcagagccagtatccggccctccctcatgacacagctatctctgggccactccactatgccccttaccacaggagctctgcacagtacccttttaatagccccacttcccggatggaaccttgtttgatgagcagtactcccagactgcatcctaccccagtcactccccgctggccagaggtgccctcagccaacacgtgctacacaagcccgtctgtgcattctgcgaggtacggaaactctagtgacatgtatacacctctgacaacgcgcaggaattctgaatatgagcacatgcaacactttcctggctttgcttacatcaacggagaggcctctacaggatgggctaaatagtaatgaactagtccgtaacttgaaagtatttcgatttcttggctttatatatcttgtggaaaggacgacgttaagccttgtatcccgcttgc

SEQ ID NO: 281 - DNA, 2027 bp, Homo sapiens
  source 1..2027: mol_type = genomic DNA
accgccaccatgaactgggctgccttcggagggtctgaattcttcatcccagaaggcattcagatagattcgagatgcccactaagcagaaatatcacggaatggtaccattactatggcattgcagtgaaagaaagctcccaatattatgatgtgatgtattccaagaaaggagctgcctgggtgagtgagacgggcaagaaagaagtgagcaaacagacagtggcatattcaccccggtccaaactcggaacactgctgccagaatttcccaatgtcaaagatctaaatctgccagccagcctgcctgaggagaaggtttctacctttattatgatgtacagaacacactgtcagagaatactggacactgtaataagagccaactttgatgaggttcaaagtttccttctgcacttttggcaaggaatgccgccccacatgctgcctgtgctgggctcctccacggtggtgaacattgtcggcgtgtgtgactccatcctctacaaagctatctccggggtgctgatgcccactgtgctgcaggcattacctgacagcttaactcaggtgattcgaaagtttgccaagcaactggatgagtggctaaaagtggctctccacgacctcccagaaaacttgcgaaacatcaagttcgaattgtcgagaaggttctcccaaattctgagacggcaaacatcactaaatcatctctgccaggcatctcgaacagtgatccacagtgcagacatcacgttccaaatgctggaagactggaggaacgtggacctgaacagcatcaccaagcaaaccctttacaccatggaagactctcgcgatgagcaccggaaactcatcacccaattatatcaggagtttgaccatctcttggaggagcagtctcccatcgagtcctacattgagtggctggataccatggttgaccgctgtgttgtgaaggtggctgccaagagacaagggtccttgaagaaagtggcccagcagttcctcttgatgtggtcctgtttcggcacaagggtgatccgggacatgaccttgcacagcgcccccagcttcgggtcttttcacctaattcacttaatgtttgatgactacgtgctctacctgttagaatctctgcactgtcaggagcgggccaatgagctcatgcgagccatgaagggagaaggaagcactgcagaagtccgagaagagatcatcttgacagaggctgccgcaccaaccccttcaccagtgccatcgttttctccagcaaaatctgccacatctgtggaagtgccacctccctcttcccctgttagcaatccttcccctgagtacactggcctcagcactacaggagcaatgcagtcttacacgtggtctctaacatacacagtgacgacggctgctgggtccccagctgagaactcccaacagctgccctgtatgaggaacactcatgtgccttcttcctccgtcacacacaggataccagtttatccccacagagaggaacatggatacacgggaagctataactatgggagctatggcaaccagcatcctcaccccatgcagagccagtatccggccctccctcatgacacagctatctctgggccactccactatgccccttaccacaggagctctgcacagtacccttttaatagccccacttcccggatggaaccttgtttgatgagcagtactcccagactgcatcctaccccagtcactccccgctggccagaggtgccctcagccaacacgtgctacacaagcccgtctgtgcattctgcgaggtacggaaactctagtgacatgtatacacctctgacaacgcgcaggaattctgaatatgagcacatgcaacactttcctggctttgcttacatcaacggagaggcctctacaggatgggctaaatagtaatgaactagtccgtaacttgaaagtatttcgatttcttggctttatatatcttgtggaaaggacgagcgcgctaagaggcctagtaactg

SEQ ID NO: 282 - DNA, 2336 bp, Homo sapiens
  source 1..2336: mol_type = genomic DNA
accgccaccatgatcaaaaggagagcccaccctggtgcgggaggcgacaggaccaggcctcgacggcgccgttccactgagagctggattgaaagatgtctcaacgaaagtgaaaacaaacgttattccagccacacatctctggggaatgtttctaatgatgaaaatgaggaaaaagaaaataatagagcatccaagccccactccactcctgctactctgcaatggctggaggagaactatgagattgcagagggggtctgcatccctcgcagtgccctctatatgcattacctggatttctgcgagaagaatgatacccaacctgtcaatgctgccagctttggaaagatcataaggcagcagtttcctcagttaaccaccagaagactcgggacccgaggacagtcaaagtaccattactatggcattgcagtgaaagaaagctcccaatattatgatgtgatgtattccaagaaaggagctgcctgggtgagtgagacgggcaagaaagaagtgagcaaacagacagtggcatattcaccccggtccaaactcggaacactgctgccagaatttcccaatgtcaaagatctaaatctgccagccagcctgcctgaggagaaggtttctacctttattatgatgtacagaacacactgtcagagaatactggacactgtaataagagccaactttgatgaggttcaaagtttccttctgcacttttggcaaggaatgccgccccacatgctgcctgtgctgggctcctccacggtggtgaacattgtcggcgtgtgtgactccatcctctacaaagctatctccggggtgctgatgcccactgtgctgcaggcattacctgacagcttaactcaggtgattcgaaagtttgccaagcaactggatgagtggctaaaagtggctctccacgacctcccagaaaacttgcgaaacatcaagttcgaattgtcgagaaggttctcccaaattctgagacggcaaacatcactaaatcatctctgccaggcatctcgaacagtgatccacagtgcagacatcacgttccaaatgctggaagactggaggaacgtggacctgaacagcatcaccaagcaaaccctttacaccatggaagactctcgcgatgagcaccggaaactcatcacccaattatatcaggagtttgaccatctcttggaggagcagtctcccatcgagtcctacattgagtggctggataccatggttgaccgctgtgttgtgaaggtggctgccaagagacaagggtccttgaagaaagtggcccagcagttcctcttgatgtggtcctgtttcggcacaagggtgatccgggacatgaccttgcacagcgcccccagcttcgggtcttttcacctaattcacttaatgtttgatgactacgtgctctacctgttagaatctctgcactgtcaggagcgggccaatgagctcatgcgagccatgaagggagaaggaagcactgcagaagtccgagaagagatcatcttgacagaggctgccgcaccaaccccttcaccagtgccatcgttttctccagcaaaatctgccacatctgtggaagtgccacctccctcttcccctgttagcaatccttcccctgagtacactggcctcagcactacaggagcaatgcagtcttacacgtggtctctaacatacacagtgacgacggctgctgggtccccagctgagaactcccaacagctgccctgtatgaggaacactcatgtgccttcttcctccgtcacacacaggataccagtttatccccacagagaggaacatggatacacgggaagctataactatgggagctatggcaaccagcatcctcaccccatgcagagccagtatccggccctccctcatgacacagctatctctgggccactccactatgccccttaccacaggagctctgcacagtacccttttaatagccccacttcccggatggaaccttgtttgatgagcagtactcccagactgcatcctaccccagtcactccccgctggccagaggtgccctcagccaacacgtgctacacaagcccgtctgtgcattctgcgaggtacggaaactctagtgacatgtatacacctctgacaacgcgcaggaattctgaatatgagcacatgcaacactttcctggctttgcttacatcaacggagaggcctctacaggatgggctaaatagtaatgaactagtccgtaacttgaaagtatttcgatttcttggctttatatatcttgtggaaaggacgaggttagtacgtagaagaaccaatg

SEQ ID NO: 283 - DNA, 1952 bp, Homo sapiens
  source 1..1952: mol_type = genomic DNA
accgccaccatggcagaagatgagcctgatgctaagagccccaagactgggggaagggcccccccaggtggtgctgaggctggggaacctaccacccttcttcagaggctccgaggtaccatttccaaggccgtgcagaacaaagtagaggggatcctgcaagatgtacagaaattttctgacaatgacaagctgtatctctaccttcagctcccctcaggacccaccactggagacaaaagctcagagccaagtacactgagcaatgaggagtacatgtatgcctataggtggatccgcaaccacctggaagagcacactgacacctgtctgccaaagcaaagtgtttatgatgcctatcggaagtactgtgagagtcttgcctgttgccgcccactcagcacagccaactttggcaagatcatcagagagatcttccctgacatcaaagctcgaaggcttggtggccggggccagtccaaatattgctacagtggcataaggaggaagaccttggtgtctatgccacccctgcctggacttgacctaaagggttctgagagtccagaaatgggcccagaagtaaccccagcacctcgagatgaactggtggaggcagcgtgtgccctgacctgtgactgggcagagcggatcctgaaacggtccttcagttccatcgttgaggtcgcccgcttcctgctacagcagcatctcatctctgcccgatctgcacatgcccatgtgcttaaggccatggggctcgctgaagaggacgaacatgcacctcgggaacggtcatctaaaccaaagaatggtttagagaacccagagggtggagcccacaagaagccagagagactggcccagcctcctaaggatctggaagcccgaactggggccggtcctctcgcacgtggagagcggaagaagagtgtagttgagagctcggccccaggagccaataacctgcaggttaatgccctagtggctcggctgcctctgctccttccccgggcccctcgctcactaattccgccaatcccagtctctccacctattctggcccccaggctttcttcaggtgccctgaaagtggctacactgcctctgtctagtagggccggggcacccccagcagctgtgcccatcattaacatgatcttaccaactgttcctgctttgcctggacctggacctgggcctgggcgagctccacctgggggactcactcagccccggggcacagagaacagagaggtaggcataggtggtgaccaaggaccacatgacaagggtgtcaagaggacagctgaagtacctgtgagtgaggccagtgggcaggctccaccagctaaagcagcaaagcaggatatagaggatacagcaagtgatgccaaaaggaaacgggggcgccctcgaaaaaagtcaggtggaagtggggaaaggaattctacccctctcaagtcagcagctgccatggaatctgcccagtcctcaaggttaccatgggagacatggggctcaggaggggaaggcaactcagctggaggggcagagaggccagggccaatgggagaggctgaaaagggggcagtacttgcccagggtcagggagatggtactgtttccaaaggaggaaggggccccggttcccagcataccaaagaagcagaagataaaattcccttggtcccctcaaaagtgagtgtcatcaagggcagcagaagccaaaaggaggcttttcctttggcaaagggagaggtagacactgcaccacagggtaataaagacttaaaggagcatgtgcttcaaagttccttatcccaggagcataaagacccaaaagcaacacccccatagtaatgaactagtccgtaacttgaaagtatttcgatttcttggctttatatatcttgtggaaaggacgaacgaaccttgtccgcactccgcgc

SEQ ID NO: 284 - DNA, 2888 bp, Homo sapiens
  source 1..2888: mol_type = genomic DNA
accgccaccatggccaaggtcccggagctggaagacaccttcctgcaggcgcagcctgcgccccaactgtccccggggatccaggaagactgctgtgtgcagctcctgggcaagggcttgctagtctatccggaagaaacagtgtacctggcggccgaagggcagcccgggggcgagcagggcggcggggagaaaggcgaagacccggagctgccgggggcagtgaaatcagaaatgcacttaaacaatggtaacttttcctctgaagaagaggacgccgacaaccacgacagcaaaaccaaagcagcggatcaatacctgtctcagaagaaaaccatcacgcagattgtgaaggataaaaagaagcagacacagctcacgctgcagtggcttgaagagaattacattgtatgtgaaggagtttgcttaccacggtgcattctttatgcacactacttagatttctgtaggaaagagaaattagagccagcctgtgcggccacctttggaaagacaattcgccagaagtttcccctcctaacaacaaggcggcttggaacaagaggccattcaaagtatcattactatgggattggcatcaaagagagcagtgcatattaccactccgtttattctggaaagggcttgacaaggttttctggaagcaagctaaagaatgagggtggcttcactcgtaaatattcgcttagctcaaaaactggaacacttcttccagaattccccagcgctcaacaccttgtataccaaggatgcatttctaaggacaaggttgatacgctcataatgatgtacaaaactcactgccagtgtatcctggacaatgcaattaatggaaactttgaagagatccagcattttttattacacttttggcaaggaatgcctgaccatctccttcccctgctcgaaaatcctgttatcattgatattttctgtgtttgtgactcaattctttataaggttcttacagatgtactcattcctgcaacaatgcaagaaatgcctgaaagcttattagcagacataagaaattttgctaaaaattgggaacagtgggttgtttcatccttggaaaacttgccagaagctctaactgacaagaaaatacctattgtgcgaagatttgtatcttctctgaaacgacaaacatctttcttacatcttgcccagattgccagaccagctctctttgaccagcatgtcgttaattctatggtgtctgatattgaaagggttgatttgaacagcattggctctcaagcccttcttaccatttcaggcagcacagacactgaatctggtatctacactgaacatgactctatcactgtgttccaagaactgaaggatctccttaagaagaatgccactgtggaggcttttattgaatggttggatactgtggtagaacagagagttattaagaccagcaaacaaaatggaaggtcattaaagaagagagctcaagactttctgttaaagtggagtttttttggtgctcgagtaatgcataatctcaccttgaacaatgcatccagttttggttcttttcatttgattcgaatgcttctcgatgaatacattctcctggccatggagacccagtttaataatgacaaagagcaggagttacagaatttattggacaagtatatgaagaattcagatgcgagtaaagctgctttcactgcttctccgagttcatgctttctggccaaccgtaataaagggagcatggtttccagcgacgctgtgaagaatgaaagccacgtggagacaacctatctccctctgccatccagtcaacctggaggcctaggccctgctctgcaccagttccctgctgggaacacagacaacatgccgctcacaggtcaaatggagctttcacagattgctggtcatctgatgacaccacccatttctccagccatggcaagccgaggaagtgtcattaaccaaggaccaatggcagggaggcccccaagtgtgggcccagtactgtcagctccatcacactgctccacatacccagagcccatttatcccactctccctcaagccaatcatgacttttatagcaccagctctaactaccagactgtgtttagggcacagccccactccacatcaggactctatcctcatcacaccgagcatggtcgatgcatggcttggactgaacagcagctttcaagagacttcttcagtggcagctgtgcggggtctccatataactcccggccaccgtctagctatggcccatccctgcaagcccaggattcacacaatatgcagtttttaaatacaggaagcttcaatttcttgagcaacacaggagctgccagctgccaaggagcaacactgcctcctaattcaccaaatggatactatggaagcaacataaactacccagagtctcacaggctcggatcaatggtgaatcagcacgtttctgtcatcagcagcattcgttcactgcccccctacagtgacatccacgatccacttaacattttagatgacagtggtagaaaacagaccagctcgttttacacagacacatcatctccagttgcatgtcgaactccagtcctagcttccagtttgcaaaccccaattccttcttcctcatcccaatgtatgtatggaacttccaaccagtatccagctcaagaaaccctggactcccatggaacaagcagtagagaaatggtgtcctctttaccacctatcaacactgtgttcatgggaacagcagctggaggcacttagtaatgaactagtccgtaacttgaaagtatttcgatttcttggctttatatatcttgtggaaaggacgaattggtctcttacatgtggtctgt

SEQ ID NO: 285 - DNA, 4193 bp, Homo sapiens
  source 1..4193: mol_type = genomic DNA
accgccaccatgtcatctagtcgggcacaacaaatgcatgccttttcctggattcggaataccctagaggaacatccggagacttcactgcccaaacaggaagtctatgatgagtacaagagctattgtgacaatcttggttaccatccattaagtgctgctgattttggaaagatcatgaaaaacgtctttccaaacatgaaggcacgtcgtttgggcacaagaggcaaatctaaatattgctacagtggactaagaaaaaaagcttttgttcatatgccaacactgcccaaccttgactttcacaaaactggagatgggttggaaggagctgaaccttctgggcagcttcaaaatattgatgaagaagttatctcttctgcttgccgtcttgtgtgtgagtgggcccagaaagtgttaagccaaccatttgacaccgtcttggaattagcccgcttccttgtaaaaagtcactatataggcaccaagtcaatggcagctctaactgtaatggcagcagcaccagcaggaatgaaaggaattacccagccttctgcttttatacctacagctgaaagtaattcctttcagcctcaggtgaagactttgccatctccaattgatgctaaacagcagttgcaacggaaaatccagaagaagcagcaagaacagaaactacaatcccctttgccaggagaatctgcagcaaaaaagtcagaaagtgctacaagcaatggagtgactaatcttcctaatggaaatccttcaatcctttctcctcaacctattggtatcgttgtggcagctgtccctagtcccattccggtccagcggactaggcaattggtaacttcaccgagtccaatgagttcttctgacggcaaagttcttcccctcaatgtacaggtggtcactcagcacatgcagtctgtgaaacaggcaccaaagactccccagaacgttccagccagtcctggtggggatcgttctgcccggcaccgttaccctcagatcttacccaaaccagcgaacaccagtgcactcaccattcgctctccaactactgtcctctttactagtagtcccatcaaaactgctgttgtacccgcttcacacatgagttctctaaatgtggtgaaaatgacaacaatatccctcacacccagcaacagtaacacccctcttaaacattctgcctcagtcagcagtgctacaggaacaacagaagaatcaaggagtgttccacagatcaagaatggttctgtcgtgtcgcttcagtctcctgggtccaggagcagcagtgcggggggaacatctgctgtggaagtcaaagtggaacccgaaacatcatcagatgagcatcctgtacagtgccaagagaactctgatgaggctaaagctccccagacacctagtgcccttttggggcagaaaagtaatacagacggagcactgcagaaaccttcaaatgaaggtgtcattgaaataaaagcaactaaggtctgtgaccagaggaccaaatgtaaaagtcgctgtaatgaaatgctgccaggcacgtcaacaggcaataatcaaagcactatcactctatcagttgcttctcagaacttaactttcaccagcagcagctcaccacctaatggtgactcaatcaataaagaccctaaattatgcactaaaagcccaagaaaacgactgtcttctacattgcaggagacccaggtgcctcctgtaaagaaaccaattgtggaacagctttcagcagctaccatagaagggcagaaacaaggcagtgttaagaaggaccaaaaggttccacattcagggaaaacagaaggttcaacagcaggtgctcagattcctagcaaggtatcagtaaatgtcagttcacacataggagcaaatcaacccttgaattcctctgcccttgttatcagtgattcagctttggaacagcaaacaaccccatcatcatctccagatataaaagtaaaacttgaaggaagtgtctttctcttggacagtgattcaaagtcagttggcagctttaatccaaatggatggcaacaaatcactaaagattctgagtttatatctgccagttgtgaacaacagcaagatatcagtgttatgacaattcctgagcactctgatatcaatgacttagagaaatctgtttgggaattagaaggaatgccacaggacacatatagccagcagctacatagccagatacaggaatcttctttaaatcaaatacaagcacattcttcagatcagttacctctgcaatctgaactgaaggagtttgagccttctgtttcccagacaaatgaaagctactttccttttgatgatgaacttacacaagatagtattgtggaagagctggtgcttatggagcagcaaatgtcaatgaacaattctcattcttacggcaactgtttgggaatgacccttcagagtcagtcagtaactccaggagctccaatgtcatctcacacttccagcacccacttctatcatccaatccacagcaatggcactccaatccacacacccacacccacacccacacccactcctactccaaccccaaccccaaccccgacatctgaaatgattgctggatctcagagtctgtcacgggagagcccttgctccaggctagcccagactacacctgtggatagtgctttaggaagtagccgacatacacccattggtactccacattctaactgcagcagtagtgtcccccccagccctgttgaatgcaggaatccgtttgcattcactccaataagctccagtatggcatatcatgacgccagcattgtctcaagtagtcctgtgaaaccgatgcaaagacccatggccacacaccctgacaaaaccaagcttgaatggatgaataatgggtatagtggggttggtaattcatcagtttctggccatggtattctcccaagctatcaggaactagtggaagaccgtttcaggaaacctcatgcttttgctgtgcctggacagtcttatcagtctcaatccagacatcatgacactcattttggtcgtttgactcctgtctctcctgtgcagcatcaaggtgccactgtaaataacaccaacaaacaggagggttttgcagtccctgcccctcttgataataaaggaactaattcatctgccagcagcaacttcagatgccggagtgtgagccctgctgttcatcgccaacgtaatcttagtggaagcaccctctatccagtatctaatatcccacgatctaatgtgaccccctttggaagtccagttaccccagaagttcatgttttcacaaatgttcacacagacgcatgtgccaacaacatagctcaaagaagccaatcagttccattgacagtcatgatgcagacagccttcccaaacgctcttcagaagcaagcaaacagtaaaaaaataaccaatgttttgttgagtaaacttgattccgacaatgatgatgcagtgagaggtttgggaatgaacaacctgccctctaattatacagcccggatgaatctcactcagattttggaaccttccactgtttttcctagtgccaacccacaaaatatgatcgattccagcacttctgtttatgagttccaaacaccatcttacctcaccaaaagtaatagcaccggtcagatcaatttttctcctggagataatcaagcacaatcagaaattggagagcaacaattagatttcaatagcactgttaaagacctgttgagtggagacagcttgcaaaccaaccagcagctggtaggtcagggagcatctgatctcactaatactgcatctgatttctctagcgatatcaggttgtcttctgagctctcaggcagcatcaatgatttgaacactttagacccaaatctactgtttgatccaggtcgtcagcagggacaagatgatgaagctacactggaagaattaaagaatgacccattatttcaacaaatttgcagtgaatccatgaattctatgacttcatcaggttttgaatggatagaaagcaaggaccatcctactgttgaaatgttgggttagtaatgaactagtccgtaacttgaaagtatttcgatttcttggctttatatatcttgtggaaaggacgattcgcttagcagatgcagtgctac

SEQ ID NO: 286 - DNA, 2102 bp, Homo sapiens
  source 1..2102: mol_type = genomic DNA
accgccaccatggacttggtggctttcgaggatgtggctgtgaacttcacccaggaggagtggtctttgctggatccttcccagaagaatctctacagagaagtgatgcaggaaaccttgaggaatctggcctccataggagaaaaatggaaagaccagaacattgaagatcagtacaaaaatcccaggaataatctaagaagtcttctgggagagagagttgatgaaaatacagaagaaaatcattgtggagaaacttctagccagattccagatgacacactgaacaaaaaaacttctcctggagtaaaatcatgtgaaagcagtgtgtgtggagaagtcttcgtgggtcattcttcccttaataggcacattagagctgacactgcacacaagccgtctgagtatcaggaatatggacaggagccatataagtgtcaacaacgtaagaaagccttcagatgtcacccctcctttcaaatgcaagaaaaggctcacactggagaaaaactctatgattgtaaagaatgtggaaaaaccttcatatcccattcaagcattcaaagacacatgataatgcacaatggagatggaacttataaatgtaagttttgtgggaaagcctgcccttgtctcagcatatatcttatacatgaacgagttcacactggagagaaaccatataaatgtaaacaatgtggtaaagcctttagttattcaacttcccttcaaatacatgaaagaactcacactggagagaagccttatgaatgtaaggaatgtgggaaagcattcggtagtcccaattccctttatgaacatagaagaactcacactggagagaagccatatgaatgcaaacaatgtggaaaagccttcagatggttccattcctttcaaatacatgaaagaactcacagtgaggagaaggcttatgaatgtaccaaatgtgggaaagcattcaagtgtcccagttatctttgtagacatgaagtgacccactctgggaaaaagccctgtgaatgtaaacaatgtgggaaagcattatcttatcttaactttcaaagacacatgaaaatgcacactagaatgagaccttataaatgtaagactgtggaaaagcctttgattctcccagttcgttttgaagacatgaaagaactcacactggagagaaaccttatgaatgcaagcactgtggtaaagccttcaatcgttccagttcctttcactatcatgaaaggactcacactggagagaaaccctatgaatgtaagcagtgtagtaaagccttcatttcttccacttcctttcgatatcatgaaaggactcacactggagagaaaccgtatgagtgtaagcaatgtgggaaagccttcagatctgcctcacaccttcaaatgcatggaaggactcacactcaagagaaaccctatgaatgtaagcagtgtggtaaagccttcattttttccacttcctttcgatatcatgaaaggactcacactggagagaaaccctatgagtgtaagcaatgtgggaaagccttcacatctgcctcacaccttcaaatgcatgaaaggactcacactggaaagcaactgtatgaatctaaacaatgtgaaaaaacctttggatctgtcagaaaccttcaaattcatgaaaagacacaccctggagagaaaccctataaggaatatggaaaagcattcaacaatttctcttcctttcaaatacatgcaacaatgcacagaggacagaatgcctatgaatgtaaagagtgtgacaaagcattcatatctgccaagatccttcgagtacatgcaagaacacaccctggagagaaaccctatgaatgtaaggaatgcggaaaagcgttcaattatttttcttctttgcgtatacacaaaaggatgcacactggagagaaaccatattaatgtaaggattgtgggaaagcattcagtttgcctggttcctttcgtagacataaaagggctcacactggagtagtaatgaactagtccgtaacttgaaagtatttcgatttcttggctttatatatcttgtggaaaggacgagtttaatgtaatgtcttacacgcg

SEQ ID NO: 287 - DNA, 3041 bp, Homo sapiens
  source 1..3041: mol_type = genomic DNA
accgccaccatggcaacacaggcgtatactgagctacaggcagccccgccaccatcccagccgccacaggccccgccacaagcccagccccagccgccaccgccaccacccccagcggcaccccagcccccgcagccacccaccgctgctgccacccctcagccccaatatgtcaccgagctgcagagcccccagccccaggcacagccaccgggtggccagaagcagtacgtgacggagctcccggctgtacccgcaccctcgcagccaaccggtgcacccaccccttcgcctgcaccccagcagtacatcgtggtcactgtctctgaaggtgccatgcgggccagcgagacagtgtcggaggccagccccggctccaccgccagccagaccggcgttcctactcaggtggttcagcaggtgcagggcacccagcagcggctgctggtccagacgagcgtgcaggccaagccaggccacgtgtcgcccctccagctgaccaacatccaagtgccccagcaggctcttcccacgcagcgtctggtggtgcagagcgcagccccaggcagcaaaggtggccaggtctccctgacggtccatggtacccagcaggtgcactcgcccccagagcagtcgccggtgcaggccaacagctcttccagcaagacagccggggcccccacgggcacagtgccacagcagctgcaggtccacggcgtccagcagagtgtccccgtcacccaagagagatctgtggtccaggccactccacaagcgcccaaacccggcccggtgcagccgctgaccgtgcagggcctccagccagtccacgtggctcaagaggtgcagcagctccagcaggtgcccgtcccacacgtgtactccagccaggtgcagtatgtggagggcggcgatgccagctacacggccagtgccatccgttccagcacctactcctatcccgagacgccgctgtacacgcagacggcaagcaccagctactacgaggccgcaggcacggccacccaggtcagcacccccgccacctcccaggcggtggccagcagtggctccatgcccatgtacgtgtccggcagccaggtcgtcgccagctccaccagcactggggctggggccagcaacagcagcggaggtggtggcagtggtggtggcggcggcggcgggggaggcggtggcgggggtggcagtggcagcaccggaggcggcggcagcggagcaggcacctacgtgatccaaggcggctacatgctgggcagtgccagccagtcttactctcacaccacccgtgcctcgccagccacggtccagtggctcctggacaactatgagacggctgagggcgtgagtctgccacggagcaccctctactgccactacttactgcactgccaggagcagaagctggagcccgtcaacgccgcctccttcggcaagctcatccgctccgtcttcatgggcctgcgaacccgccgtctgggcaccaggggcaactccaagtaccactactatggcctgcgcatcaaggccagctcacccctgctgcggctgatggaggaccagcagcacatggccatgcggggccagcccttctcgcagaagcagaggctcaagcccatccagaagatggaaggcatgaccaacggcgtggcggtggggcagcagccgagcacggggctgtcggacatcagcgcccaggtgcagcagtaccagcaatttttggatgcctctcggagcctccctgacttcacagagctcgacctccagggcaaggtgctgcctgagggcgtcgggcccggggacatcaaagccttccaggtcctgtaccgggaacactgtgaggccattgtcgacgtcatggtgaacctgcagttcaccctggtggagacgctgtggaagaccttctggaggtacaacctcagccagcccagtgaggcgccaccgctggctgtacatgacgaggccgagaagcgactgcccaaagccatcctggtgctcctctccaagttcgagcccgtgctccaatggaccaagcactgtgacaacgtgctgtaccagggcctggtggaaatcctcattcccgacgtgctgcggcccatccccagtgccttgacccaagcgatccggaactttgccaagagcctggagagctggctcacccacgccatggtcaacatccccgaggagatgctgcgggtgaaggtggccgcggctggcgccttcgcgcagacactgcggcgctacacgtcgctcaaccacctggcgcaggcggcgcgcgctgtgctgcagaacaccgcacagatcaaccagatgctgagcgacctcaaccgcgtggacttcgccaacgtgcaggagcaggcctcgtgggtgtgccgctgcgaggaccgcgtggtgcagcggctggagcaggacttcaaggtgacgctgcagcagcagaactcgctggagcagtgggcggcctggctggacggcgtggtgagccaggtgctcaagccctaccagggcagcgccggcttccccaaggccgccaagctcttcctcctcaagtggtccttctacagctccatggtgatccgggacctgaccctgcgcagcgccgccagcttcggttccttccacctcatccggctgctctacgacgagtacatgtactacctgatcgagcaccgcgtagcccaggccaagggcgagacccccatcgccgtcatgggcgagttcgccaatctggccacctccctgaaccccctggaccccgacaaagacgaggaggaagaagaggaggaggagagcgaggacgagctgccgcaggacatctcactggcggctggcggcgagtcacccgcgctgggcccggagaccctggagccgccggccaagctggcgcggactgacgcgcgcggcctcttcgtgcaggcgctgccctccagctagtaatgaactagtccgtaacttgaaagtatttcgatttcttggctttatatatcttgtggaaaggacgaaggcgcgtatacaatatgaccgaa

SEQ ID NO: 288 - DNA, 2198 bp, Homo sapiens
  source 1..2198: mol_type = genomic DNA
accgccaccatgcagaattccgagggtggagcggattcgccagcgtccgtggctctgcgtccctcggcggcagccccgcctgtgccagcctccccgcagagggtgttggtccaggcagccagctccaatcccaaaggggcccagatgcagccgatctccctccccagagttcagcaggtaccccagcaggtgcagccggtgcagcacgtgtatcctgcccaggtgcagtacgtggaagggggagacgccgtctacaccaatggagccatacgaacagcctacacctacaaccccgagcctcagatgtacgcccccagcagcacggcttcttacttcgaggccccaggcggtgcccaggtgaccgtggcagcctcgtccccgccagcggtcccctcccacagcatggtgggcatcaccatggatgtcggggggagccccatcgtctccagcgcgggagcctatctcatccacggggggatggacagcaccagacactccctggcccacacctcccgctcatcgcccgccacgctccagtggctgttggataattatgaaacagcggaaggtgtgagtctccccagaagttctctttacaaccactaccttcggcactgccaggagcacaagctagacccagtgaacgccgcctccttcgggaaactgatccgttctgtgtttatggggctgagaacgcggcggctgggcaccaggggcaactcgaagtaccattactatgggattcgtctgaagccggactcaccactgaaccggctgcaggaggacacgcagtacatggccatgcggcagcagcccatgcaccagaagcccaggtaccggccagcccagaagacggacagcctcggggacagcggctcccacagcggcctgcacagcactccggaacagaccatggccgtgcagagccagcaccaccagcagtacatagatgtctcccacgtcttccccgagttcccagcgcccgacctgggcagcttcctgctgcaggacggcgtcacactgcacgacgtcaaggccctgcagctggtgtacagacggcactgcgaggcaactgtagatgtggtgatgaacctccagttccactacatcgagaagctgtggctctccttctggaactctaaggcctcctccagcgacggccccacctctcttcctgccagtgacgaagaccccgagggcgccgtcctgcccaaggacaagcttatctccctgtgtcagtgcgaccccatcctcaggtggatgaggagctgcgaccacatcctctaccaggcgctggtggagattctcatccccgacgtgctgaggccggtccccagtaccttgacacaggccatccgtaactttgccaagagcttggaaggctggttgacaaatgccatgagtgacttcccacaacaggtcatccagaccaaggtgggcgtcgtcagtgccttcgcccagacgctgcggcgctacacgtccctcaaccacctggcgcaggcggcccgggcggtgctgcagaacacgtcccagatcaaccagatgctcagcgacctcaaccgcgtggactttgccaacgtgcaggagcaggcctcgtgggtgtgccagtgcgaggagagtgtggtgcagcggctggagcaggatttcaagctgaccctgcagcagcagagctccctggaccagtgggccagctggctggacagtgtggtcacccaggtcctgaagcagcatgccggcagccccagcttccccaaggccgcccggcagttcttgctgaaatggtccttttacagctccatggtgatccgggacctgaccctgcgcagcgctgccagcttcggctccttccacctcatccgcctgctctacgacgagtacatgttctacctggtggagcaccgcgtcgcggaggccaccggagagacgccgatcgctgtgatgggagagttcaacgatctcgcctctctgtcgctgacgctgctcgacaaagatgacatgggcgatgagcagcgtggcagcgaggcgggcccagacgcccgcagcctgggtgagcccctggtaaagcgggagcgcagtgaccccaaccactccctgcagggcatctagtaatgaactagtccgtaacttgaaagtatttcgatttcttggctttatatatcttgtggaaaggacgagttgcagtatctgagagactgctt

SEQ ID NO: 289 - DNA, 2273 bp, Homo sapiens
  source 1..2273: mol_type = genomic DNA
accgccaccatgcagaattccgagggtggagcggattcgccagcgtccgtggctctgcgtccctcggcggcagccccgcctgtgccagcctccccgcagagggtgttggtccaggcagccagctccaatcccaaaggggcccagatgcagccgatctccctccccagagttcagcaggtaccccagcaggtgcagccggtgcagcacgtgtatcctgcccaggtgcagtacgtggaagggggagacgccgtctacaccaatggagccatacgaacagcctacacctacaaccccgagcctcagatgtacgcccccagcagcacggcttcttacttcgaggccccaggcggtgcccaggtgaccgtggcagcctcgtccccgccagcggtcccctcccacagcatggtgggcatcaccatggatgtcggggggagccccatcgtctccagcgcgggagcctatctcatccacggggggatggacagcaccagacactccctggcccacacctcccgctcatcgcccgccacgcttgaaatggcgattgaaaacctccaaaaaagcgaaggaatcacatcacacaaaagcggtttactcaacagccatctccagtggctgttggataattatgaaacagcggaaggtgtgagtctccccagaagttctctttacaaccactaccttcggcactgccaggagcacaagctagacccagtgaacgccgcctccttcgggaaactgatccgttctgtgtttatggggctgagaacgcggcggctgggcaccaggggcaactcgaagtaccattactatgggattcgtctgaagccggactcaccactgaaccggctgcaggaggacacgcagtacatggccatgcggcagcagcccatgcaccagaagcccaggtaccggccagcccagaagacggacagcctcggggacagcggctcccacagcggcctgcacagcactccggaacagaccatggccgtgcagagccagcaccaccagcagtacatagatgtctcccacgtcttccccgagttcccagcgcccgacctgggcagcttcctgctgcaggacggcgtcacactgcacgacgtcaaggccctgcagctggtgtacagacggcactgcgaggcaactgtagatgtggtgatgaacctccagttccactacatcgagaagctgtggctctccttctggaactctaaggcctcctccagcgacggccccacctctcttcctgccagtgacgaagaccccgagggcgccgtcctgcccaaggacaagcttatctccctgtgtcagtgcgaccccatcctcaggtggatgaggagctgcgaccacatcctctaccaggcgctggtggagattctcatccccgacgtgctgaggccggtccccagtaccttgacacaggccatccgtaactttgccaagagcttggaaggctggttgacaaatgccatgagtgacttcccacaacaggtcatccagaccaaggtgggcgtcgtcagtgccttcgcccagacgctgcggcgctacacgtccctcaaccacctggcgcaggcggcccgggcggtgctgcagaacacgtcccagatcaaccagatgctcagcgacctcaaccgcgtggactttgccaacgtgcaggagcaggcctcgtgggtgtgccagtgcgaggagagtgtggtgcagcggctggagcaggatttcaagctgaccctgcagcagcagagctccctggaccagtgggccagctggctggacagtgtggtcacccaggtcctgaagcagcatgccggcagccccagcttccccaaggccgcccggcagttcttgctgaaatggtccttttacagctccatggtgatccgggacctgaccctgcgcagcgctgccagcttcggctccttccacctcatccgcctgctctacgacgagtacatgttctacctggtggagcaccgcgtcgcggaggccaccggagagacgccgatcgctgtgatgggagagttcaacgatctcgcctctctgtcgctgacgctgctcgacaaagatgacatgggcgatgagcagcgtggcagcgaggcgggcccagacgcccgcagcctgggtgagcccctggtaaagcgggagcgcagtgaccccaaccactccctgcagggcatctagtaatgaactagtccgtaacttgaaagtatttcgatttcttggctttatatatcttgtggaaaggacgatgtcagcaatcacagcaggccatg

SEQ ID NO: 290 - DNA, 2225 bp, Homo sapiens
  source 1..2225: mol_type = genomic DNA
accgccaccatgcagacatcagagactgggtcggacacaggctcgacagtgaccttacaaacatctgtggctagtcaagcagcagtgcctacgcaggtggtacagcaagtaccagtacaacaacaggtacagcaggtacagactgtgcagcaggtacaacatgtctatcccgctcaggtgcagtatgtggaaggaagcgatactgtctataccaatggagcaatccgaacaacaacgtatccttacacagagacacagatgtacagccaaaatactggagggaattactttgatactcaagggagttccgcccaggtgactaccgtggtctcatcccacagtatggtgggcactggtgggattcagatgggcgtcacaggaggacaactcatcagcagctctggaggaacctatctgatcggcaactcaatggagaattctggtcactcagtgacacacacaactcgggcctccccagcgacaattgaaatggcgattgagacgctgcaaaagtctgacggtctgtccactcacagaagctctcttctcaacagccatctccagtggctgttggacaattatgagacagcagaaggagtgagccttcccagaagcactctgtacaaccactaccttcgacactgtcaggaacacaaactggacccagtcaatgctgcctcttttggaaaattaataagatcaatttttatggggctacgaaccaggagattgggcactagaggaaactccaaataccactactatgggattcgtgtcaagccagattcccctcttaatcgtctgcaagaagacatgcagtatatggctatgagacaacaacccatgcaacagaaacaaaggtacaagcctatgcagaaagtggatggggttgcagatggtttcacaggaagtggtcaacagacaggcacatctgttgagcaaactgtaattgcccaaagccaacatcatcaacagtttttagatgcatctcgagcacttccagagtttggagaagttgaaatctcttctctgccagatggtactacctttgaggatatcaagtcactgcagagtctttatagagagcactgtgaggcaatattggacgttgttgtgaatcttcaatttagcctgatagaaaaattgtggcaaacattctggcgctattctccctctactccaactgatggcactaccattaccgaatcgagcaatctgagtgaaatagaaagtcgacttccgaaagcaaagctgataactctgtgcaaacatgagtctatcctgaaatggatgtgtaactgtgaccatgggatgtaccaggctttggtggagattctcatccccgacgtccttagacctattcctagtgccttgacccaagccattcgaaattttgcaaaaagccttgaaggttggctttccaatgccatgaacaatattccacagagaatgatacaaaccaaggttgccgctgtaagtgcctttgcccagactctgcgaagatacacgtcgcttaatcacctggcccaggcagctcgtgcagtgcttcagaacacttcccaaatcaaccagatgcttagtgacctcaaccgtgtcgactttgccaatgtccaggagcaggcttcctgggtgtgccagtgtgatgacaacatggttcagagactagaaacagacttcaagatgactcttcagcagcagagcaccctggagcagtgggctgcgtggcttgacaatgtgatgatgcaagcactgaaaccctatgaaggaagacccagttttcctaaagccgccaggcagtttctgctaaaatggtctttctacagctcaatggttattcgggacttaaccttacgcagtgctgctagctttggctccttccacctgatccgtctactctacgacgaatatatgttttacttagtagaacatcgtgttgctcaggcaacaggagagactcctatagcagtcatgggcgaggtaagagaggctgaaagagctgtgacccactgggttattaaaaataagccagaattacacttcagtctaaatacattattgattaaaaccatggttcctaaccaagtcagcctcagagccaggagggactgtggagttattgcaagagttccttagtaatgaactagtccgtaacttgaaagtatttcgatttcttggctttatatatcttgtggaaaggacgaccgtggaggcggctgtgtgcgaag

SEQ ID NO: 291 - DNA, 1343 bp, Homo sapiens
  source 1..1343: mol_type = genomic DNA
accgccaccatgcagacatcagagactgggtcggacacaggctcgacagtgaccttacaaacatctgtggctagtcaagcagcagtgcctacgcaggtggtacagcaagtaccagtacaacaacaggtacagcaggtacagactgtgcagcaggtacaacatgtctatcccgctcaggtgcagtatgtggaaggaagcgatactgtctataccaatggagcaatccgaacaacaacgtatccttacacagagacacagatgtacagccaaaatactggagggaattactttgatactcaagggagttccgcccaggtgactaccgtggtctcatcccacagtatggtgggcactggtgggattcagatgggcgtcacaggaggacaactcatcagcagctctggaggaacctatctgatcggcaactcaatggagaattctggtcactcagtgacacacacaactcgggcctccccagcgacaattgaaatggcgattgagacgctgcaaaagtctgacggtctgtccactcacagaagctctcttctcaacagccatctccagtggctgttggacaattatgagacagcagaaggagtgagccttcccagaagcactctgtacaaccactaccttcgacactgtcaggaacacaaactggacccagtcaatgctgcctcttttggaaaattaataagatcaatttttatggggctacgaaccaggagattgggcactagaggaaactccaaataccactactatgggattcgtgtcaagccagattcccctcttaatcgtctgcaagaagacatgcagtatatggctatgagacaacaacccatgcaacagaaacaaaggtacaagcctatgcagaaagtggatggggttgcagatggtttcacaggaagtggtcaacagacaggcacatctgttgagcaaactgtaattgcccaaagccaacatcatcaacagtttttagatgcatctcgagcacttccagagtttggagaagttgaaatctcttctctgccagatggtactacctttgaggatatcaagtcactgcagagtctttatagagagcactgtgaggcaatattggacgttgttgtgaatcttcaatttagcctgatagaaaaattgtggcaaacattctggcgctattctccctctactccaactgatggcactaccattaccgaatcgaggtcagaatcaacatcttttccaattcattttcatggctagtaatgaactagtccgtaacttgaaagtatttcgatttcttggctttatatatcttgtggaaaggacgatcatgcaataaccgacgctagtag

SEQ ID NO: 292 - DNA, 2351 bp, Homo sapiens
  source 1..2351: mol_type = genomic DNA
accgccaccatgcagacatcagagactgggtcggacacaggctcgacagtgaccttacaaacatctgtggctagtcaagcagcagtgcctacgcaggtggtacagcaagtaccagtacaacaacaggtacagcaggtacagactgtgcagcaggtacaacatgtctatcccgctcaggtgcagtatgtggaaggaagcgatactgtctataccaatggagcaatccgaacaacaacgtatccttacacagagacacagatgtacagccaaaatactggagggaattactttgatactcaagggagttccgcccaggtgactaccgtggtctcatcccacagtatggtgggcactggtgggattcagatgggcgtcacaggaggacaactcatcagcagctctggaggaacctatctgatcggcaactcaatggagaattctggtcactcagtgacacacacaactcgggcctccccagcgacaattgaaatggcgattgagacgctgcaaaagtctgacggtctgtccactcacagaagctctcttctcaacagccatctccagtggctgttggacaattatgagacagcagaaggagtgagccttcccagaagcactctgtacaaccactaccttcgacactgtcaggaacacaaactggacccagtcaatgctgcctcttttggaaaattaataagatcaatttttatggggctacgaaccaggagattgggcactagaggaaactccaaataccactactatgggattcgtgtcaagccagattcccctcttaatcgtctgcaagaagacatgcagtatatggctatgagacaacaacccatgcaacagaaacaaaggtacaagcctatgcagaaagtggatggggttgcagatggtttcacaggaagtggtcaacagacaggcacatctgttgagcaaactgtaattgcccaaagccaacatcatcaacagtttttagatgcatctcgagcacttccagagtttggagaagttgaaatctcttctctgccagatggtactacctttgaggatatcaagtcactgcagagtctttatagagagcactgtgaggcaatattggacgttgttgtgaatcttcaatttagcctgatagaaaaattgtggcaaacattctggcgctattctccctctactccaactgatggcactaccattaccgaatcgagcaatctgagtgaaatagaaagtcgacttccgaaagcaaagctgataactctgtgcaaacatgagtctatcctgaaatggatgtgtaactgtgaccatgggatgtaccaggctttggtggagattctcatccccgacgtccttagacctattcctagtgccttgacccaagccattcgaaattttgcaaaaagccttgaaggttggctttccaatgccatgaacaatattccacagagaatgatacaaaccaaggttgccgctgtaagtgcctttgcccagactctgcgaagatacacgtcgcttaatcacctggcccaggcagctcgtgcagtgcttcagaacacttcccaaatcaaccagatgcttagtgacctcaaccgtgtcgactttgccaatgtccaggagcaggcttcctgggtgtgccagtgtgatgacaacatggttcagagactagaaacagacttcaagatgactcttcagcagcagagcaccctggagcagtgggctgcgtggcttgacaatgtgatgatgcaagcactgaaaccctatgaaggaagacccagttttcctaaagccgccaggcagtttctgctaaaatggtctttctacagctcaatggttattcgggacttaaccttacgcagtgctgctagctttggctccttccacctgatccgtctactctacgacgaatatatgttttacttagtagaacatcgtgttgctcaggcaacaggagagactcctatagcagtcatgggcgagtttggtgatttaaatgccgtgtctcctggaaatctggataaagatgaaggcagtgaagtagaaagtgaaatggatgaagaactggatgactcttcagagcctcaagccaaaagagagaaaacagagctgagccaggcatttccagtgggctgcatgcagcctgttctcgagactggcgtgcaaccaagcctcctgaatccaattcacagcgagcacattgtcacaagtactcagactatcagacagtgcagcgctacaggaaatacctacactgcagtctagtaatgaactagtccgtaacttgaaagtatttcgatttcttggctttatatatcttgtggaaaggacgacctctccgactcacaatgtacttt

SEQ ID NO: 293 - DNA, 389 bp, Homo sapiens
  source 1..389: mol_type = genomic DNA
accgccaccatggacccatctgtgacgctgtggcagtttctgctgcagctgctgagagagcaaggcaatggccacatcatctcctggacttcacgggatggtggtgaattcaagctggtggatgcagaggaggtggcccggctgtgggggctacgcaagaacaagaccaacatgaattacgacaagctcagccgggccttgcggtactactatgacaagaacatcatccgcaaggtgagcggccagaagttcgtctacaagtttgtgtcctaccctgagtcccattgcgccccgtagtaatgaactagtccgtaacttgaaagtatttcgatttcttggctttatatatcttgtggaaaggacgagtccaaggctcaccgcacacccag

SEQ ID NO: 294 - DNA, 1397 bp, Homo sapiens
  source 1..1397: mol_type = genomic DNA
accgccaccatggacagtgctatcaccctgtggcagttccttcttcagctcctgcagaagcctcagaacaagcacatgatctgttggacctctaatgatgggcagtttaagcttttgcaggcagaagaggtggctcgtctctgggggattcgcaagaacaagcctaacatgaattatgacaaactcagccgagccctcagatactattatgtaaagaatatcatcaaaaaagtgaatggtcagaagtttgtgtacaagtttgtctcttatccagagattttgaacatggatccaatgacagtgggcaggattgagggtgactgtgaaagtttaaacttcagtgaagtcagcagcagttccaaagatgtggagaatggagggaaagataaaccacctcagcctggtgccaagacctctagccgcaatgactacatacactctggcttatattcttcatttactctcaactctttgaactcctccaatgtaaagcttttcaaattgataaagactgagaatccagccgagaaactggcagagaaaaaatctcctcaggagcccacaccatctgtcatcaaatttgtcacgacaccttccaaaaagccaccggttgaacctgttgctgccaccatttcaattggcccaagtatttctccatcttcagaagaaactatccaagctttggagacattggtttccccaaaactgccttccctggaagccccaacctctgcctctaacgtaatgactgcttttgccaccacaccacccatttcgtccataccccctttgcaggaacctcccagaacaccttcaccaccactgagttctcacccagacatcgacacagacattgattcagtggcttctcagccaatggaacttccagagaatttgtcactggagcctaaagaccaggattcagtcttgctagaaaaggacaaagtaaataattcatcaagatccaagaaacccaaagggttagaactggcacccacccttgtgatcacgagcagtgatccaagcccactgggaatactgagcccatctctccctacagcttctcttacaccagcatttttttcacagacacccatcatactgactccaagccccttgctctccagtatccacttctggagtactctcagtcctgttgctcccctaagtccagccagactgcaaggtgctaacacacttttccagtttccttctgtactgaacagtcatgggccattcactctgtctgggctggatggaccttccacccctggcccattttccccagacctacagaagacatagtaatgaactagtccgtaacttgaaagtatttcgatttcttggctttatatatcttgtggaaaggacgaatctgcttagacttctacggtaaa

SEQ ID NO: 295 - DNA, 1079 bp, Homo sapiens
  source 1..1079: mol_type = genomic DNA
accgccaccatggcgcggcctgtgagcgacaggaccccggcccctctgctgctgggcggcccggccgggacaccccctggcgggggagcgctgcttgggttgcggagccttctgcaggggaccagcaagcccaaagagccggccagctgtctcctgaaggaaaaggagcgcaaggcggccctgcctgcagccacaacccctgggccaggcctggagactgcgggcccggcggatgccccggctggggcagtggtgggcggagggtccccgcgggggcgcccggggccggtgcccgccccgggtctgttggcgccactgctgtgggagcgcacgctgccgttcggcgatgtggagtacgtagacctggacgccttcctgctggagcacgggctcccgcccagcccgccgccccccggtggcccgtcgccggagccgtcgcccgcgcggacgcccgcaccctccccagggccgggttcgtgcggctcggcttccccccgctcctctcctgggcacgcccccgcccgggctgccctcgggaccgccagcggccaccgcgcaggcctgacctctcgggacacacccagccctgtggacccagacaccgtggaggtgttgatgacctttgaacccgacccagctgatcttgccctatcaagcattcctggccacgagacctttgaccctcgaagacatcgcttctcagaagaggaacttaagccccagccaatcatgaagaaggcaagaaaaatccaggtgccggaggagcagaaggatgagaaatactggagccggcggtacaagaacaacgaggcagccaagcggtcccgtgacgcccggcggctcaaggagaaccagatatcggtgcgggcggccttcctggagaaggagaacgccctgctgcggcaggaagttgtggccgtgcgccaggagctgtcccactaccgcgccgtgctgtcccgataccaggcccagcacggggccctgtagtaatgaactagtccgtaacttgaaagtatttcgatttcttggctttatatatcttgtggaaaggacgaactaacaatctccatctcttaaca

SEQ ID NO: 296 - DNA, 1187 bp, Homo sapiens
  source 1..1187: mol_type = genomic DNA
accgccaccatgcactgcagctgcttggctgagggcatcccagccaaccccggcaactggatctcagggttggccttccctgattgggcctacaaagccgagtcgtccccaggctcccggcagatccagctgtggcacttcatcctggagctgctgcagaaggaagagttccgccatgtcatcgcctggcagcagggagagtacggggaatttgtcatcaaggatccagatgaggtggcccgcctctggggccgcaggaaatgcaaaccacagatgaattatgacaagctgagccgggccctcagatattactacaataagaggatcctgcataagaccaaaggcaaaaggttcacatacaagttcaacttcagcaagctcatcgtagtcaactatcctttgtgggaagtgcgggcgccgccatccccccacttgctgctgggggcccctgccctgtgtcggccagcgctggtgcccgtgggtgtgcagagtgagctcctgcacagcatgctatttgcccatcaggccatggtggagcagctgacaggacagcagaccccccgagggccaccagagacctctggggataagaaggggagcagcagcagcgtctaccgacttggctctgccccaggcccctgccggctgggcctttgctgccatttggggagcgtccaaggcgagctgcctggtgttgcctccttcactcctcccctcccgccccctctgccctccaactggacctgtctctcggggcccttcttgcctcctctcccgtcagagcagcagctcccaggggcttttaagccagacatcctgctcccaggacctaggagcctcccaggggcctggcattttccagggcttcctctcttggcagggctgggacagggtgcgggtgagaggctttggctcttgtccctcaggcccgaggggctggaagtaaagcctgctcccatgatggaggcaaagggaggcctggatcccagggaggtcttctgcccagagacccgcagactcaaaactggggaggaaagccttacttcccccaatctggagaacctcaaagcagtgtggcccttggatcctccttagtaatgaactagtccgtaacttgaaagtatttcgatttcttggctttatatatcttgtggaaaggacgagagctacgtcatcatcggactaaa

SEQ ID NO: 297 - DNA, 1400 bp, Homo sapiens
  source 1..1400: mol_type = genomic DNA
accgccaccatgatgcaggaatctgcgacagagacaataagcaacagttcaatgaatcaaaatggaatgagcactctaagcagccaattagatgctggcagcagagatggaagatcaagtggtgacaccagctctgaagtaagcacagtagaactgctgcatctgcaacaacagcaggctctccaggcagcaagacaacttcttttacagcagcaaacaagtggattgaaatctcctaagagcagtgataaacagagaccactgcaggtgcctgtgtcagtggccatgatgactccccaggtgatcacccctcagcaaatgcagcagatccttcagcaacaagtcctgtctcctcagcagctacaagcccttctccaacaacagcaggctgtcatgctgcagcagcaacaactacaagagttttacaagaaacagcaagagcagttacatcttcagcttttgcagcagcagcagcaacagcagcagcagcaacaacagcagcaacaacagcagcagcaacaacaacaacaacagcagcaacaacagcagcagcagcagcaacagcagcagcagcagcaacagcatcctggaaagcaagcgaaagagcagcagcagcagcagcagcagcaacagcaattggcagcccagcagcttgtcttccagcagcagcttctccagatgcaacaactccagcagcagcagcatctgctcagccttcagcgtcagggactcatctccattccacctggccaggcagcacttcctgtccaatcgctgcctcaagctggcttaagtcctgctgagattcagcagttatggaaagaagtgactggagttcacagtatggaagacaatggcattaaacatggagggctagacctcactactaacaattcctcctcgactacctcctccaacacttccaaagcatcaccaccaataactcatcattccatagtgaatggacagtcttcagttctaagtgcaagacgagacagctcgtcacatgaggagactggggcctctcacactctctatggccatggagtttgcaaatggccaggctgtgaaagcatttgtgaagattttggacagtttttaaagcaccttaacaatgaacacgcattggatgaccgaagcactgctcagtgtcgagtgcaaatgcaggtggtgcaacagttagaaatacagctttctaaagaacgcgaacgtcttcaagcaatgatgacccacttgcacatgcgaccctcagagcccaaaccatctcccaaacctgtaagtgcatattgctttataaacagtaaatagtaatgaactagtccgtaacttgaaagtatttcgatttcttggctttatatatcttgtggaaaggacgactttgttgagcggagacattcctc

SEQ ID NO: 298 - DNA, 2249 bp, Homo sapiens
  source 1..2249: mol_type = genomic DNA
accgccaccatgatgcaggaatctgcgacagagacaataagcaacagttcaatgaatcaaaatggaatgagcactctaagcagccaattagatgctggcagcagagatggaagatcaagtggtgacaccagctctgaagtaagcacagtagaactgctgcatctgcaacaacagcaggctctccaggcagcaagacaacttcttttacagcagcaaacaagtggattgaaatctcctaagagcagtgataaacagagaccactgcaggtgcctgtgtcagtggccatgatgactccccaggtgatcacccctcagcaaatgcagcagatccttcagcaacaagtcctgtctcctcagcagctacaagcccttctccaacaacagcaggctgtcatgctgcagcagcaacaactacaagagttttacaagaaacagcaagagcagttacatcttcagcttttgcagcagcagcagcaacagcagcagcagcaacaacagcagcaacaacagcagcagcaacaacaacaacaacagcagcaacaacagcagcagcagcagcaacagcagcagcagcagcaacagcatcctggaaagcaagcgaaagagcagcagcagcagcagcagcagcaacagcaattggcagcccagcagcttgtcttccagcagcagcttctccagatgcaacaactccagcagcagcagcatctgctcagccttcagcgtcagggactcatctccattccacctggccaggcagcacttcctgtccaatcgctgcctcaagctggcttaagtcctgctgagattcagcagttatggaaagaagtgactggagttcacagtatggaagacaatggcattaaacatggagggctagacctcactactaacaattcctcctcgactacctcctccaacacttccaaagcatcaccaccaataactcatcattccatagtgaatggacagtcttcagttctaagtgcaagacgagacagctcgtcacatgaggagactggggcctctcacactctctatggccatggagtttgcaaatggccaggctgtgaaagcatttgtgaagattttggacagtttttaaagcaccttaacaatgaacacgcattggatgaccgaagcactgctcagtgtcgagtgcaaatgcaggtggtgcaacagttagaaatacagctttctaaagaacgcgaacgtcttcaagcaatgatgacccacttgcacatgcgaccctcagagcccaaaccatctcccaaacctctaaatctggtgtctagtgtcaccatgtcgaagaatatgttggagacatccccacagagcttacctcaaacccctaccacaccaacggccccagtcaccccgattacccagggaccctcagtaatcaccccagccagtgtgcccaatgtgggagccatacgaaggcgacattcagacaaatacaacattcccatgtcatcagaaattgccccaaactatgaattttataaaaatgcagatgtcagacctccatttacttatgcaactctcataaggcaggctatcatggagtcatctgacaggcagttaacacttaatgaaatttacagctggtttacacggacatttgcttacttcaggcgtaatgcagcaacttggaagaatgcagtacgtcataatcttagcctgcacaagtgttttgttcgagtagaaaatgttaaaggagcagtatggactgtggatgaagtagaataccagaagcgaaggtcacaaaagataacaggaagtccaaccttagtaaaaaatatacctaccagtttaggctatggagcagctcttaatgccagtttgcaggctgccttggcagagagcagtttacctttgctaagtaatcctggactgataaataatgcatccagtggcctactgcaggccgtccacgaagacctcaatggttctctggatcacattgacagcaatggaaacagtagtccgggctgctcacctcagccgcacatacattcaatccacgtcaaggaagagccagtgattgcagaggatgaagactgcccaatgtccttagtgacaacagctaatcacagtccagaattagaagacgacagagagattgaagaagagcctttatctgaagatctggaatagtaatgaactagtccgtaacttgaaagtatttcgatttcttggctttatatatcttgtggaaaggacgaactccgcatgccactccatatgta

SEQ ID NO: 299 - DNA, 2324 bp, Homo sapiens
  source 1..2324: mol_type = genomic DNA
accgccaccatgatgcaggaatctgcgacagagacaataagcaacagttcaatgaatcaaaatggaatgagcactctaagcagccaattagatgctggcagcagagatggaagatcaagtggtgacaccagctctgaagtaagcacagtagaactgctgcatctgcaacaacagcaggctctccaggcagcaagacaacttcttttacagcagcaaacaagtggattgaaatctcctaagagcagtgataaacagagaccactgcaggaattgcttccagaaacaaaattatgtatctgtggccactcttctggtgatgggcatcctcacaacacatttgcagtgcctgtgtcagtggccatgatgactccccaggtgatcacccctcagcaaatgcagcagatccttcagcaacaagtcctgtctcctcagcagctacaagcccttctccaacaacagcaggctgtcatgctgcagcagcaacaactacaagagttttacaagaaacagcaagagcagttacatcttcagcttttgcagcagcagcagcaacagcagcagcagcaacaacagcagcaacaacagcagcagcaacaacaacaacaacagcagcaacaacagcagcagcagcagcaacagcagcagcagcagcaacagcatcctggaaagcaagcgaaagagcagcagcagcagcagcagcagcaacagcaattggcagcccagcagcttgtcttccagcagcagcttctccagatgcaacaactccagcagcagcagcatctgctcagccttcagcgtcagggactcatctccattccacctggccaggcagcacttcctgtccaatcgctgcctcaagctggcttaagtcctgctgagattcagcagttatggaaagaagtgactggagttcacagtatggaagacaatggcattaaacatggagggctagacctcactactaacaattcctcctcgactacctcctccaacacttccaaagcatcaccaccaataactcatcattccatagtgaatggacagtcttcagttctaagtgcaagacgagacagctcgtcacatgaggagactggggcctctcacactctctatggccatggagtttgcaaatggccaggctgtgaaagcatttgtgaagattttggacagtttttaaagcaccttaacaatgaacacgcattggatgaccgaagcactgctcagtgtcgagtgcaaatgcaggtggtgcaacagttagaaatacagctttctaaagaacgcgaacgtcttcaagcaatgatgacccacttgcacatgcgaccctcagagcccaaaccatctcccaaacctctaaatctggtgtctagtgtcaccatgtcgaagaatatgttggagacatccccacagagcttacctcaaacccctaccacaccaacggccccagtcaccccgattacccagggaccctcagtaatcaccccagccagtgtgcccaatgtgggagccatacgaaggcgacattcagacaaatacaacattcccatgtcatcagaaattgccccaaactatgaattttataaaaatgcagatgtcagacctccatttacttatgcaactctcataaggcaggctatcatggagtcatctgacaggcagttaacacttaatgaaatttacagctggtttacacggacatttgcttacttcaggcgtaatgcagcaacttggaagaatgcagtacgtcataatcttagcctgcacaagtgttttgttcgagtagaaaatgttaaaggagcagtatggactgtggatgaagtagaataccagaagcgaaggtcacaaaagataacaggaagtccaaccttagtaaaaaatatacctaccagtttaggctatggagcagctcttaatgccagtttgcaggctgccttggcagagagcagtttacctttgctaagtaatcctggactgataaataatgcatccagtggcctactgcaggccgtccacgaagacctcaatggttctctggatcacattgacagcaatggaaacagtagtccgggctgctcacctcagccgcacatacattcaatccacgtcaaggaagagccagtgattgcagaggatgaagactgcccaatgtccttagtgacaacagctaatcacagtccagaattagaagacgacagagagattgaagaagagcctttatctgaagatctggaatagtaatgaactagtccgtaacttgaaagtatttcgatttcttggctttatatatcttgtggaaaggacgaacgtgcaggaatgcgctggagcag

SEQ ID NO: 300 - DNA, 2300 bp, Homo sapiens
  source 1..2300: mol_type = genomic DNA
accgccaccatgatgcaggaatctgcgacagagacaataagcaacagttcaatgaatcaaaatggaatgagcactctaagcagccaattagatgctggcagcagagatggaagatcaagtggtgacaccagctctgaagtaagcacagtagaactgctgcatctgcaacaacagcaggctctccaggcagcaagacaacttcttttacagcagcaaacaagtggattgaaatctcctaagagcagtgataaacagagaccactgcaggtgcctgtgtcagtggccatgatgactccccaggtgatcacccctcagcaaatgcagcagatccttcagcaacaagtcctgtctcctcagcagctacaagcccttctccaacaacagcaggctgtcatgctgcagcaggattttttggattctggattggaaaatttcagagctgccttggaaaaaaatcaacaactacaagagttttacaagaaacagcaagagcagttacatcttcagcttttgcagcagcagcagcaacagcagcagcagcaacaacagcagcaacaacagcagcagcaacaacaacaacaacagcagcaacaacagcagcagcagcagcaacagcagcagcagcagcaacagcatcctggaaagcaagcgaaagagcagcagcagcagcagcagcagcaacagcaattggcagcccagcagcttgtcttccagcagcagcttctccagatgcaacaactccagcagcagcagcatctgctcagccttcagcgtcagggactcatctccattccacctggccaggcagcacttcctgtccaatcgctgcctcaagctggcttaagtcctgctgagattcagcagttatggaaagaagtgactggagttcacagtatggaagacaatggcattaaacatggagggctagacctcactactaacaattcctcctcgactacctcctccaacacttccaaagcatcaccaccaataactcatcattccatagtgaatggacagtcttcagttctaagtgcaagacgagacagctcgtcacatgaggagactggggcctctcacactctctatggccatggagtttgcaaatggccaggctgtgaaagcatttgtgaagattttggacagtttttaaagcaccttaacaatgaacacgcattggatgaccgaagcactgctcagtgtcgagtgcaaatgcaggtggtgcaacagttagaaatacagctttctaaagaacgcgaacgtcttcaagcaatgatgacccacttgcacatgcgaccctcagagcccaaaccatctcccaaacctctaaatctggtgtctagtgtcaccatgtcgaagaatatgttggagacatccccacagagcttacctcaaacccctaccacaccaacggccccagtcaccccgattacccagggaccctcagtaatcaccccagccagtgtgcccaatgtgggagccatacgaaggcgacattcagacaaatacaacattcccatgtcatcagaaattgccccaaactatgaattttataaaaatgcagatgtcagacctccatttacttatgcaactctcataaggcaggctatcatggagtcatctgacaggcagttaacacttaatgaaatttacagctggtttacacggacatttgcttacttcaggcgtaatgcagcaacttggaagaatgcagtacgtcataatcttagcctgcacaagtgttttgttcgagtagaaaatgttaaaggagcagtatggactgtggatgaagtagaataccagaagcgaaggtcacaaaagataacaggaagtccaaccttagtaaaaaatatacctaccagtttaggctatggagcagctcttaatgccagtttgcaggctgccttggcagagagcagtttacctttgctaagtaatcctggactgataaataatgcatccagtggcctactgcaggccgtccacgaagacctcaatggttctctggatcacattgacagcaatggaaacagtagtccgggctgctcacctcagccgcacatacattcaatccacgtcaaggaagagccagtgattgcagaggatgaagactgcccaatgtccttagtgacaacagctaatcacagtccagaattagaagacgacagagagattgaagaagagcctttatctgaagatctggaatagtaatgaactagtccgtaacttgaaagtatttcgatttcttggctttatatatcttgtggaaaggacgagtagtatccagactttcttcgtga

SEQ ID NO: 301 - DNA, 1466 bp, Homo sapiens
  source 1..1466: mol_type = genomic DNA
accgccaccatgcccaaccccaggcctggcaagccctcggccccttccttggcccttggcccatccccaggagcctcgcccagctggagggctgcacccaaagcctcagacctgctgggggcccggggcccagggggaaccttccagggccgagatcttcgaggcggggcccatgcctcctcttcttccttgaaccccatgccaccatcgcagctgcagctgcccacactgcccctagtcatggtggcaccctccggggcacggctgggccccttgccccacttacaggcactcctccaggacaggccacatttcatgcaccagctctcaacggtggatgcccacgcccggacccctgtgctgcaggtgcaccccctggagagcccagccatgatcagcctcacaccacccaccaccgccactggggtcttctccctcaaggcccggcctggcctcccacctgggatcaacgtggccagcctggaatgggtgtccagggagccggcactgctctgcaccttcccaaatcccagtgcacccaggaaggacaggtcagtggacagggctgggaaggatcctcgccctcctatcccctcccctgacaccctctgtccccccagcaccctttcggctgtgccccagagctcctacccactgctggcaaatggtgtctgcaagtggcccggatgtgagaaggtcttcgaagagccagaggacttcctcaagcactgccaggcggaccatcttctggatgagaagggcagggcacaatgtctcctccagagagagatggtacagtctctggagcagcagctggtgctggagaaggagaagctgagtgccatgcaggcccacctggctgggaaaatggcactgaccaaggcttcatctgtggcatcatccgacaagggctcctgctgcatcgtagctgctggcagccaaggccctgtcgtcccagcctggtctggcccccgggaggcccctgacagcctgtttgctgtccggaggcacctgtggggtagccatggaaacagcacattcccagagttcctccacaacatggactacttcaagttccacaacatgcgaccccctttcacctacgccacgctcatccgctgggccatcctggaggctccagagaagcagcggacactcaatgagatctaccactggttcacacgcatgtttgccttcttcagaaaccatcctgccacctggaagaacgccatccgccacaacctgagtctgcacaagtgctttgtgcgggtggagagcgagaagggggctgtgtggaccgtggatgagctggagttccgcaagaaacggagccagaggcccagcaggtgttccaaccctacacctggcccctagtaatgaactagtccgtaacttgaaagtatttcgatttcttggctttatatatcttgtggaaaggacgactggaggttcatgcttgagtaagt

SEQ ID NO: 302 - DNA, 1292 bp, Homo sapiens
  source 1..1292: mol_type = genomic DNA
accgccaccatgcccaaccccaggcctggcaagccctcggccccttccttggcccttggcccatccccaggagcctcgcccagctggagggctgcacccaaagcctcagacctgctgggggcccggggcccagggggaaccttccagggccgagatcttcgaggcggggcccatgcctcctcttcttccttgaaccccatgccaccatcgcagctgcagctctcaacggtggatgcccacgcccggacccctgtgctgcaggtgcaccccctggagagcccagccatgatcagcctcacaccacccaccaccgccactggggtcttctccctcaaggcccggcctggcctcccacctgggatcaacgtggccagcctggaatgggtgtccagggagccggcactgctctgcaccttcccaaatcccagtgcacccaggaaggacagcaccctttcggctgtgccccagagctcctacccactgctggcaaatggtgtctgcaagtggcccggatgtgagaaggtcttcgaagagccagaggacttcctcaagcactgccaggcggaccatcttctggatgagaagggcagggcacaatgtctcctccagagagagatggtacagtctctggagcagcagctggtgctggagaaggagaagctgagtgccatgcaggcccacctggctgggaaaatggcactgaccaaggcttcatctgtggcatcatccgacaagggctcctgctgcatcgtagctgctggcagccaaggccctgtcgtcccagcctggtctggcccccgggaggcccctgacagcctgtttgctgtccggaggcacctgtggggtagccatggaaacagcacattcccagagttcctccacaacatggactacttcaagttccacaacatgcgaccccctttcacctacgccacgctcatccgctgggccatcctggaggctccagagaagcagcggacactcaatgagatctaccactggttcacacgcatgtttgccttcttcagaaaccatcctgccacctggaagaacgccatccgccacaacctgagtctgcacaagtgctttgtgcgggtggagagcgagaagggggctgtgtggaccgtggatgagctggagttccgcaagaaacggagccagaggcccagcaggtgttccaaccctacacctggcccctagtaatgaactagtccgtaacttgaaagtatttcgatttcttggctttatatatcttgtggaaaggacgaaataccttacttgttagaaacggg

SEQ ID NO: 303 - DNA, 1835 bp, Homo sapiens
  source 1..1835: mol_type = genomic DNA
accgccaccatgatgacacctcaagttatcactccccagcaaatgcagcagatcctccagcaacaagtgctgagccctcagcagctccaggttctcctccagcagcagcaggccctcatgcttcaacagcagcagcttcaagagttttataaaaaacaacaggaacagttgcagcttcaacttttacaacaacaacatgctggaaaacagcctaaagagcaacagcaggtggctacccagcagttggcttttcagcagcagcttttacagatgcagcagttacagcagcagcacctcctgtctttgcagcgccaaggccttctgacaattcagcccgggcagcctgcccttccccttcaacctcttgctcaaggcatgattccaacagaactgcagcagctctggaaagaagtgacaagtgctcatactgcagaagaaaccacaggcaacaatcacagcagtttggatctgaccacgacatgtgtctcctcctctgcaccttccaagacctccttaataatgaacccacatgcctctaccaatggacagctctcagtccacactcccaaaagggaaagtttgtcccatgaggagcacccccatagccatcctctctatggacatggtgtatgcaagtggccaggctgtgaagcagtgtgcgaagatttccaatcatttctaaaacatctcaacagtgagcatgcgctggacgatagaagtacagcccaatgtagagtacaaatgcaggttgtacagcagttagagctacagcttgcaaaagacaaagaacgcctgcaagccatgatgacccacctgcatgtgaagtctacagaacccaaagccgcccctcagcccttgaatctggtatcaagtgtcactctctccaagtccgcatcggaggcttctccacagagcttacctcatactccaacgaccccaaccgcccccctgactcccgtcacccaaggcccctctgtcatcacaaccaccagcatgcacacggtgggacccatccgcaggcggtactcagacaaatacaacgtgcccatttcgtcagcagatattgcgcagaaccaagaattttataagaacgcagaagttagaccaccatttacatatgcatctttaattaggcaggccattctcgaatctccagaaaagcagctaacactaaatgagatctataactggttcacacgaatgtttgcttacttccgacgcaacgcggccacgtggaagaatgcagtgcgtcataatcttagtcttcacaagtgttttgtgcgagtagaaaacgttaaaggggcagtatggacagtggatgaagtagaattccaaaaacgaaggccacaaaagatcagtggtaacccttcccttattaaaaacatgcagagcagccacgcctactgcacacctctcaatgcagctttacaggcttcaatggctgagaatagtatacctctatacactaccgcttccatgggaaatcccactctgggcaacttagccagcgcaatacgggaagagctgaacggggcaatggagcataccaacagcaacgagagtgacagcagtccaggcagatctcctatgcaagccgtgcatcctgtacacgtcaaagaagagcccctcgatccagaggaagctgaagggcccctgtccttagtgacaacagccaaccacagtccagattttgaccatgacagagattacgaagatgaaccagtaaacgaggacatggagtagtaatgaactagtccgtaacttgaaagtatttcgatttcttggctttatatatcttgtggaaaggacgattggtcctatcttatgacgttacg

SEQ ID NO: 304 - DNA, 2135 bp, Homo sapiens
  source 1..2135: mol_type = genomic DNA
accgccaccatgatgcaagaatctgggactgagacaaaaagtaacggttcagccatccagaatgggtcgggcggcagcaaccacttactagagtgcggcggtcttcgggaggggcggtccaacggagagacgccggccgtggacatcggggcagctgacctcgcccacgcccagcagcagcagcaacaggcacttcaggtggcaagacagctccttcttcagcagcaacagcagcagcaagttagtggattaaaatctcccaagaggaatgacaaacaaccagctcttcaggttcccgtgtcagtggctatgatgacacctcaagttatcactccccagcaaatgcagcagatcctccagcaacaagtgctgagccctcagcagctccaggttctcctccagcagcagcaggccctcatgcttcaacagcagcagcttcaagagttttataaaaaacaacaggaacagttgcagcttcaacttttacaacaacaacatgctggaaaacagcctaaagagcaacagcaggtggctacccagcagttggcttttcagcagcagcttttacagatgcagcagttacagcagcagcacctcctgtctttgcagcgccaaggccttctgacaattcagcccgggcagcctgcccttccccttcaacctcttgctcaaggcatgattccaacagaactgcagcagctctggaaagaagtgacaagtgctcatactgcagaagaaaccacaggcaacaatcacagcagtttggatctgaccacgacatgtgtctcctcctctgcaccttccaagacctccttaataatgaacccacatgcctctaccaatggacagctctcagtccacactcccaaaagggaaagtttgtcccatgaggagcacccccatagccatcctctctatggacatggtgtatgcaagtggccaggctgtgaagcagtgtgcgaagatttccaatcatttctaaaacatctcaacagtgagcatgcgctggacgatagaagtacagcccaatgtagagtacaaatgcaggttgtacagcagttagagctacagcttgcaaaagacaaagaacgcctgcaagccatgatgacccacctgcatgtgaagtctacagaacccaaagccgcccctcagcccttgaatctggtatcaagtgtcactctctccaagtccgcatcggaggcttctccacagagcttacctcatactccaacgaccccaaccgcccccctgactcccgtcacccaaggcccctctgtcatcacaaccaccagcatgcacacggtgggacccatccgcaggcggtactcagacaaatacaacgtgcccatttcgtcagcagatattgcgcagaaccaagaattttataagaacgcagaagttagaccaccatttacatatgcatctttaattaggcaggccattctcgaatctccagaaaagcagctaacactaaatgagatctataactggttcacacgaatgtttgcttacttccgacgcaacgcggccacgtggaagaatgcagtgcgtcataatcttagtcttcacaagtgttttgtgcgagtagaaaacgttaaaggggcagtatggacagtggatgaagtagaattccaaaaacgaaggccacaaaagatcagtggtaacccttcccttattaaaaacatgcagagcagccacgcctactgcacacctctcaatgcagctttacaggcttcaatggctgagaatagtatacctctatacactaccgcttccatgggaaatcccactctgggcaacttagccagcgcaatacgggaagagctgaacggggcaatggagcataccaacagcaacgagagtgacagcagtccaggcagatctcctatgcaagccgtgcatcctgtacacgtcaaagaagagcccctcgatccagaggaagctgaagggcccctgtccttagtgacaacagccaaccacagtccagattttgaccatgacagagattacgaagatgaaccagtaaacgaggacatggagtagtaatgaactagtccgtaacttgaaagtatttcgatttcttggctttatatatcttgtggaaaggacgaaggctccgattgtgaggcataata

SEQ ID NO: 305 - DNA, 2132 bp, Homo sapiens
  source 1..2132: mol_type = genomic DNA
accgccaccatgatgcaagaatctgggactgagacaaaaagtaacggttcagccatccagaatgggtcgggcggcagcaaccacttactagagtgcggcggtcttcgggaggggcggtccaacggagagacgccggccgtggacatcggggcagctgacctcgcccacgcccagcagcagcagcaacaggcacttcaggtggcaagacagctccttcttcagcagcaacagcagcagcaagttagtggattaaaatctcccaagaggaatgacaaacaaccagctcttcaggttcccgtgtcagtggctatgatgacacctcaagttatcactccccagcaaatgcagcagatcctccagcaacaagtgctgagccctcagcagctccaggttctcctccagcagcagcaggccctcatgcttcaacagcagcagcttcaagagttttataaaaaacaacaggaacagttgcagcttcaacttttacaacaacaacatgctggaaaacagcctaaagagcaacagcaggtggctacccagcagttggcttttcagcagcagcttttacagatgcagcagttacagcagcagcacctcctgtctttgcagcgccaaggccttctgacaattcagcccgggcagcctgcccttccccttcaacctcttgctcaaggcatgattccaacagaactgcagcagctctggaaagaagtgacaagtgctcatactgcagaagaaaccacaggcaacaatcacagcagtttggatctgaccacgacatgtgtctcctcctctgcaccttccaagacctccttaataatgaacccacatgcctctaccaatggacagctctcagtccacactcccaaaagggaaagtttgtcccatgaggagcacccccatagccatcctctctatggacatggtgtatgcaagtggccaggctgtgaagcagtgtgcgaagatttccaatcatttctaaaacatctcaacagtgagcatgcgctggacgatagaagtacagcccaatgtagagtacaaatgcaggttgtacagcagttagagctacagcttgcaaaagacaaagaacgcctgcaagccatgatgacccacctgcatgtgaagtctacagaacccaaagccgcccctcagcccttgaatctggtatcaagtgtcactctctccaagtccgcatcggaggcttctccacagagcttacctcatactccaacgaccccaaccgcccccctgactcccgtcacccaaggcccctctgtcatcacaaccaccagcatgcacacggtgggacccatccgcaggcggtactcagacaaatacaacgtgcccatttcgtcagatattgcgcagaaccaagaattttataagaacgcagaagttagaccaccatttacatatgcatctttaattaggcaggccattctcgaatctccagaaaagcagctaacactaaatgagatctataactggttcacacgaatgtttgcttacttccgacgcaacgcggccacgtggaagaatgcagtgcgtcataatcttagtcttcacaagtgttttgtgcgagtagaaaacgttaaaggggcagtatggacagtggatgaagtagaattccaaaaacgaaggccacaaaagatcagtggtaacccttcccttattaaaaacatgcagagcagccacgcctactgcacacctctcaatgcagctttacaggcttcaatggctgagaatagtatacctctatacactaccgcttccatgggaaatcccactctgggcaacttagccagcgcaatacgggaagagctgaacggggcaatggagcataccaacagcaacgagagtgacagcagtccaggcagatctcctatgcaagccgtgcatcctgtacacgtcaaagaagagcccctcgatccagaggaagctgaagggcccctgtccttagtgacaacagccaaccacagtccagattttgaccatgacagagattacgaagatgaaccagtaaacgaggacatggagtagtaatgaactagtccgtaacttgaaagtatttcgatttcttggctttatatatcttgtggaaaggacgaccttggcagcacagtcctaacttg

SEQ ID NO: 306 - DNA, 1907 bp, Homo sapiens
  source 1..1907: mol_type = genomic DNA
accgccaccatgatgcaagaatctgggactgagacaaaaagtaacggttcagccatccagaatgggtcgggcggcagcaaccacttactagagtgcggcggtcttcgggaggggcggtccaacggagagacgccggccgtggacatcggggcagctgacctcgcccacgcccagcagcagcagcaacaggcacttcaggtggcaagacagctccttcttcagcagcaacagcagcagcaagttagtggattaaaatctcccaagaggaatgacaaacaaccagctcttcagcaacagcaggtggctacccagcagttggcttttcagcagcagcttttacagatgcagcagttacagcagcagcacctcctgtctttgcagcgccaaggccttctgacaattcagcccgggcagcctgcccttccccttcaacctcttgctcaaggcatgattccaacagaactgcagcagctctggaaagaagtgacaagtgctcatactgcagaagaaaccacaggcaacaatcacagcagtttggatctgaccacgacatgtgtctcctcctctgcaccttccaagacctccttaataatgaacccacatgcctctaccaatggacagctctcagtccacactcccaaaagggaaagtttgtcccatgaggagcacccccatagccatcctctctatggacatggtgtatgcaagtggccaggctgtgaagcagtgtgcgaagatttccaatcatttctaaaacatctcaacagtgagcatgcgctggacgatagaagtacagcccaatgtagagtacaaatgcaggttgtacagcagttagagctacagcttgcaaaagacaaagaacgcctgcaagccatgatgacccacctgcatgtgaagtctacagaacccaaagccgcccctcagcccttgaatctggtatcaagtgtcactctctccaagtccgcatcggaggcttctccacagagcttacctcatactccaacgaccccaaccgcccccctgactcccgtcacccaaggcccctctgtcatcacaaccaccagcatgcacacggtgggacccatccgcaggcggtactcagacaaatacaacgtgcccatttcgtcagcagatattgcgcagaaccaagaattttataagaacgcagaagttagaccaccatttacatatgcatctttaattaggcaggccattctcgaatctccagaaaagcagctaacactaaatgagatctataactggttcacacgaatgtttgcttacttccgacgcaacgcggccacgtggaagaatgcagtgcgtcataatcttagtcttcacaagtgttttgtgcgagtagaaaacgttaaaggggcagtatggacagtggatgaagtagaattccaaaaacgaaggccacaaaagatcagtggtaacccttcccttattaaaaacatgcagagcagccacgcctactgcacacctctcaatgcagctttacaggcttcaatggctgagaatagtatacctctatacactaccgcttccatgggaaatcccactctgggcaacttagccagcgcaatacgggaagagctgaacggggcaatggagcataccaacagcaacgagagtgacagcagtccaggcagatctcctatgcaagccgtgcatcctgtacacgtcaaagaagagcccctcgatccagaggaagctgaagggcccctgtccttagtgacaacagccaaccacagtccagattttgaccatgacagagattacgaagatgaaccagtaaacgaggacatggagtagtaatgaactagtccgtaacttgaaagtatttcgatttcttggctttatatatcttgtggaaaggacgaagcttgttggctgcttaatgcagt

SEQ ID NO: 307 - DNA, 2141 bp, Homo sapiens
  source 1..2141: mol_type = genomic DNA
accgccaccatgttccagtgtgttttctcttcgagtgtgcttcagccgcacagtacttcctgtttattcaaacatcttttttaccactcggcaacccccgcttcgcagaaacagccagaacccatctacagcaagaagacggaaatccaaaggcagacagtacgggctcccttcgccaaactcttcattttctctgcacttcaggtggcaagacagctccttcttcagcagcaacagcagcagcaagttagtggattaaaatctcccaagaggaatgacaaacaaccagctcttcaggttcccgtgtcagtggctatgatgacacctcaagttatcactccccagcaaatgcagcagatcctccagcaacaagtgctgagccctcagcagctccaggttctcctccagcagcagcaggccctcatgcttcaacagcagcagcttcaagagttttataaaaaacaacaggaacagttgcagcttcaacttttacaacaacaacatgctggaaaacagcctaaagagcaacagcaggtggctacccagcagttggcttttcagcagcagcttttacagatgcagcagttacagcagcagcacctcctgtctttgcagcgccaaggccttctgacaattcagcccgggcagcctgcccttccccttcaacctcttgctcaaggcatgattccaacagaactgcagcagctctggaaagaagtgacaagtgctcatactgcagaagaaaccacaggcaacaatcacagcagtttggatctgaccacgacatgtgtctcctcctctgcaccttccaagacctccttaataatgaacccacatgcctctaccaatggacagctctcagtccacactcccaaaagggaaagtttgtcccatgaggagcacccccatagccatcctctctatggacatggtgtatgcaagtggccaggctgtgaagcagtgtgcgaagatttccaatcatttctaaaacatctcaacagtgagcatgcgctggacgatagaagtacagcccaatgtagagtacaaatgcaggttgtacagcagttagagctacagcttgcaaaagacaaagaacgcctgcaagccatgatgacccacctgcatgtgaagtctacagaacccaaagccgcccctcagcccttgaatctggtatcaagtgtcactctctccaagtccgcatcggaggcttctccacagagcttacctcatactccaacgaccccaaccgcccccctgactcccgtcacccaaggcccctctgtcatcacaaccaccagcatgcacacggtgggacccatccgcaggcggtactcagacaaatacaacgtgcccatttcgtcagcagatattgcgcagaaccaagaattttataagaacgcagaagttagaccaccatttacatatgcatctttaattaggcaggccattctcgaatctccagaaaagcagctaacactaaatgagatctataactggttcacacgaatgtttgcttacttccgacgcaacgcggccacgtggaagaatgcagtgcgtcataatcttagtcttcacaagtgttttgtgcgagtagaaaacgttaaaggggcagtatggacagtggatgaagtagaattccaaaaacgaaggccacaaaagatcagtggtaacccttcccttattaaaaacatgcagagcagccacgcctactgcacacctctcaatgcagctttacaggcttcaatggctgagaatagtatacctctatacactaccgcttccatgggaaatcccactctgggcaacttagccagcgcaatacgggaagagctgaacggggcaatggagcataccaacagcaacgagagtgacagcagtccaggcagatctcctatgcaagccgtgcatcctgtacacgtcaaagaagagcccctcgatccagaggaagctgaagggcccctgtccttagtgacaacagccaaccacagtccagattttgaccatgacagagattacgaagatgaaccagtaaacgaggacatggagtagtaatgaactagtccgtaacttgaaagtatttcgatttcttggctttatatatcttgtggaaaggacgaaatcaaattactgtcgagcatgct

SEQ ID NO: 308 - DNA, 2183 bp, Homo sapiens
  source 1..2183: mol_type = genomic DNA
accgccaccatgatgcaagaatctgggactgagacaaaaagtaacggttcagccatccagaatgggtcgggcggcagcaaccacttactagagtgcggcggtcttcgggaggggcggtccaacggagagacgccggccgtggacatcggggcagctgacctcgcccacgcccagcagcagcagcaacaggcacttcaggtggcaagacagctccttcttcagcagcaacagcagcagcaagttagtggattaaaatctcccaagaggaatgacaaacaaccagctcttcaggttcccgtgtcagtggctatgatgacacctcaagttatcactccccagcaaatgcagcagatcctccagcaacaagtgctgagccctcagcagctccaggttctcctccagcagcagcaggccctcatgcttcaacagcagcagcttcaagagttttataaaaaacaacaggaacagttgcagcttcaacttttacaacaacaacatgctggaaaacagcctaaagagcaacagcaggtggctacccagcagttggcttttcagcagcagcttttacagatgcagcagttacagcagcagcacctcctgtctttgcagcgccaaggccttctgacaattcagcccgggcagcctgcccttccccttcaacctcttgctcaaggcatgattccaacagaactgcagcagctctggaaagaagtgacaagtgctcatactgcagaagaaaccacaggcaacaatcacagcagtttggatctgaccacgacatgtgtctcctcctctgcaccttccaagacctccttaataatgaacccacatgcctctaccaatggacagctctcagtccacactcccaaaagggaaagtttgtcccatgaggagcacccccatagccatcctctctatggacatggtgtatgcaagtggccaggctgtgaagcagtgtgcgaagatttccaatcatttctaaaacatctcaacagtgagcatgcgctggacgatagaagtacagcccaatgtagagtacaaatgcaggttgtacagcagttagagctacagcttgcaaaagacaaagaacgcctgcaagccatgatgacccacctgcatgtgaagtctacagaacccaaagccgcccctcagcccttgaatctggtatcaagtgtcactctctccaagtccgcatcggaggcttctccacagagcttacctcatactccaacgaccccaaccgcccccctgactcccgtcacccaaggcccctctgtcatcacaaccaccagcatgcacacggtgggacccatccgcaggcggtactcagacaaatacaacgtgcccatttcgtcagcagatattgcgcagaaccaagaattttataagaacgcagaagttagaccaccatttacatatgcatctttaattaggcaggccattctcgaatctccagaaaagcagctaacactaaatgagatctataactggttcacacgaatgtttgcttacttccgacgcaacgcggccacgtggaagggtgccattcgcaccaacctctcactgcataagtgctttatcagagtagaggatgagtttgggtccttttggacagttgatgatgaagagtttaaacgtggccgccatattcaacgaggccgtcctcgcaaatactgccccgatgaaaactttgacgagcttgtcgcacataacccttcccttattaaaaacatgcagagcagccacgcctactgcacacctctcaatgcagctttacaggcttcaatggctgagaatagtatacctctatacactaccgcttccatgggaaatcccactctgggcaacttagccagcgcaatacgggaagagctgaacggggcaatggagcataccaacagcaacgagagtgacagcagtccaggcagatctcctatgcaagccgtgcatcctgtacacgtcaaagaagagcccctcgatccagaggaagctgaagggcccctgtccttagtgacaacagccaaccacagtccagattttgaccatgacagagattacgaagatgaaccagtaaacgaggacatggagtagtaatgaactagtccgtaacttgaaagtatttcgatttcttggctttatatatcttgtggaaaggacgagatcctggcggaaattccctcttt

SEQ ID NO: 309 - DNA, 3410 bp, Homo sapiens
  source 1..3410: mol_type = genomic DNA
accgccaccatgttccaacttcctgtcaacaatcttggcagtttaagaaaagcccggaaaactgtgaaaaaaatacttagtgacattgggttggaatactgtaaagaacatatagaagattttaaacaatttgaacctaatgacttttatttgaaaaacactacatgggaggatgtaggactgtgggacccatcacttacgaaaaaccaggactatcggacaaaacctttctgctgcagcgcttgtccattttcctcaaaattcttctctgcctacaaaagtcatttccgcaatgtccatagtgaagactttgaaaataggattctccttaattgcccctactgtaccttcaatgcagacaaaaagactttggaaacacacattaaaatatttcatgctccgaacgccagcgcaccaagtagcagcctcagcactttcaaagataaaaacaaaaatgatggccttaaacctaagcaggctgacagtgtagagcaagctgtttattactgtaagaagtgcacttaccgagatcctctttatgaaatagttaggaagcacatttacagggaacattttcagcatgtggcagcaccttacatagcaaaggcaggagaaaaatcactcaatggggcagtccccttaggctcgaatgcccgagaagagagtagtattcactgcaagcgatgccttttcatgccaaagtcctatgaagctttggtacagcatgtcatcgaagaccatgaacgtataggctatcaggtcactgccatgattgggcacacaaatgtagtggttccccgatccaaacccttgatgctaattgctcccaaacctcaagacaagaagagcatgggactcccaccaaggatcggttcccttgcttctggaaatgtccggtctttaccatcacagcagatggtgaatcgactctcaataccaaagcctaacttaaattctacaggagtcaacatgatgtccagtgttcatctgcagcagaacaactatggagtcaaatctgtaggccagggttacagtgttggtcagtcaatgagactgggtctaggtggcaacgcaccagtttccattcctcaacaatctcagtctgtaaagcagttacttccaagtggaaacggaaggtcttatgggcttgggtcagagcagaggtcccaggcaccagcaagatactccctgcagtctgctaatgcctcttctctctcatcgggccagttaaagtctccttccctctctcagtcacaggcatccagagtgttaggtcagtccagttccaaacctgctgcagctgccacaggccctcccccaggtaacacttcctcaactcaaaagtggaaaatatgtacaatctgtaatgagctttttcctgaaaatgtctatagtgtgcacttcgaaaaagaacataaagctgagaaagtcccagcagtagccaactacattatgaaaatacacaattttactagcaaatgcctctactgtaatcgctatttacccacagatactctgctcaaccatatgttaattcatggtctgtcttgtccatattgccgttcaactttcaatgatgtggaaaagatggccgcacacatgcggatggttcacattgatgaagagatgggacctaaaacagattctactttgagttttgatttgacattgcagcagggtagtcacactaacatccatctcctggtaactacatacaatctgagggatgccccagctgaatctgttgcttaccatgcccaaaataatcctccagttcctccaaagccacagccaaaggttcaggaaaaggcagatatccctgtaaaaagttcacctcaagctgcagtgccctataaaaaagatgttgggaaaaccctttgtcctctttgcttttcaatcctaaaaggacccatatctgatgcacttgcacatcacttacgagagaggcaccaagttattcagacggttcatccagttgagaaaaagctcacctacaaatgtatccattgccttggtgtgtataccagcaacatgaccgcctcaactatcactctgcatctagttcactgcaggggcgttggaaagacccaaaatggccaggataagacaaatgcaccctctcggcttaatcagtctccaagtctggcacctgtgaagcgcacttacgagcaaatggaatttcccttactgaaaaaacgaaagttagatgatgatagtgattcacccagcttctttgaagagaagcctgaagagcctgttgttttagctttagaccccaagggtcatgaagatgattcctatgaagccaggaaaagctttctaacaaagtatttcaacaaacagccctatcccaccaggagagaaattgagaagctagcagccagtttatggttatggaagagtgacatcgcttcccattttagtaacaaaaggaagaagtgtgtccgtgattgtgaaaagtacaagcctggcgtgttgctggggtttaacatgaaagaattaaataaagtcaagcatgagatggattttgatgctgagtggctatttgaaaatcatgatgagaaggattccagagtcaatgctagtaagactgctgacaaaaagctcaaccttgggaaggaagatgacagttcctcagacagttttgaaaatttggaagaagaatccaatgaaagtggtagcccttttgaccctgtttttgaagttgaacctaaaatctctaacgataacccagaggaacatgtactgaaggtaattcctgaggatgcttcagaatctgaggagaagctagaccaaaaagaggatggttcaaaatacgaaactattcatttgactgaggaaccaaccaaactaatgcacaatgcatctgatagtgaggttgaccaagacgatgttgttgagtggaaagacggtgcttctccatctgagagtgggcctggatcccaacaagtgtcagactttgaggacaatacctgcgaaatgaaaccaggaacctggtctgacgagtcttcccaaagcgaagatgcaaggagcagtaagccagctgccaaaaaaaaggctaccatgcaaggtgacagagagcagttgaaatggaagaatagttcctatggaaaagttgaagggttttggtctaaggaccagtcacagtggaagaatgcatctgagaatgatgagcgcttatctaacccccagattgagtggcagaatagcacaattgacagtgaggatggggaacagtttgacaacatgactgatggagtagctgagcccatgcatggcagcttagccggagttaaactgagcagccaacaggcctagtaatgaactagtccgtaacttgaaagtatttcgatttcttggctttatatatcttgtggaaaggacgaccggcgcttaacggctaatactgg

SEQ ID NO: 310 - DNA, 2105 bp, Homo sapiens
  source 1..2105: mol_type = genomic DNA
accgccaccatgatggtggaatctgcctcggagacaatcaggtcggctccatctggtcagaatggcgtgggcagcctctctgggcaagccgatggcagcagcggcggggccacagggacaactgcaagtggcacgggcagggaagtgaccacgggtgcagacagcaatggtgagatgagtcccgcagagctgctgcacttccagcagcaacaggctctccaagtggcccggcagttcctgctgcagcaggcctcaggcctgagctccccagggaacaatgacagcaaacagtctgcctctgctgtgcaggtgcctgtgtcggtggccatgatgtcgccgcagatgcttaccccgcaacagatgcagcagatcctgtcgcccccgcagctgcaggccttgctccagcagcagcaagccctcatgctccagcagctacaggagtactacaagaagcagcaggagcagctccacctgcagctcctcacccagcagcaggctgggaaaccgcagcccaaagaggcactggggaacaagcagctggccttccagcagcagctcctgcaaatgcaacagttgcagcagcagcacctgctcaacctgcagaggcaggggctggtcagcctgcagcccaaccaagcctcggggcccctccagacccttccgcaagctgtttgcccaacagacctgccccagctgtggaagggcgagggtgcccccgggcagcctgccgaggacagcgtcaagcaggaggggctggacctcactggcacggccgccaccgctacctcgtttgccgctccccccaaggtctcaccccccctctcccaccataccctgcccaacggacagcctactgtgctcacatctcggagagacagctcttcccacgaggagacccccggctcccaccccctgtacggacacggagagtgcaagtggccaggctgtgagaccctgtgtgaagacctgggccagtttatcaaacacctcaacacagagcacgccctggatgaccggagtacagcccagtgccgggtacagatgcaggtggtgcagcagctggagatccagctcgccaaggagagcgagcggctgcaggccatgatggcccacctgcacatgcggccctcggagcccaagcccttcagccagccagtgaccgtctctgcagcagactcattcccagatggtctcgtgcaccccccgacctcggccgcagcccctgtcacccctctacggccccctggcctgggctctgcctccctgcatggtgggggcccagcccgtcggagaagcagtgacaagttctgctcccccatctcctcagagctggcccagaatcatgagttctacaagaacgccgacgtccggccccccttcacctacgcctccctcatccgccaggccatcctggaaacccctgacaggcagctgaccctgaatgagatctataactggttcaccaggatgttcgcctatttccgcagaaacactgccacctggaagaacgccgtgcgccacaacctcagcctgcacaagtgcttcgtccgcgtggagaacgtcaagggtgccgtgtggactgtggacgagcgggagtatcagaagcggagaccgccaaagatgacagggagccccaccctggtgaagaacatgatctctggcctcagctatggagcacttaatgccagctaccaggccgccctggccgagagcagcttccccctcctcaacagccctggcatgctgaaccctggctccgccagcagcctgctgcccctcagccacgatgacgtgggtgcccccgtggagccgctgcccagcaacggcagcagcagccctcctcgcctctccccgccccagtacagccaccaggtgcaggtgaaggaggagccagcagaggcagaggaagacaggcagcccgggcctcccctgggcgcccctaaccccagcgcctcggggcctccggaagacagggacctggaggaggagctgccgggagaagaactgtcctagtaatgaactagtccgtaacttgaaagtatttcgatttcttggctttatatatcttgtggaaaggacgaaccctccgtcaccaagggattgaa

SEQ ID NO: 311 - DNA, 2138 bp, Homo sapiens
  source 1..2138: mol_type = genomic DNA
accgccaccatgatggtggaatctgcctcggagacaatcaggtcggctccatctggtcagaatggcgtgggcagcctctctgggcaagccgatggcagcagcggcggggccacagggacaactgcaagtggcacgggcagggaagtgaccacgggtgcagacagcaatggtgagatgagtcccgcagagctgctgcacttccagcagcaacaggctctccaagtggcccggcagttcctgctgcagcaggcctcaggcctgagctccccagggaacaatgacagcaaacagtctgcctctgctgtgcaggtgcctgtgtcggtggccatgatgtcgccgcagatgcttaccccgcaacagatgcagcagatcctgtcgcccccgcagctgcaggccttgctccagcagcagcaagccctcatgctccagcaggagtactacaagaagcagcaggagcagctccacctgcagctcctcacccagcagcaggctgggaaaccgcagcccaaagaggcactggggaacaagcagctggccttccagcagcagctcctgcaaatgcaacagttgcagcagcagcacctgctcaacctgcagaggcaggggctggtcagcctgcagcccaaccaagcctcggggcccctccagacccttccgcaagcagctgtttgcccaacagacctgccccagctgtggaagggcgagggtgcccccgggcagcctgccgaggacagcgtcaagcaggaggggctggacctcactggcacggccgccaccgctacctcgtttgccgctccccccaaggtctcaccccccctctcccaccataccctgcccaacggacagcctactgtgctcacatctcggagagacagctcttcccacgaggagacccccggctcccaccccctgtacggacacggagagtgcaagtggccaggctgtgagaccctgtgtgaagacctgggccagtttatcaaacacctcaacacagagcacgccctggatgaccggagtacagcccagtgccgggtacagatgcaggtggtgcagcagctggagatccagctcgccaaggagagcgagcggctgcaggccatgatggcccacctgcacatgcggccctcggagcccaagcccttcagccagccactgaacccggtccccggctcctcctcattctccaaggtgaccgtctctgcagcagactcattcccagatggtctcgtgcaccccccgacctcggccgcagcccctgtcacccctctacggccccctggcctgggctctgcctccctgcatggtgggggcccagcccgtcggagaagcagtgacaagttctgctcccccatctcctcagagctggcccagaatcatgagttctacaagaacgccgacgtccggccccccttcacctacgcctccctcatccgccaggccatcctggaaacccctgacaggcagctgaccctgaatgagatctataactggttcaccaggatgttcgcctatttccgcagaaacactgccacctggaagaacgccgtgcgccacaacctcagcctgcacaagtgcttcgtccgcgtggagaacgtcaagggtgccgtgtggactgtggacgagcgggagtatcagaagcggagaccgccaaagatgacagggagccccaccctggtgaagaacatgatctctggcctcagctatggagcacttaatgccagctaccaggccgccctggccgagagcagcttccccctcctcaacagccctggcatgctgaaccctggctccgccagcagcctgctgcccctcagccacgatgacgtgggtgcccccgtggagccgctgcccagcaacggcagcagcagccctcctcgcctctccccgccccagtacagccaccaggtgcaggtgaaggaggagccagcagaggcagaggaagacaggcagcccgggcctcccctgggcgcccctaaccccagcgcctcggggcctccggaagacagggacctggaggaggagctgccgggagaagaactgtcctagtaatgaactagtccgtaacttgaaagtatttcgatttcttggctttatatatcttgtggaaaggacgatcatgcctggcatttcagtgacta

SEQ ID NO: 312 - DNA, 2144 bp, Homo sapiens
  source 1..2144: mol_type = genomic DNA
accgccaccatgatggtggaatctgcctcggagacaatcaggtcggctccatctggtcagaatggcgtgggcagcctctctgggcaagccgatggcagcagcggcggggccacagggacaactgcaagtggcacgggcagggaagtgaccacgggtgcagacagcaatggtgagatgagtcccgcagagctgctgcacttccagcagcaacaggctctccaagtggcccggcagttcctgctgcagcaggcctcaggcctgagctccccagggaacaatgacagcaaacagtctgcctctgctgtgcaggtgcctgtgtcggtggccatgatgtcgccgcagatgcttaccccgcaacagatgcagcagatcctgtcgcccccgcagctgcaggccttgctccagcagcagcaagccctcatgctccagcagctacaggagtactacaagaagcagcaggagcagctccacctgcagctcctcacccagcagcaggctgggaaaccgcagcccaaagaggcactggggaacaagcagctggccttccagcagcagctcctgcaaatgcaacagttgcagcagcagcacctgctcaacctgcagaggcaggggctggtcagcctgcagcccaaccaagcctcggggcccctccagacccttccgcaagcagctgtttgcccaacagacctgccccagctgtggaagggcgagggtgcccccgggcagcctgccgaggacagcgtcaagcaggaggggctggacctcactggcacggccgccaccgctacctcgtttgccgctccccccaaggtctcaccccccctctcccaccataccctgcccaacggacagcctactgtgctcacatctcggagagacagctcttcccacgaggagacccccggctcccaccccctgtacggacacggagagtgcaagtggccaggctgtgagaccctgtgtgaagacctgggccagtttatcaaacacctcaacacagagcacgccctggatgaccggagtacagcccagtgccgggtacagatgcaggtggtgcagcagctggagatccagctcgccaaggagagcgagcggctgcaggccatgatggcccacctgcacatgcggccctcggagcccaagcccttcagccagccactgaacccggtccccggctcctcctcattctccaaggtgaccgtctctgcagcagactcattcccagatggtctcgtgcaccccccgacctcggccgcagcccctgtcacccctctacggccccctggcctgggctctgcctccctgcatggtgggggcccagcccgtcggagaagcagtgacaagttctgctcccccatctcctcagagctggcccagaatcatgagttctacaagaacgccgacgtccggccccccttcacctacgcctccctcatccgccaggccatcctggaaacccctgacaggcagctgaccctgaatgagatctataactggttcaccaggatgttcgcctatttccgcagaaacactgccacctggaagaacgccgtgcgccacaacctcagcctgcacaagtgcttcgtccgcgtggagaacgtcaagggtgccgtgtggactgtggacgagcgggagtatcagaagcggagaccgccaaagatgacagggagccccaccctggtgaagaacatgatctctggcctcagctatggagcacttaatgccagctaccaggccgccctggccgagagcagcttccccctcctcaacagccctggcatgctgaaccctggctccgccagcagcctgctgcccctcagccacgatgacgtgggtgcccccgtggagccgctgcccagcaacggcagcagcagccctcctcgcctctccccgccccagtacagccaccaggtgcaggtgaaggaggagccagcagaggcagaggaagacaggcagcccgggcctcccctgggcgcccctaaccccagcgcctcggggcctccggaagacagggacctggaggaggagctgccgggagaagaactgtcctagtaatgaactagtccgtaacttgaaagtatttcgatttcttggctttatatatcttgtggaaaggacgaggacaggtgtggtgctgccgctca

SEQ ID NO: 313 - DNA, 1676 bp, Homo sapiens
  source 1..1676: mol_type = genomic DNA
accgccaccatggctaaaagaccaggaccccctggaagccgagaaatgggactgttgacattcagagacatagctatagaattctctctggaggaatggcaatgcctggattgtgctcagcggaatttatatagagatgtgatgttagagaactacagaaacctggtctccctgggtattgctgtctctaagccagacttgatcacctgtctggagcaaaataaagagtcccagaatataaagagaaatgagatggtagccaaacacccagttacgcgttcccatttcacccaagaccttcagccagagcagggcatcaaagattcactccaaaaagtaataccaagaacatatggaaaatgtggacatgagaaattacaatttaaaaaatgctgtaaaagtgtgggtgaatatgaggtgcacaagggaggttatagtgaagttaaccaatgtttgtcaactacccaaaacaaaatatttcagactcataaatatgtcaaagtctttggtaaattttcaaattccaatagagataaaacaagatatactggaaataaacatttcaaatgtaacaaatatggcaaatcattttgcatgctttcacacctaaatcaacatcaggtaattcatactagggagaagtcctacaaatgcaaagaatgtggcaaatcctttaactgctcctcaaaccatactacacataaaataattcatactggagagaaaccatatagatgtgaggaatgtggcaaagcctttagctggtctgcaaaccttactagacataagagaactcatactggagagaaaccctacacgtgtgaagaatgtggccaagcctttaggcgctcctcagcacttactaaccacaagagaattcatactggagagagaccctacaaatgtgaagaatgtggcaaagcctttagcgtatcctcaaccctcactgaccacaagagaattcatactggagagaaaccctgcaggtgtgaggaatgtggcaaagcctttagctggtcctcaaaccttactagacataagagaattcatactagagagaaaccctatgcctgtgaagaatgtggccaagcctttagcttatcctcgaaccttatgagacataggagaattcatactggagagaaaccctacacatgtgaagaatgtggccaagactttaggcgctcctcagcacttactatccacaagagaattcatactggagagagaccctacaaatgtgaagagtgtggcaaagtctttagcttatcctcaaccctcactgaccacaagagaattcatactggagagagaccctacaaatgtgaagaatgtggcaaagcctttagcttatcctcaaccctcactgaccacaagagaattcatactggagagagaccctacacatgtgaagaatgtggcaaagcctttaattgctcctcaacccttatgcaacataagagaattcatactggagagaaaccctacaaatgtgaagaatgtgagcaagcttttaagtggcattcaagtcttgctaaacataagataattcacactggagagaaaccctacaaatgtgaatagtaatgaactagtccgtaacttgaaagtatttcgatttcttggctttatatatcttgtggaaaggacgatactcacgccaggtcagggagctc

SEQ ID NO: 314 - DNA, 3905 bp, Homo sapiens
  source 1..3905: mol_type = genomic DNA
accgccaccatgggggatatgaaaaccccagattttgatgaccttctggctgcctttgacatcccagaccccaccagccttgatgccaaggaggccatccagacacccagtgaggagaatgagagtcccctcaaacctccaggcatatgtatggatgaaagtgtgtccttgtctcactcaggatcagcccccgatgtgccggccgtgagtgtcattgtcaagaacaccagccgccaggagtcatttgaagcggagaaagaccacattactcccagtctcctacacaatggattccggggctcagatctgcctccagatccccacaactgtgggaaatttgattctacttttatgaatggagacagtgccaggagtttccctggcaaactggagcctcccaagtcagagccattacccaccttcaaccagttcagtccaatctccagcccagaacctgaggatcccatcaaagataacggatttgggataaagcccaaacactctgacagttatttcccaccccctcttgggtgcggggctgtgggaggcccagtcctggaggctctggctaagtttccggttccagagctgcatatgtttgatcatttttgtaagaaagaacccaagccagaacccctgcccttggggagccagcaggaacacgagcaaagtgggcagaacacagtggaacctcacaaggatccggatgccactcgattcttcggggaagctttggagttcaacagccatcctagcaacagtattggagagtccaaggggcttgcccgggagcttggtacctgctcatcagtcccccctaggcagcgtctaaagccagctcattccaagctgtcctcttgtgtggcagccttggtggccttgcaggccaaaagagtggctagtgtcactaaggaggatcagcctggccacacaaaggatctctcagggcccactaaagagagttctaaaggtagccccaaaatgcccaagtcaccaaagagtccccggagccctctggaggccactagaaaaagtatcaagccatcggacagccctcgtagcatctgcagtgacagcagcagcaaaggctcaccgtctgtggctgccagctccccaccagcaattcccaaagtgagaatcaaaaccattaagacatcatcaggggaaatcaaacggactgtcacaaggatcctgccagatcctgatgatccaagtaagtcccctgttgggtcacctctagggagcgccattgcagaggcccccagcgagatgccaggggatgaggtgcctgtggaagagcactttcctgaggcaggcacaaattcagggagcccccagggggccaggaaaggggacgagagcatgacaaaggccagtgactcgtcatctcccagctgcagttctgggccccgggtcccaaagggggctgccccaggctcacagacaggcaagaagcaacagagcacagcactgcaggcatccaccctggcccctgccaacctcctgcccaaagccgtgcacttggccaacctgaacctcgtcccccacagtgttgctgcatcagtgacagccaagtcttcagtgcaaagacggagccagccacagcttacacaaatgtcggtgcccctggtccaccaggtgaaaaaggctgccccactgattgtagaggtcttcaacaaggtccttcacagctccaaccccgtgcccctctatgcgccaaatctcagcccgcctgcggacagcaggatccacgtgccggccagtgggtactgctgcctggagtgtggagacgcatttgccttagagaagagcctgagccagcactatggccggcggagcgtccacattgaggtactgtgcacactgtgctccaagacgctgctcttcttcaacaagtgcagcctgctccggcacgcccgtgaccacaagagcaaggggctcgtcatgcagtgttcccagctgctggtgaagcctatctctgcggaccaaatgttcgtgtcggcccctgtgaactccacggcaccagcagccccagccccttcatcctctcccaaacatggcctcacttcgggcagtgccagtccccctcctccagccttgccactctacccagaccctgtgaggctcatccggtactcaatcaagtgtcttgaatgtcacaagcagatgcgggactacatggtcctggctgcacatttccagaggacaacagaggagacagaggggctgacctgccaggtatgccaaatgctgctgcccaaccagtgcagtttctgtgcccaccagcggattcatgcacacaagtccccctactgctgcccggagtgtggggtcctctgccgctctgcctacttccagacccatgtaaaggagaattgcctgcactatgcccgcaaggtgggctacaggtgcatccactgtggtgtcgtccacctgaccttggccttgctgaaaagccacatccaggagcgacactgccaggttttccacaaatgtgcattctgccccatggccttcaagactgccagcagcactgcagaccacagtgccacccagcaccccacccagccccacagaccctcccagctcatttataagtgctcctgtgaaatggtcttcaacaagaagaggcacattcagcagcatttttaccagaatgtcagcaagacgcaggtgggcgtcttcaagtgccctgagtgcccactcttgttcgtgcagaagccggagttgatgcaacacgtcaagagcacccacggtgttccccgaaatgtggacgagctgtcaagcctccagtcttcagcggacacatcctcaagccgccctggctctcgagttcccactgagccaccagccactagtgtggctgctcggagcagctccctgccttctggccgctggggtaggcctgaagcccaccgcagggtggaagccaggccgcggctgaggaacactggctggacctgccaggagtgccaggagtgggttccagatcgggagagctacgtgtcccacatgaaaaagagccacggtcggacattgaagcggtacccatgccggcagtgtgaacagtccttccacacccccaacagcctgcgcaaacacatccgcaacaaccatgacacagtaaagaagttctacacctgcgggtactgcacagaggacagccccagctttcctcggccctcccttctggagagccacatcagccttatgcatggcatcagaaaccctgatttgagccagacgtccaaagtgaaacctccgggtggacattcccctcaggtgaaccatctgaaaagaccagtcagtggagtgggggacgctccaggcaccagcaatggcgcaactgtctcttccaccaaaaggcacaagtccctttttcagtgcgcgaaatgtagttttgccacagactcggggctcgagtttcagagccacatacctcagcaccaggtggacagctccacagcccaatgtctcctctgtggtttgtgctacacctctgccagctccctcagccgccacctcttcattgtccacaaggtgagagaccaggaggaggaggaggaagaggaggcggcggcagcggagatggcagtggaggtggcagagccagaggagggctccggggaggaggtgcccatggagactagagagaatggactggaagaatgtgccggtgagcctttgtcagctgacccagaggcgaggagattgctgggcccggcccctgaggacgatggtggccacaatgatcacagtcaaccacaggcctctcaggaccaggacagccacacactgtcccctcaggtgtagtaatgaactagtccgtaacttgaaagtatttcgatttcttggctttatatatcttgtggaaaggacgacccgggtccagtgagagcttgcag

SEQ ID NO: 315 - DNA, 572 bp, Homo sapiens
  source 1..572: mol_type = genomic DNA
accgccaccatgggtcgctcccgccggacaggcgcgcaccgagcgcactctctagcccggcagatgaaggcgaagcggcggcggccggacttggatgagattcaccgcgagctgcggcctcagggatccgcacgaccccagcccgacccaaacgccgagttcgaccccgacctgccagggggcggtctgcaccgctgtctggcctgcgcgaggtacttcatcgattccaccaacctgaagacccacttccgatccaaagaccacaagaaaaggtatgaaggagtaaggagaggattgatggatgggtgctcagcagatagggctctcacctggtcagctcccaactcctgtttttctttctcccaggctgaagcagctgagcgtcgagccctacagtcaggaagaggcggagagggcagcgggtatgggatcctatgtgccccccaggcggctggcagtgcccacggaagtgtccactagtaatgaactagtccgtaacttgaaagtatttcgatttcttggctttatatatcttgtggaaaggacgagctagctcggttcaggcctcgaag

SEQ ID NO: 316 - DNA, 506 bp, Homo sapiens
  source 1..506: mol_type = genomic DNA
accgccaccatgggtcgctcccgccggacaggcgcgcaccgagcgcactctctagcccggcagatgaaggcgaagcggcggcggccggacttggatgagattcaccgcgagctgcggcctcagggatccgcacgaccccagcccgacccaaacgccgagttcgaccccgacctgccagggggcggtctgcaccgctgtctggcctgcgcgaggtacttcatcgattccaccaacctgaagacccacttccgatccaaagaccacaagaaaaggctgaagcagctgagcgtcgagccctacagtcaggaagaggcggagagggcagcgggtatgggatcctatgtgccccccaggcggctggcagtgcccacggaagtgtccactgaggtccctgagatggatacctctacctagtaatgaactagtccgtaacttgaaagtatttcgatttcttggctttatatatcttgtggaaaggacgaccgaggccatttcaattaaaggac

SEQ ID NO: 317 - DNA, 1616 bp, Homo sapiens
  source 1..1616: mol_type = genomic DNA
accgccaccatgccatcaccggattccatgaccttcgaggatatcattgtagacttcactcaagaagagtgggccctgctggacacatcccagagaaagctgtttcaagatgtgatgttggagaacatcagtcatctggtctctattggcaaacagctctgcaaatcagttgtgctttcccaattggagcaagtagagaaactttcaacacaaagaataagcttactgcaaggtagagaagttggcattaaacatcaagagataccattcattcaacatatctatcagaagggcacgtccaccatcagcacaatgagatctcatactcaagaggatccttttctatgcaatgacttaggagaagatttcactcaacatatagcattgactcaaaatgtgattacctacatgagaacgaaacactttgtaagcaaaaagtttgggaaaatcttcagtgactggttatcctttaatcaacacaaggaaattcacaccaaatgtaaatcatatggaagtcatctatttgattatgcctttatccaaaactctgcccttagaccacacagtgtgactcacactagagagataacattggaatgtcgtgtgtgtgggaaaacctttagcaaaaattctaatcttaggcgacatgagatgattcacactggagagaaaccacacggatgtcatctatgtgggaaagcctttactcattgctctgatcttcgaaaacatgagagaactcacactggagagaagccatatggatgtcatctatgtgggaaagccttcagtaaaagttctaaccttagacgacatgagatgattcacactagagaaaaagcacagatatgccatctatgtgggaaagccttcactcattgctctgaccttagaaaacatgagagaactcacttaggagataaaccatatggatgtctcctatgtgggaaggctttcagtaaatgttcttaccttagacaacatgaaagaactcacaatggagagaaaccatatgaatgtcatctatgtggaaaagccttctctcattgttctcaccttagacaacatgagcgaagtcacaatggagagaaaccacatggatgtcatctatgtgggaaagcattcactgaatcttctgtgcttaaacgacatgagagaattcacactggagagaaaccatatgagtgccatgtatgtgggaaagccttcactgaatcttctgacctcagacgacatgagagaactcacactggagaaaaaccatatgaatgccatctatgcggaaaagccttcaatcactcttctgtccttagacgacatgagagaactcacactggagagaaaccatatgaatgcaatatatgtggtaaagccttcaatagaagttacaactttagacttcatagaagagttcacactggagagaaaccatatgtatgtcctctatgtgggaaagcctttagtaaattttttaaccttagacaacatgagagaactcacactaaaaaagcaatgaatatgtagtaatgaactagtccgtaacttgaaagtatttcgatttcttggctttatatatcttgtggaaaggacgaccgggatcttataagagctgagct

SEQ ID NO: 318 - DNA, 2525 bp, Homo sapiens
  source 1..2525: mol_type = genomic DNA
accgccaccatgaaggaatggaaatcaaagatggaaatttctgaagaaaagaagtcagcaagggctgcatccgaaaaactccaaagacaaatcacccaggaatgtgagttagttgaaaccagtaattctgaggacagattattgaagcactgggtaagccctttaaaggatgcaatgagacatctcccttcccaagagagcggtatcagggaaatgcatattatcccccagaaagccattgtgggagagattggccatggatgtaatgaaggagaaaaaatactttctgcaggagaaagctcccatagatatgaggttagtggccaaaacttcaaacagaagtcaggattaactgaacatcagaaaattcataatataaataagacctatgaatgtaaggaatgtgaaaaaaccttcaacaggagttcaaacctgatcatacatcagagaattcatacaggaaataagccatatgtgtgtaatgaatgtgggaaagactctaatcaaagttcaaatcttattatacatcagagaattcatacaggaaagaaaccttatatatgtcatgaatgtggaaaagacttcaatcagagctccaatctggtgagacataagcaaattcacagtggtgggaatccctatgagtgcaaagagtgtgggaaggcttttaagggaagctcaaaccttgtcctgcaccagagaatccacagtagggggaagccatatttatgcaataaatgtgggaaggctttcagtcaaagcacagatcttattatacatcacagaattcacactggagagaaaccctatgaatgttatgactgtggacagatgttcagtcaaagttcacaccttgtcccacatcagagaattcacactggagagaaacccctcaaatgtaatgaatgtgaaaaagccttcaggcagcattctcaccttactgaacaccagagactccacagtggagagaaaccctatgaatgtcacagatgtgggaagaccttcagtgggcgcacagcttttcttaaacatcagagattgcatgctggagagaaaattgaagaatgtgagaaaaccttcagcaaggatgaggagcttagggaagagcagagaattcaccaggaagagaaagcttattggtgtaatcagtgtggtaggaatttccagggcacctcagacctcatcagacatcaggtaactcatacaggagagaaaccatatgaatgtaaagaatgtgggaaaactttcaatcagagctcagaccttctgagacatcatagaattcacagtggagaaaaaccttgtgtatgtagcaaatgtgggaaatcttttaggggcagctcagatcttattagacaccatcgtgttcatactggagagaaaccctatgaatgtagtgaatgtgggaaagcctttagccagaggtcacaccttgttacacaccagaaaatccatactggagagaagccctatcagtgcactgaatgtgggaaagccttcaggcggcgttcactccttattcaacatcggagaattcatagtggtgagaaaccctatgaatgtaaggaatgtgggaagctcttcatttggcgcacagctttcctcaaacatcagagcctgcatactggagagaaacttgaatgtgagaaaaccttcagccaggatgaggagcttaggggagagcagaaaattcaccaggaagcgaaagcttattggtgtaatcagtgtggtagggctttccagggcagctcagacctcatcagacatcaggtaactcatacaagagagaaaccatatgaatgcaaagaatgtgggaaaactttcaatcagagctcagaccttctgagacatcatagaattcacagtggagaaaaaccttatgtatgcaacaaatgtgggaaatcttttaggggtagctcagatcttattaaacaccatcgtattcatactggagagaaaccctatgaatgtagtgaatgtgggaaagccttcagccagaggtcacaccttgctacacaccagaaaatccatactggagagaaaccctatcagtgcagtgaatgtgggaatgccttcaggcggcgttccctccttattcaacatcggagacttcatagtggtgagaaaccctatgaatgtaaggaatgtgggaaactcttcatgtggcacacggctttcctcaaacatcagagactgcatgctggagagaaacttgaagaatgtgagaaaaccttcagcaaggatgaggagcttagaaaagagcagagaactcaccaggaaaagaaagtttattggtgtaatcagtgtagtaggaccttccagggcagctcagatctcatcagacatcaggtaactcatacaagagagaaaccatatgaatgtaaagaatgtgggaaaactcaatcagagctcagaccttctgagacatcatagtaatgaactagtccgtaacttgaaagtatttcgatttcttggctttatatatcttgtggaaaggacgacttgagctgtaatttagtagcaat

SEQ ID NO: 319 - DNA, 1952 bp, Homo sapiens
  source 1..1952: mol_type = genomic DNA
accgccaccatggaactcgtaacattcagggatgtggccatagaattctcccctgaagagtggaaatgtctggaccctgcccagcagaatttgtatagagatgtgatgttggagaactacaggaacctggtctccctggctatatgttctcctttcagccaagacctttcaccagtgcaggggatagaagattcattccacaaacttatactgaaaagatacgagaaatgtggacatgagaatttacaattaagaaaaggctgtaaacgtgtgaatgagtgtaaggtgcagaaaggagttaataatggagtttaccagtgcttgtcaactacccagagcaaaatatttcaatgtaatacatgtgttaaagtttttagtaaattttcaaattcaaacaaacataagataagacatactggagagaaaccctttaaatgtacagaatgtggcagatcgttttacatgtcacacctaactcaacatacaggaattcatgctggagagaaaccctacaaatgtgaaaaatgtggcaaagcctttaataggtccacatcacttagtaaacataagagaattcatactggagagaaaccctacacatgtgaagaatgtggcaaagcctttagacggtccacagttctgaacgaacataagaaaattcatactggagagaaaccctacaaatgtgaagaatgtggcaaagcctttacaaggtccacaacactgaatgaacacaagaaaattcatactggagagaaaccctacaaatgtaaagaatgtggcaaagcctttagatggtccacaagcctgaatgaacataagaatattcatactggagagaaaccctacaaatgtaaagaatgtggcaaagcctttagacagtccaggagcctgaatgaacataaaaatattcatactggcgaaaaaccctacacatgtgaaaaatgtggcaaagcttttaaccaatcctcaagtcttattatacacaggagcattcattctgaacaaaaactttacaaatgtgaagaatgtggcaaagcctttacttggtcctcatcccttaataaacataagagaattcatactggagagaaaccctacacatgtgaagaatgtggcaaagctttttataggtcctcacaccttgctaaacataagagaattcatactggagagaaaccctacacgtgcgaagaatgtggcaaagcttttaaccaatcctcaactcttatattacacaagagaatccattctgggcaaaaaccttacaaatgtgaagaatgtggcaaagcctttacacggtccacaacactgaacgaacataagaaaattcatactggcgagaaaccctacaaatgtgaagaatgtggcaaagctttcatatggtccgcaagcctgaatgaacataagaatattcatactggagagaaaccctacaaatgtaaagaatgtggcaaagcttttaaccaatcctcaggccttattatacacaggagcattcattctgaacaaaaactttacaaatgtgaagaatgtggcaaagcctttactcggtccacagccctgaatgaacataagaaaattcattctggagagaaaccctacaaatgcaaagaatgtggcaaagcctataacttatcctcaacccttactaaacataagagaattcatactggagagaaacccttcacatgtgaagaatgtggcaaagccttcaattggtcctcatcccttactaaacataagataattcatactggagagaaatcctacaaatgtgaagaatgtggcaaagcttttaatcggccctcaacccttactgtacacaagcgaattcatactggcaaggaacatagttagtaatgaactagtccgtaacttgaaagtatttcgatttcttggctttatatatcttgtggaaaggacgatgtgtgacccggcctcttcaaata

SEQ ID NO: 320 - DNA, 1499 bp, Homo sapiens
  source 1..1499: mol_type = genomic DNA
accgccaccatgtcacacctaactcaacatacaggaattcatgctggagagaaaccctacaaatgtgaaaaatgtggcaaagcctttaataggtccacatcacttagtaaacataagagaattcatactggagagaaaccctacacatgtgaagaatgtggcaaagcctttagacggtccacagttctgaacgaacataagaaaattcatactggagagaaaccctacaaatgtgaagaatgtggcaaagcctttacaaggtccacaacactgaatgaacacaagaaaattcatactggagagaaaccctacaaatgtaaagaatgtggcaaagcctttagatggtccacaagcctgaatgaacataagaatattcatactggagagaaaccctacaaatgtaaagaatgtggcaaagcctttagacagtccaggagcctgaatgaacataaaaatattcatactggcgaaaaaccctacacatgtgaaaaatgtggcaaagcttttaaccaatcctcaagtcttattatacacaggagcattcattctgaacaaaaactttacaaatgtgaagaatgtggcaaagcctttacttggtcctcatcccttaataaacataagagaattcatactggagagaaaccctacacatgtgaagaatgtggcaaagctttttataggtcctcacaccttgctaaacataagagaattcatactggagagaaaccctacacgtgcgaagaatgtggcaaagcttttaaccaatcctcaactcttatattacacaagagaatccattctgggcaaaaaccttacaaatgtgaagaatgtggcaaagcctttacacggtccacaacactgaacgaacataagaaaattcatactggcgagaaaccctacaaatgtgaagaatgtggcaaagctttcatatggtccgcaagcctgaatgaacataagaatattcatactggagagaaaccctacaaatgtaaagaatgtggcaaagcttttaaccaatcctcaggccttattatacacaggagcattcattctgaacaaaaactttacaaatgtgaagaatgtggcaaagcctttactcggtccacagccctgaatgaacataagaaaattcattctggagagaaaccctacaaatgcaaagaatgtggcaaagcctataacttatcctcaacccttactaaacataagagaattcatactggagagaaacccttcacatgtgaagaatgtggcaaagccttcaattggtcctcatcccttactaaacataagataattcatactggagagaaatcctacaaatgtgaagaatgtggcaaagcttttaatcggccctcaacccttactgtacacaagcgaattcatactggcaaggaacatagttagtaatgaactagtccgtaacttgaaagtatttcgatttcttggctttatatatcttgtggaaaggacgaggcgatgatagtgcaggcggtcgt

SEQ ID NO: 321 - DNA, 2048 bp, Homo sapiens
  source 1..2048: mol_type = genomic DNA
accgccaccatggaactcgtaacattcagggatgtggccatagaattctcccctgaagagtggaaatgtctggaccctgcccagcagaatttgtatagagatgtgatgttggagaactacaggaacctggtctccctgggttttgtgatctctaacccagacctggtcacctgtctggagcaaataaaagagccctgcaatttgaagatacatgagacagcagccaaacccccagctatatgttctcctttcagccaagacctttcaccagtgcaggggatagaagattcattccacaaacttatactgaaaagatacgagaaatgtggacatgagaatttacaattaagaaaaggctgtaaacgtgtgaatgagtgtaaggtgcagaaaggagttaataatggagtttaccagtgcttgtcaactacccagagcaaaatatttcaatgtaatacatgtgttaaagtttttagtaaattttcaaattcaaacaaacataagataagacatactggagagaaaccctttaaatgtacagaatgtggcagatcgttttacatgtcacacctaactcaacatacaggaattcatgctggagagaaaccctacaaatgtgaaaaatgtggcaaagcctttaataggtccacatcacttagtaaacataagagaattcatactggagagaaaccctacacatgtgaagaatgtggcaaagcctttagacggtccacagttctgaacgaacataagaaaattcatactggagagaaaccctacaaatgtgaagaatgtggcaaagcctttacaaggtccacaacactgaatgaacacaagaaaattcatactggagagaaaccctacaaatgtaaagaatgtggcaaagcctttagatggtccacaagcctgaatgaacataagaatattcatactggagagaaaccctacaaatgtaaagaatgtggcaaagcctttagacagtccaggagcctgaatgaacataaaaatattcatactggcgaaaaaccctacacatgtgaaaaatgtggcaaagcttttaaccaatcctcaagtcttattatacacaggagcattcattctgaacaaaaactttacaaatgtgaagaatgtggcaaagcctttacttggtcctcatcccttaataaacataagagaattcatactggagagaaaccctacacatgtgaagaatgtggcaaagctttttataggtcctcacaccttgctaaacataagagaattcatactggagagaaaccctacacgtgcgaagaatgtggcaaagcttttaaccaatcctcaactcttatattacacaagagaatccattctgggcaaaaaccttacaaatgtgaagaatgtggcaaagcctttacacggtccacaacactgaacgaacataagaaaattcatactggcgagaaaccctacaaatgtgaagaatgtggcaaagctttcatatggtccgcaagcctgaatgaacataagaatattcatactggagagaaaccctacaaatgtaaagaatgtggcaaagcttttaaccaatcctcaggccttattatacacaggagcattcattctgaacaaaaactttacaaatgtgaagaatgtggcaaagcctttactcggtccacagccctgaatgaacataagaaaattcattctggagagaaaccctacaaatgcaaagaatgtggcaaagcctataacttatcctcaacccttactaaacataagagaattcatactggagagaaacccttcacatgtgaagaatgtggcaaagccttcaattggtcctcatcccttactaaacataagataattcatactggagagaaatcctacaaatgtgaagaatgtggcaaagcttttaatcggccctcaacccttactgtacacaagcgaattcatactggcaaggaacatagttagtaatgaactagtccgtaacttgaaagtatttcgatttcttggctttatatatcttgtggaaaggacgaaatctcggttaagggtatatagga

SEQ ID NO: 322 - DNA, 1868 bp, Homo sapiens
  source 1..1868: mol_type = genomic DNA
accgccaccatggcggcgccggcgttggcattagtatcatttgaagacgtggttgtgaccttcactggagaggaatgggggcacctggacctggcccagaggaccctgtaccaggaggtgatgctggagacctgcaggctcctggtctcactggggcatcctgttcccaaaccagagctgatctatctactggaacatggacaggaactgtggacagtgaagagaggcctctcccaaagcacctgcgcaggtgaaaaagcaaaacccaagattacagagcctactgcttctcagctggccttctctgaggaatcctctttccaggaacttctggcacagagatcctcaagagattccaggttggggcaagctagagatgaggaaaagctaataaaaattcaggaagggaacttgaggccaggaacaaacccccacaaagagatatgccctgagaagttgagttataaacatgatgatttggagccagatgatagtctgggcttaagggttttacaggaacgagtcactccacaagatgctctccatgagtgtgactctcaaggaccaggaaaagaccccatgactgatgcaaggaataacccttacacatgcacggaatgtgggaaagggtttagcaagaagtgggcccttgttcggcatcaacagattcatgctggagtgaagccctatgagtgcaatgagtgtgggaaagcctgtcgttatatggctgatgtcattcgacatatgaggcttcatactggggaaaaaccatacaagtgtattgagtgtgggaaagccttcaaacgcaggtttcacctcacggagcaccagcgtattcacaccggagataagccctatgagtgcaaagaatgtggcaaagcattcacccaccgctcttcttttatccagcataatatgactcacactcgagaaaaaccctttttatgcaaagaatgtgggaaagctttttactacagctcctcatttgctcaacatatgaggattcatactggaaagaaactctatgagtgcggtgaatgtggaaaggccttcacgcaccgctccacatttatccagcacaatgtgacccacacaggagaaaaaccatttttatgtaaagaatgtggaaaaaccttttgcctcaactcatccttcactcagcacatgaggattcacactggagagaaaccctatgagtgcggtgaatgtggaaaggcctttactcatcgctccactttcatccgacataagaggacccataccggagagaagccctttgagtgcaaagaatgtgggaaggccttttgtgacagctcttccttaattcaacatatgaggattcacactggtgagaagccttatgagtgcagtgaatgtggaaaggcttttacacaccactctgtttttattcgacataataggacccacagtggacaaaaacccttggagtgcaaagaatgtgcaaaagccttttactatagctcttccttcactcgacacatgaggattcacactggagagaagccctatgtttgtagagaatgtggaaaggcttttacccaacctgcaaattttgttcggcataataggatccacactggagaaaaaccttttgaatgcaaagaatgtgagaaagccttctgtgacaactttgctttaactcagcacatgagaactcacactggagagaaaccctttgaatgcaatgaatgtggaaagaccttcagccacagttcatcgttcactcaccatcgaaagattcataccagagtttagtaatgaactagtccgtaacttgaaagtatttcgatttcttggctttatatatcttgtggaaaggacgaacgtgcagtggctgcgtggtgagt

SEQ ID NO: 323 - DNA, 1307 bp, Homo sapiens
  source 1..1307: mol_type = genomic DNA
accgccaccatggaaaaatccaaaaatttccgcatcgacgccctgctggcggtggaccccccacgagccgcctctgcgcagagcgcgccgctggccttggtcacgtcgctcgccgccgccgcatctggcaccggaggtggcggcggcggcggcggggcgagcggcgggactagcggcagctgcagccccgcgtcctcggagccgccggctgcgcccgccgaccgcctgcgcgccgagagcccgtcgccgccgcgcctgctggccgcgcactgcgcgctgctgcccaagccgggcttcctgggcgcgggcggcggcggcggcggcacgggcggcgggcacggggggccccaccaccacgcgcatccgggcgcagcggccgctgccgccgccgccgccgccgccgccgccgctgggggcctggcgctggggctgcaccctgggggcgcgcagggcggcgcgggcctcccggcgcaggcggcgctctacggccacccggtctacggctactccgcggcggcggcggcggctgcgctggcgggccagcacccggcgctctcctactcgtacccgcaggtgcaaggcgcgcaccccgcgcaccccgccgaccccatcaagctgggcgccggcaccttccagctggaccagtggctgcgcgcgtccaccgcgggcatgatcctgcctaagatgcccgacttcaactcccaggcgcagtcgaacctcctggggaagtgccgccggccgcgcaccgccttcaccagccagcagctgctggagctggagcaccagttcaagctcaacaagtacctgtcgcggcccaagcgcttcgaggtggccacctcgctcatgctcaccgagacccaggtgaagatttggttccagaaccggcggatgaaatggaaacgcagcaaaaaggccaaagagcaggcggcgcaggaagcggagaaacagaagggcggcggcgggggcgcggggaagggcggcgcggaggagccgggagccgaggagctgctggggccgccagcgcccggagacaagggcagcggacgccgcctgcgggacttgagggacagtgaccccgaggaggacgaggacgaggacgacgaggaccatttcccctacagcaacggcgccagcgtccacgccgcctcctccgactgctcctcggaggacgactcgccgcccccgcggcccagccaccagcccgcgccccagtagtaatgaactagtccgtaacttgaaagtatttcgatttcttggctttatatatcttgtggaaaggacgatgcgttcgctaatccgatagcgcc

SEQ ID NO: 324 - DNA, 671 bp, Homo sapiens
  source 1..671: mol_type = genomic DNA
accgccaccatggggggactctcaacagtaggtgcctgccctggaatcctgggcgcccaacaagcccaggcgcagtcgaacctcctggggaagtgccgccggccgcgcaccgccttcaccagccagcagctgctggagctggagcaccagttcaagctcaacaagtacctgtcgcggcccaagcgcttcgaggtggccacctcgctcatgctcaccgagacccaggtgaagatttggttccagaaccggcggatgaaatggaaacgcagcaaaaaggccaaagagcaggcggcgcaggaagcggagaaacagaagggcggcggcgggggcgcggggaagggcggcgcggaggagccgggagccgaggagctgctggggccgccagcgcccggagacaagggcagcggacgccgcctgcgggacttgagggacagtgaccccgaggaggacgaggacgaggacgacgaggaccatttcccctacagcaacggcgccagcgtccacgccgcctcctccgactgctcctcggaggacgactcgccgcccccgcggcccagccaccagcccgcgccccagtagtaatgaactagtccgtaacttgaaagtatttcgatttcttggctttatatatcttgtggaaaggacgacaccatattgctaccgcctcgggt

SEQ ID NO: 325 - DNA, 1496 bp, Homo sapiens
  source 1..1496: mol_type = genomic DNA
accgccaccatgccgagctgctccacgtccaccatgccgggcatgatctgcaagaacccagacctcgagtttgactcgctacagccctgcttctacccggacgaagatgacttctacttcggcggccccgactcgacccccccgggggaggacatctggaagaagtttgagctgctgcccacgcccccgctgtcgcccagccgtggcttcgcggagcacagctccgagcccccgagctgggtcacggagatgctgcttgagaacgagctgtggggcagcccggccgaggaggacgcgttcggcctggggggactgggtggcctcacccccaacccggtcatcctccaggactgcatgtggagcggcttctccgcccgcgagaagctggagcgcgccgtgagcgagaagctgcagcacggccgcgggccgccaaccgccggttccaccgcccagtccccgggagccggcgccgccagccctgcgggtcgcgggcacggcggggctgcgggagccggccgcgccggggccgccctgcccgccgagctcgcccacccggccgccgagtgcgtggatcccgccgtggtcttcccctttcccgtgaacaagcgcgagccagcgcccgtgcccgcagccccggccagtgccccggcggcgggccctgcggtcgcctcgggggcgggtattgccgccccagccggggccccgggggtcgcccctccgcgcccaggcggccgccagaccagcggcggcgaccacaaggccctcagtacctccggagaggacaccctgagcgattcagatgatgaagatgatgaagaggaagatgaagaggaagaaatcgacgtggtcactgtggagaagcggcgttcctcctccaacaccaaggctgtcaccacattcaccatcactgtgcgtcccaagaacgcagccctgggtcccgggagggctcagtccagcgagctgatcctcaaacgatgccttcccatccaccagcagcacaactatgccgccccctctccctacgtggagagtgaggatgcacccccacagaagaagataaagagcgaggcgtccccacgtccgctcaagagtgtcatccccccaaaggctaagagcttgagcccccgaaactctgactcggaggacagtgagcgtcgcagaaaccacaacatcctggagcgccagcgccgcaacgaccttcggtccagctttctcacgctcagggaccacgtgccggagttggtaaagaatgagaaggccgccaaggtggtcattttgaaaaaggccactgagtatgtccactccctccaggccgaggagcaccagcttttgctggaaaaggaaaaattgcaggcaagacagcagcagttgctaaagaaaattgaacacgctcggacttgctagtaatgaactagtccgtaacttgaaagtatttcgatttcttggctttatatatcttgtggaaaggacgaaagacgcacctcggatatgtccgc

SEQ ID NO: 326 - DNA, 863 bp, Homo sapiens
  source 1..863: mol_type = genomic DNA
accgccaccatgcggggggctcctgggaactgtgttggagccgagcaagcgctagccaggcgcaagcgcgcacagactgtagccatccgaggacacccccgcccccccggcccacccggagacacccgcgcagaatcgcctccggatcccctgcagtcggcgggagatgatgaagatgatgaagaggaagatgaagaggaagaaatcgacgtggtcactgtggagaagcggcgttcctcctccaacaccaaggctgtcaccacattcaccatcactgtgcgtcccaagaacgcagccctgggtcccgggagggctcagtccagcgagctgatcctcaaacgatgccttcccatccaccagcagcacaactatgccgccccctctccctacgtggagagtgaggatgcacccccacagaagaagataaagagcgaggcgtccccacgtccgctcaagagtgtcatccccccaaaggctaagagcttgagcccccgaaactctgactcggaggacagtgagcgtcgcagaaaccacaacatcctggagcgccagcgccgcaacgaccttcggtccagctttctcacgctcagggaccacgtgccggagttggtaaagaatgagaaggccgccaaggtggtcattttgaaaaaggccactgagtatgtccactccctccaggccgaggagcaccagcttttgctggaaaaggaaaaattgcaggcaagacagcagcagttgctaaagaaaattgaacacgctcggacttgctagtaatgaactagtccgtaacttgaaagtatttcgatttcttggctttatatatcttgtggaaaggacgactggttcaccgtcctttagtacct

SEQ ID NO: 327 - DNA, 2270 bp, Homo sapiens
  source 1..2270: mol_type = genomic DNA
accgccaccatgatgaaggaggtcttgtcaacagggcaaggcaatacagaagtgatccacacagggacattgcaaagatatcaaagttatcacattggagatttttgcttccaggaaattgagaaagaaattcatgatattgagtttcagtgtcaagaagatgaaagaaatggccatgaagcacccatgacaaaaataaaaaagttgactggtagcacagaccaacatgatcacaggcatgctggaaacaagcctattaaagatcagcttggatcaagcttttattcacatctgcctgaactccacataattcagatcaaaggtaaaattggtaatcaatttgagaagtctaccagtgatgctccctcggtttcaacatcccaaagaatttctcctaggccccaaatccatatttctaataactatgggaataattccccgaattcttcactactcccacaaaaacaggaagtatacatgagagaaaaatctttccaatgtaatgagagtggcaaagcctttaattgtagctcactcttaaggaaacaccagataccccatttaggagacaaacaatataaatgtgatgtatgtggcaagctctttaatcacaagcaataccttacatgccattgtagatgtcacactggagagaaaccttacaagtgtaatgagtgtggaaagtccttcagtcaggtatcatcccttacatgccatcgtagacttcacactgcagtaaaatctcacaagtgtaatgagtgtggcaagatctttggtcaaaattcagcccttgtaattcataaggcaattcatactggagaaaaaccttacaagtgtaatgaatgtgacaaagcttttaatcagcaatcaaaccttgcacgtcatcgtagaattcatactggagagaaaccttacaaatgtgaagaatgtgacaaagttttcagtcggaaatcaacccttgagtcacataagagaattcatactggagagaaaccatacaaatgtaaggtttgtgacacagctttcacatggaattctcagctggcaagacataaaagaattcacactggagagaaaacttacaagtgtaatgagtgtggcaagaccttcagtcacaagtcatcccttgtatgccatcatagacttcatggtggagagaaatcttacaaatgtaaggtctgtgacaaggcttttgcgtggaattcacacctggtaagacatactagaattcatagtggaggaaaaccttacaagtgtaatgaatgtgggaagacctttggtcaaaattcagatcttctaattcataagtcaattcatactggagagcaaccttacaaatatgaagaatgtgaaaaggttttcagttgtggatcaacccttgagacacataagataattcacaccggagagaaaccatacaaatgtaaggtttgtgacaaggcttttgcgtgtcattcctatctggcaaaacatactagaattcatagtggagagaaaccttacaagtgtaatgagtgcagcaagaccttccgtctgaggtcataccttgcaagccatcgcagagttcatagtggtgagaaaccttacaagtgtaatgagtgcagcaagaccttcagtcagaggtcataccttcattgccatcgtagacttcatagtggtgagaaaccttacaagtgtaatgagtgtggcaagaccttcagtcacaagccatcccttgttcaccatcgtagacttcatactggagagaaatcttacaaatgtacggtttgtgacaaggctttcgtgcgtaattcatacctggcaagacataccagaattcacactgcagagaaaccttacaagtgtaatgaatgtgggaaggcttttaatcaacaatcacaactttcacttcatcatagaattcatgctggggagaaactttacaaatgtgaaacatgtgacaaagttttcagtcgcaaatcacaccttaaaagacataggagaattcatcctggaaagaaaccatacaaatgtaaggtttgtgacaagacttttgggagtgattcacacctgaaacaacatactggacttcacactggagagaaaccttacaagtgtaatgagtgtggcaaagcctttagcaagcagtcaacacttattcaccatcaggcagttcatggtgtagggaaacttgactagtaatgaactagtccgtaacttgaaagtatttcgatttcttggctttatatatcttgtggaaaggacgatactgcttatcacggataatttga

SEQ ID NO: 328 - DNA, 1286 bp, Homo sapiens
  source 1..1286: mol_type = genomic DNA
accgccaccatgtgcgtgtgtgctggctgccgggctgccccgagccggcggggagccggtccgctccaggtggcgggcggctggagcgagggagcggacatggactacgactcgtaccagcactatttctacgactatgactgcggggaggatttctaccgctccacggcgcccagcgaggacatctggaagaaattcgagctggtgccatcgccccccacgtcgccgccctggggcttgggtcccggcgcaggggacccggcccccgggattggtcccccggagccgtggcccggagggtgcaccggagacgaagcggaatcccggggccactcgaaaggctggggcaggaactacgcctccatcatacgccgtgactgcatgtggagcggcttctcggcccgggaacggctggagagagctgtgagcgaccggctcgctcctggcgcgccccgggggaacccgcccaaggcgtccgccgccccggactgcactcccagcctcgaagccggcaacccggcgcccgccgccccctgtccgctgggcgaacccaagacccaggcctgctccgggtccgagagcccaagcgactcggagaatgaagaaattgatgttgtgacagtagagaagaggcagtctctgggtattcggaagccggtcaccatcacggtgcgagcagaccccctggatccctgcatgaagcatttccacatctccatccatcagcaacagcacaactatgctgcccgttttcctccagaaagctgctcccaagaagaggcttcagagaggggtccccaagaagaggttctggagagagatgctgcaggggaaaaggaagatgaggaggatgaagagattgtgagtcccccacctgtagaaagtgaggctgcccagtcctgccaccccaaacctgtcagttctgatactgaggatgtgaccaagaggaagaatcacaacttcctggagcgcaagaggcggaatgacctgcgttcgcgattcttggcgctgagggaccaggtgcccaccctggccagctgctccaaggcccccaaagtagtgatcctaagcaaggccttggaatacttgcaagccctggtgggggctgagaagaggatggctacagagaaaagacagctccgatgccggcagcagcagttgcagaaaagaattgcatacctcactggctactagtaatgaactagtccgtaacttgaaagtatttcgatttcttggctttatatatcttgtggaaaggacgattaacggactgcggcttgcttact

SEQ ID NO: 329 - DNA, 1196 bp, Homo sapiens
  source 1..1196: mol_type = genomic DNA
accgccaccatggactacgactcgtaccagcactatttctacgactatgactgcggggaggatttctaccgctccacggcgcccagcgaggacatctggaagaaattcgagctggtgccatcgccccccacgtcgccgccctggggcttgggtcccggcgcaggggacccggcccccgggattggtcccccggagccgtggcccggagggtgcaccggagacgaagcggaatcccggggccactcgaaaggctggggcaggaactacgcctccatcatacgccgtgactgcatgtggagcggcttctcggcccgggaacggctggagagagctgtgagcgaccggctcgctcctggcgcgccccgggggaacccgcccaaggcgtccgccgccccggactgcactcccagcctcgaagccggcaacccggcgcccgccgccccctgtccgctgggcgaacccaagacccaggcctgctccgggtccgagagcccaagcgactcggagaatgaagaaattgatgttgtgacagtagagaagaggcagtctctgggtattcggaagccggtcaccatcacggtgcgagcagaccccctggatccctgcatgaagcatttccacatctccatccatcagcaacagcacaactatgctgcccgttttcctccagaaagctgctcccaagaagaggcttcagagaggggtccccaagaagaggttctggagagagatgctgcaggggaaaaggaagatgaggaggatgaagagattgtgagtcccccacctgtagaaagtgaggctgcccagtcctgccaccccaaacctgtcagttctgatactgaggatgtgaccaagaggaagaatcacaacttcctggagcgcaagaggcggaatgacctgcgttcgcgattcttggcgctgagggaccaggtgcccaccctggccagctgctccaaggcccccaaagtagtgatcctaagcaaggccttggaatacttgcaagccctggtgggggctgagaagaggatggctacagagaaaagacagctccgatgccggcagcagcagttgcagaaaagaattgcatacctcactggctactagtaatgaactagtccgtaacttgaaagtatttcgatttcttggctttatatatcttgtggaaaggacgattcccgtacatttgacgcgacttt

SEQ ID NO: 330 - DNA, 812 bp, Homo sapiens
  source 1..812: mol_type = genomic DNA
accgccaccatgtgcgtgtgtgctggctgccgggctgccccgagccggcggggagccggtccgctccaggtggcgggcggctggagcgagggagcggacatggactacgactcgtaccagcactatttctacgactatgactgcggggaggatttctaccgctccacggcgcccagcgaggacatctggaagaaattcgagctggtgccatcgccccccacgtcgccgccctggggcttgggtcccggcgcaggggacccggcccccgggattggtcccccggagccgtggcccggagggtgcaccggagacgaagcggaatcccggggccactcgaaaggctggggcaggaactacgcctccatcatacgccgtgactgcatgtggagcggcttctcggcccgggaacggctggagagagctgtgagcgaccggctcgctcctggcgcgccccgggggaacccgcccaaggcgtccgccgccccggactgcactcccagcctcgaagccggcaacccggcgcccgccgccccctgtccgctgggcgaacccaagacccaggcctgctccgggtccgagagcccaagcgactcgggtaaggacctccccgagccatccaagagggggccaccccatgggtggccaaagctctgcccctgcctgaggtcaggcattggctcttctcaagctcttgggccatctccgcctctctttggctagtaatgaactagtccgtaacttgaaagtatttcgatttcttggctttatatatcttgtggaaaggacgagtgaaacttgagtagttgaataga

SEQ ID NO: 331 - DNA, 2480 bp, Homo sapiens
  source 1..2480: mol_type = genomic DNA
accgccaccatggcagccatcaacccgtgggcctcctggggtgcccttacggaccaatcttgggggatgacagctgttgacccatgggcctcctgggctctgtgtcctcagtatcctgcctggcacgtggagggaagcctggaggaggggaggagggccactgggctcccagcagcccaggttcaggaaccagtgaccttcaaggacgtggccgtggacttcacccaagaagagtgggggcagctggaccttgttcagaggaccctgtaccgtgatgtgatgctggagacctatggtcacctgctctctgtgggaaatcagattgccaagcctgaggtcatctccctgttggagcaaggagaagagccgtggtcagtggagcaggcatgtcctcaacgcacttgtccagaatgggtgagaaatcttgaaagcaaagcattgatcccagcacagagcatttttgaggaagaacaatcccatggcatgaagttggaaagatatatatgggatgatccttggttctccaggttagaagttttgggatgtaaagaccaattagaaatgtaccacatgaaccagagtacagctatgaggcagatggtcttcatgcaaaagcaagtactatcccagagaagctctgaattctgtggacttggggcagagtttagccagaacttaaactttgttccatctcagagagtttctcagatagaacatttctataagcctgatacacatgctcaaagttggagatgtgactcagccataatgtatgcagataaggttacctgtgaaaataatgattatgacaaaactgtttatcagtccattcaacctatttaccctgcaagaatacaaactggagataatcttttcaaatgtactgatgctgttaaatctttcaatcatataatacattttggtgatcataaaggaattcacacaggagaaaaactctatgaatataaggaatgccatcaaatctttaaccagagcccatcatttaatgaacacccaaggcttcatgttggagaaaaccagtataattacaaagaatatgagaatatcttttatttctcatcctttatggaacatcaaaaaattggtactgtagagaaagcgtataaatacaatgaatgggagaaagtctttgggtatgactctttccttactcaacatacaagcacttacactgcagagaaaccctatgactacaatgaatgtgggacgtctttcatctggagctcttaccttattcaacataagaaaactcatactggagaaaaaccctatgaatgtgataaatgtggaaaagtttttaggaatcgctcagcccttacgaaacatgaacggactcacactggaataaaaccctatgaatgtaataaatgtggaaaagccttcagctggaattctcatcttattgtacataagagaattcatacaggagaaaaaccttatgtttgtaatgagtgtgggaaatctttcaactggaactctcatcttattggacatcagaggactcatacaggagagaaaccttttgaatgtactgaatgtgggaaatcattcagctggagctcccatcttattgcccatatgagaatgcatactggagagaaaccctttaaatgtgatgaatgtgaaaaagcttttagggactactcagcccttagtaaacatgaaagaactcattctggagcaaaaccatataaatgtactgaatgtggaaaatccttcagctggagctcccatcttattgcccatcagagaactcacacgggagagaaaccatataactgtcaggaatgtggcaaagcattcagagaacgctcagccctcactaaacatgagataattcattctggaattaagccctatgaatgtaataaatgtggaaaatcctgtagccagatggctcaccttgttagacatcaaaggactcatactggagaaaaaccctatgaatgcaataaatgtggaaaatccttcagtcagagctgtcaccttgttgctcatcggagaattcacactggtgagaaaccctataaatgtaatcagtgtgaaagatcctttaactgtagttctcacctcattgcacaccggagaactcatactggagagaaaccatacaggtgtaatgaatgtgggaaagcatttaatgagagttcatcccttattgtacacctaagaaaccatactggagaaaagccctacaaatgtaatcattgtgaaaaagcattttgtaagaattcttcccttattattcatcagagaatgcatagtggagagaaacgctttatatgcagtgaatgtggaaaagcctttagtggtcactcagccctacttcaacaccagagaaatcacagtgaagagaaactgaattagtaatgaactagtccgtaacttgaaagtatttcgatttcttggctttatatatcttgtggaaaggacgattatcctccattattcgcgagtcc

SEQ ID NO: 332 - DNA, 2192 bp, Homo sapiens
  source 1..2192: mol_type = genomic DNA
accgccaccatgtcctatggatcaataacattcggggatgtggccatagacttctctcatcaggagtgggaatatctcagcctggttcagaagaccttgtaccaggaggtgatgatggagaactatgacaacttagtctcattggcaggacattccgtatctaagccagatttaatcaccttattggagcaaggaaaagagccatggatgattgtgagggaagaaacaagaggagagtgtacagatttggattcaagatgtgaaataatcagcgatgggaaaatgcagctttataggaaacactcatgtgttactctccatcagagaattcataatggacagaaaccatatgagtgtaagcaatgtcagaagtcctttagtcatcttacagaactcatggtacatcaaacaattcatactagtgaggaacctgatcaatgtgaaaagtttaggaaggcatttagccatcttacagaccttagaaagcatcagaaaattaatgctcgtgagaaaccttatgaatgtgaagaatgtgggaaggtcttcagttatcctgcaaaccttgctcaacatgggaaagttcatgttgagaaaccctatgaatgtaaagagtgtggggaagcttttaggactagccgtcaacttactgtacatcatagatttcattatggtgagaaaccctacgaatgtaaggaatgtggcaaggcctttagtgtgtatggacgacttagtcgacatcagagtattcacactggtgagaagccctttgaatgtaacaaatgtgggaagtcctttaggctcaaagcaggccttaaagtacatcagagtattcatactggagagaagccacatgaatgtaaggaatgtggaaaggcctttcgtcagttttcccaccttgtgggtcataaaagaattcatactggagaaaaaccctatgaatgcaaggaatgcgggaagggctttacatgtaggtatcaacttaccatgcatcagagaatttattcaggggagaaacactatgaatgtaaagaaaatggggaggcttttagtagtggccatcaacttactgcacctcatacatttgaaagtgttgagaaaccttataagtgtgaggaatgtgggaaagcctttagtgtgcatggacgacttactcgacatcagggtattcatagtggtaagaaaccctatgaatgtaacaaatgtgggaagtcctttaggctcaattcatcccttaaaatacatcaaaatattcataccggtgagaaaccctacaaatgtaaggaatgtgggaaggccttcagtcagcgtgcacaccttgcccatcataacagaattcatactggttacaaaccctttgaatgtaaagaatgtgggaagtcctttcgttgtgcctcatatcttgttatacatgagagaattcatacaggagagaaaccctatgtatgtcaagagtgtgggaagggttttagttatagccataaactcactatacatcgcagagttcatactggtgagaaaccttatgaatgtaaggaatgtgggaaggcctttagtgtatctggacaacttactcagcatctgagtattcacagtggtaagaaaccctttgaatgcaacaaatgcgggaagtcttttaggttcatttctgtacttaaagcccatcagaatattcatagcgctgagaaaccctacgaatgtaaggaatgtggcaaggcctttcgtcatgccacaagcctcatatatcatgaccgaactcatgctggtgaaaagtcctatgaatgtaaagaatgtggggaaacttttagtcatgcttcacatcttattattcatgagagaattcataccagtgataaaccctatgaatgtaaaagatgtgggaaggcatttcactgtgcctcatatcttgttagacatgaaagcgttcatgctgatggaaatccctatatgtgtgaagagtgtgggaaagcttttaatagtagccatgaacttagtatacatcatagagttcatactggtgagaaaccctttaaatgtaacaaatgcagaaggtcctttaggcttagatccatccttgaagtacatcagagaattcatatttagtaatgaactagtccgtaacttgaaagtatttcgatttcttggctttatatatcttgtggaaaggacgacggcagtgtgccggcgatccctaa

SEQ ID NO: 333 - DNA, 2189 bp, Homo sapiens
  source 1..2189: mol_type = genomic DNA
accgccaccatgtcctatggatcaataacattcggggatgtggccatagacttctctcatcaggagtgggaatatctcagcctggttcagaagaccttgtaccaggaggtgatgatggagaactatgacaacttagtctcattgggacattccgtatctaagccagatttaatcaccttattggagcaaggaaaagagccatggatgattgtgagggaagaaacaagaggagagtgtacagatttggattcaagatgtgaaataatcagcgatgggaaaatgcagctttataggaaacactcatgtgttactctccatcagagaattcataatggacagaaaccatatgagtgtaagcaatgtcagaagtcctttagtcatcttacagaactcatggtacatcaaacaattcatactagtgaggaacctgatcaatgtgaaaagtttaggaaggcatttagccatcttacagaccttagaaagcatcagaaaattaatgctcgtgagaaaccttatgaatgtgaagaatgtgggaaggtcttcagttatcctgcaaaccttgctcaacatgggaaagttcatgttgagaaaccctatgaatgtaaagagtgtggggaagcttttaggactagccgtcaacttactgtacatcatagatttcattatggtgagaaaccctacgaatgtaaggaatgtggcaaggcctttagtgtgtatggacgacttagtcgacatcagagtattcacactggtgagaagccctttgaatgtaacaaatgtgggaagtcctttaggctcaaagcaggccttaaagtacatcagagtattcatactggagagaagccacatgaatgtaaggaatgtggaaaggcctttcgtcagttttcccaccttgtgggtcataaaagaattcatactggagaaaaaccctatgaatgcaaggaatgcgggaagggctttacatgtaggtatcaacttaccatgcatcagagaatttattcaggggagaaacactatgaatgtaaagaaaatggggaggcttttagtagtggccatcaacttactgcacctcatacatttgaaagtgttgagaaaccttataagtgtgaggaatgtgggaaagcctttagtgtgcatggacgacttactcgacatcagggtattcatagtggtaagaaaccctatgaatgtaacaaatgtgggaagtcctttaggctcaattcatcccttaaaatacatcaaaatattcataccggtgagaaaccctacaaatgtaaggaatgtgggaaggccttcagtcagcgtgcacaccttgcccatcataacagaattcatactggttacaaaccctttgaatgtaaagaatgtgggaagtcctttcgttgtgcctcatatcttgttatacatgagagaattcatacaggagagaaaccctatgtatgtcaagagtgtgggaagggttttagttatagccataaactcactatacatcgcagagttcatactggtgagaaaccttatgaatgtaaggaatgtgggaaggcctttagtgtatctggacaacttactcagcatctgagtattcacagtggtaagaaaccctttgaatgcaacaaatgcgggaagtcttttaggttcatttctgtacttaaagcccatcagaatattcatagcgctgagaaaccctacgaatgtaaggaatgtggcaaggcctttcgtcatgccacaagcctcatatatcatgaccgaactcatgctggtgaaaagtcctatgaatgtaaagaatgtggggaaacttttagtcatgcttcacatcttattattcatgagagaattcataccagtgataaaccctatgaatgtaaaagatgtgggaaggcatttcactgtgcctcatatcttgttagacatgaaagcgttcatgctgatggaaatccctatatgtgtgaagagtgtgggaaagcttttaatagtagccatgaacttagtatacatcatagagttcatactggtgagaaaccctttaaatgtaacaaatgcagaaggtcctttaggcttagatccatccttgaagtacatcagagaattcatatttagtaatgaactagtccgtaacttgaaagtatttcgatttcttggctttatatatcttgtggaaaggacgaagggctcatagggttatgtactaa

SEQ ID NO: 334 - DNA, 485 bp, Homo sapiens
  source 1..485: mol_type = genomic DNA
accgccaccatgcctaaatcaaaggaacttgtttcttcaagctcttctggcagtgattctgacagtgaggttgacaaaaagttaaagaggaaaaagcaagttgctccagaaaaacctgtaaagaaacaaaagacaggtgagacttcgagagccctgtcatcttctaaacagagcagcagcagcagagatgataacatgtttcagattgggaaaatgaggtacgttagtgttcgcgattttaaaggcaaagtgctaattgatattagagaatattggatggatcctgaaggtgaaatgaaaccaggaagaaaaggtatttctttaaatccagaacaatggagccagctgaaggaacagatttctgacattgatgatgcagtaagaaaactgtagtaatgaactagtccgtaacttgaaagtatttcgatttcttggctttatatatcttgtggaaaggacgatggcccaatgaatagccggaaatc

SEQ ID NO: 335 - DNA, 3695 bp, Homo sapiens
  source 1..3695: mol_type = genomic DNA
accgccaccatggccgctgccgccgtcacccgcgggaccccgggagaaaacagccaccacctgaagatctttctccccaagaagctgctggagtgtcttcctcgctgcccgctgctgcctccagagaggctacggtggaatacaaatgaggagattgcatcctacctgatcacctttgagaagcatgatgagtggctgtcttgtgccccaaagacaaggcctcagaatggctccatcatcctctacaatcgcaagaaggtgaaatatcggaaggatggttacctctggaagaagcggaaggatgggaagaccacccgagaggaccacatgaagctgaaggtccagggcatggagtgtctctatggctgctacgttcactcttccatcgtccccacattccatcggcgctgctactggctgctccagaaccctgacatcgtccttgtgcactacctgaacgtcccagccctggaggactgtggaaagggctgcagccccatcttttgttccatcagcagcgaccgtcgagagtggctgaagtggtcccgggaggagttgttgggacagctgaagcccatgtttcatggcatcaagtggagctgcgggaatggaacagaagagttctctgtagaacacctggtgcagcagattttggacacccacccaaccaagcctgctccccgaacccacgcctgtctctgcagtggggggcttggttctgggagccttacccacaaatgcagcagcacgaaacaccgcatcatctctcccaaagtggagccccgagctttaaccctgacctctatcccccacgctcaccccccagagcctcctccactgatagccccacttcccccagagctccccaaggcacacacctccccatcttcttcctcttcttcctcctcatcaggttttgcagagcccctagaaatcagacctagccctcccacttctcgagggggttcttcaagaggaggcactgctatcctcctcctgacaggactggagcagcgggctggaggcttgacgcccaccaggcacttggctccacaggctgatcctaggccttccatgagtttggcagtggttgtaggcactgagccttctgccccaccagctcctcccagtcctgcctttgaccctgatcgttttctcaacagcccccagaggggccagacatatggaggggggcagggagtaagcccagacttccccgaggcagaggccgctcataccccctgttctgccctagagcctgctgctgccctggagccccaggcagctgctcggggtcccccaccacagtcagtagcaggtgggagaagaggaaactgcttcttcatccaagatgatgacagtggggaggagctcaagggtcacggggctgccccacccataccttcaccccctccctcacccccaccctcacctgcccccttggagccgtcaagcagggtaggaagaggagaggccttgtttggaggacctgttggggccagtgaactggagcccttcagtctttcatcattcccagaccttatgggagaactcatcagtgacgaagctccaagcatccctgctccgaccccccagctgtctcctgctcttagcaccatcacagacttctccccagagtggtcctacccagagggtggggtcaaggtgctcatcacaggtccttggaccgaagccgccgagcattactcctgtgtctttgatcacatcgcagtgccagcctcacttgtccagcctggtgtcttacgctgctactgtcccgcccatgaggtagggctggtgtctttgcaggtggcagggcgggaggggcccctttctgcttctgtgctctttgagtatcgagcccgccgattcctgtctctgcctagtactcaacttgactggctgtcactggacgacaaccagttccggatgtccatactagagcgactggagcagatggagaagcggatggcagagatcgcagcagctgggcaggtgccttgccagggtcctgatgctcctccagttcaggatgaaggccaggggcctgggttcgaagcacgggtagtggtcttggtagaaagcatgatcccacgctccacctggaagggtcctgaacgtctggcccatggaagccccttccggggcatgagccttctgcacctggctgctgcccagggctatgcccgcctcatcgagaccctgagccagtggcggagtgtggagactggaagcttggacttagagcaggaggttgacccgctcaacgtggatcatttctcttgcacccctctgatgtgggcttgtgccctgggacacctggaagctgctgtgctccttttccgttggaaccgacaggcactgagcattcccgactctctgggccgtctgccattgtctgtggctcattcccggggtcatgtgcgccttgcccgctgccttgaggaactacagagacaggagccttcggtggagcccccatttgccctatcgccaccctcctccagcccagacactggtctgagcagcgtctcctcgccctcggagctgtcggatggcaccttttccgtcacgtcagcctattctagtgccccagatggcagtcccccccctgcacctctgccagcctctgagatgactatggaggacatggccccaggccagctttcctctggtgtcccagaagcccccctactcctcatggactatgaggctaccaactccaaggggcccctctcctcccttcctgccctcccaccagcttcagatgatggggctgctccagaggacgctgacagcccacaggctgtggatgtgatcccggtggacatgatctcactagccaagcagatcatcgaagccacaccggagcggattaaacgagaggacttcgtggggctgcccgaggctggagcctcaatgcgggagcggacaggggctgtggggctcagtgagaccatgtcctggctggccagctacctggagaatgtggaccatttccccagctcaacccctcccagcgaactgccctttgagcgaggtcgcctggctgtcccttcagcaccctcctgggcagagtttctctctgcatccaccagtggcaagatggaaagtgattttgccctgctgacactatcagatcacgagcagcgggaactgtatgaggctgcccgagtcatccagacggccttccgaaagtacaagggccggcggctgaaggagcagcaggaggtagcagcagctgtaatccagcgctgttaccggaagtacaagcagtttgcactctataagaagatgacccaggcggccatcctgatccagagcaagttccgaagctactatgaacagaagcgatttcagcagagccgccgagcggctgtgctcatccagcagcactaccgctcctaccgccgcaggcccggccctccccaccggacttcggccaccctgcctgcccgcaacaaaggctcctttctcaccaagaagcaggaccaggcagcccggaagatcatgagattcctgcggcgctgccgacacaggatgagggaactgaagcagaaccaggagctggaagggcttccccagccgggactggccacatagtaatgaactagtccgtaacttgaaagtatttcgatttcttggctttatatatcttgtggaaaggacgatgagcaaccggcaacctattgcat

SEQ ID NO: 336 - DNA, 3827 bp, Homo sapiens
  source 1..3827: mol_type = genomic DNA
accgccaccatgggcacagactccccctccccccggcccctcaggccgggggtgaccttgccccctggagccctcaccatgaataccaaggacaccaccgaggttgctgaaaacagccaccacctgaagatctttctccccaagaagctgctggagtgtcttcctcgctgcccgctgctgcctccagagaggctacggtggaatacaaatgaggagattgcatcctacctgatcacctttgagaagcatgatgagtggctgtcttgtgccccaaagacaaggcctcagaatggctccatcatcctctacaatcgcaagaaggtgaaatatcggaaggatggttacctctggaagaagcggaaggatgggaagaccacccgagaggaccacatgaagctgaaggtccagggcatggagtgtctctatggctgctacgttcactcttccatcgtccccacattccatcggcgctgctactggctgctccagaaccctgacatcgtccttgtgcactacctgaacgtcccagccctggaggactgtggaaagggctgcagccccatcttttgttccatcagcagcgaccgtcgagagtggctgaagtggtcccgggaggagttgttgggacagctgaagcccatgtttcatggcatcaagtggagctgcgggaatggaacagaagagttctctgtagaacacctggtgcagcagattttggacacccacccaaccaagcctgctccccgaacccacgcctgtctctgcagtggggggcttggttctgggagccttacccacaaatgcagcagcacgaaacaccgcatcatctctcccaaagtggagccccgagctttaaccctgacctctatcccccacgctcaccccccagagcctcctccactgatagccccacttcccccagagctccccaaggcacacacctccccatcttcttcctcttcttcctcctcatcaggttttgcagagcccctagaaatcagacctagccctcccacttctcgagggggttcttcaagaggaggcactgctatcctcctcctgacaggactggagcagcgggctggaggcttgacgcccaccaggcacttggctccacaggctgatcctaggccttccatgagtttggcagtggttgtaggcactgagccttctgccccaccagctcctcccagtcctgcctttgaccctgatcgttttctcaacagcccccagaggggccagacatatggaggggggcagggagtaagcccagacttccccgaggcagaggccgctcataccccctgttctgccctagagcctgctgctgccctggagccccaggcagctgctcggggtcccccaccacagtcagtagcaggtgggagaagaggaaactgcttcttcatccaagatgatgacagtggggaggagctcaagggtcacggggctgccccacccataccttcaccccctccctcacccccaccctcacctgcccccttggagccgtcaagcagggtaggaagaggagaggccttgtttggaggacctgttggggccagtgaactggagcccttcagtctttcatcattcccagaccttatgggagaactcatcagtgacgaagctccaagcatccctgctccgaccccccagctgtctcctgctcttagcaccatcacagacttctccccagagtggtcctacccagagggtggggtcaaggtgctcatcacaggtccttggaccgaagccgccgagcattactcctgtgtctttgatcacatcgcagtgccagcctcacttgtccagcctggtgtcttacgctgctactgtcccgcccatgaggtagggctggtgtctttgcaggtggcagggcgggaggggcccctttctgcttctgtgctctttgagtatcgagcccgccgattcctgtctctgcctagtactcaacttgactggctgtcactggacgacaaccagttccggatgtccatactagagcgactggagcagatggagaagcggatggcagagatcgcagcagctgggcaggtgccttgccagggtcctgatgctcctccagttcaggatgaaggccaggggcctgggttcgaagcacgggtagtggtcttggtagaaagcatgatcccacgctccacctggaagggtcctgaacgtctggcccatggaagccccttccggggcatgagccttctgcacctggctgctgcccagggctatgcccgcctcatcgagaccctgagccagtggcggagtgtggagactggaagcttggacttagagcaggaggttgacccgctcaacgtggatcatttctcttgcacccctctgatgtgggcttgtgccctgggacacctggaagctgctgtgctccttttccgttggaaccgacaggcactgagcattcccgactctctgggccgtctgccattgtctgtggctcattcccggggtcatgtgcgccttgcccgctgccttgaggaactacagagacaggagccttcggtggagcccccatttgccctatcgccaccctcctccagcccagacactggtctgagcagcgtctcctcgccctcggagctgtcggatggcaccttttccgtcacgtcagcctattctagtgccccagatggcagtcccccccctgcacctctgccagcctctgagatgactatggaggacatggccccaggccagctttcctctggtgtcccagaagcccccctactcctcatggactatgaggctaccaactccaaggggcccctctcctcccttcctgccctcccaccagcttcagatgatggggctgctccagaggacgctgacagcccacaggctgtggatgtgatcccggtggacatgatctcactagccaagcagatcatcgaagccacaccggagcggattaaacgagaggacttcgtggggctgcccgaggctggagcctcaatgcgggagcggacaggggctgtggggctcagtgagaccatgtcctggctggccagctacctggagaatgtggaccatttccccagctcaacccctcccagcgaactgccctttgagcgaggtcgcctggctgtcccttcagcaccctcctgggcagagtttctctctgcatccaccagtggcaagatggaaagtgattttgccctgctgacactatcagatcacgagcagcgggaactgtatgaggctgcccgagtcatccagacggccttccgaaagtacaagggccggcggctgaaggagcagcaggaggtagcagcagctgtaatccagcgctgttaccggaagtacaagcagctgacctggattgcacttaagtttgcactctataagaagatgacccaggcggccatcctgatccagagcaagttccgaagctactatgaacagaagcgatttcagcagagccgccgagcggctgtgctcatccagcagcactaccgctcctaccgccgcaggcccggccctccccaccggacttcggccaccctgcctgcccgcaacaagctcctttctcaccaagaagcaggaccaggcagcccggaagatcatgagattcctgcggcgctgccgacacaggatgagggaactgaagcagaaccaggagctggaagggcttccccagccgggactggccacatgacctggccaccgcctttctcaccaccctgggggcgcctcgtgcagtcttagtaatgaactagtccgtaacttgaaagtatttcgatttcttggctttatatatcttgtggaaaggacgatggaagatatgatacttgaataaa

SEQ ID NO: 337 - DNA, 3725 bp, Homo sapiens
  source 1..3725: mol_type = genomic DNA
accgccaccatgaataccaaggacaccaccgaggttgctgaaaacagccaccacctgaagatctttctccccaagaagctgctggagtgtcttcctcgctgcccgctgctgcctccagagaggctacggtggaatacaaatgaggagattgcatcctacctgatcacctttgagaagcatgatgagtggctgtcttgtgccccaaagacaaggcctcagaatggctccatcatcctctacaatcgcaagaaggtgaaatatcggaaggatggttacctctggaagaagcggaaggatgggaagaccacccgagaggaccacatgaagctgaaggtccagggcatggagcctgtctcctggcagtgtctctatggctgctacgttcactcttccatcgtccccacattccatcggcgctgctactggctgctccagaaccctgacatcgtccttgtgcactacctgaacgtcccagccctggaggactgtggaaagggctgcagccccatcttttgttccatcagcagcgaccgtcgagagtggctgaagtggtcccgggaggagttgttgggacagctgaagcccatgtttcatggcatcaagtggagctgcgggaatggaacagaagagttctctgtagaacacctggtgcagcagattttggacacccacccaaccaagcctgctccccgaacccacgcctgtctctgcagtggggggcttggttctgggagccttacccacaaatgcagcagcacgaaacaccgcatcatctctcccaaagtggagccccgagctttaaccctgacctctatcccccacgctcaccccccagagcctcctccactgatagccccacttcccccagagctccccaaggcacacacctccccatcttcttcctcttcttcctcctcatcaggttttgcagagcccctagaaatcagacctagccctcccacttctcgagggggttcttcaagaggaggcactgctatcctcctcctgacaggactggagcagcgggctggaggcttgacgcccaccaggcacttggctccacaggctgatcctaggccttccatgagtttggcagtggttgtaggcactgagccttctgccccaccagctcctcccagtcctgcctttgaccctgatcgttttctcaacagcccccagaggggccagacatatggaggggggcagggagtaagcccagacttccccgaggcagaggccgctcataccccctgttctgccctagagcctgctgctgccctggagccccaggcagctgctcggggtcccccaccacagtcagtagcaggtgggagaagaggaaactgcttcttcatccaagatgatgacagtggggaggagctcaagggtcacggggctgccccacccataccttcaccccctccctcacccccaccctcacctgcccccttggagccgtcaagcagggtaggaagaggagaggccttgtttggaggacctgttggggccagtgaactggagcccttcagtctttcatcattcccagaccttatgggagaactcatcagtgacgaagctccaagcatccctgctccgaccccccagctgtctcctgctcttagcaccatcacagacttctccccagagtggtcctacccagagggtggggtcaaggtgctcatcacaggtccttggaccgaagccgccgagcattactcctgtgtctttgatcacatcgcagtgccagcctcacttgtccagcctggtgtcttacgctgctactgtcccgcccatgaggtagggctggtgtctttgcaggtggcagggcgggaggggcccctttctgcttctgtgctctttgagtatcgagcccgccgattcctgtctctgcctagtactcaacttgactggctgtcactggacgacaaccagttccggatgtccatactagagcgactggagcagatggagaagcggatggcagagatcgcagcagctgggcaggtgccttgccagggtcctgatgctcctccagttcaggatgaaggccaggggcctgggttcgaagcacgggtagtggtcttggtagaaagcatgatcccacgctccacctggaagggtcctgaacgtctggcccatggaagccccttccggggcatgagccttctgcacctggctgctgcccagggctatgcccgcctcatcgagaccctgagccagtggcggagtgtggagactggaagcttggacttagagcaggaggttgacccgctcaacgtggatcatttctcttgcacccctctgatgtgggcttgtgccctgggacacctggaagctgctgtgctccttttccgttggaaccgacaggcactgagcattcccgactctctgggccgtctgccattgtctgtggctcattcccggggtcatgtgcgccttgcccgctgccttgaggaactacagagacaggagccttcggtggagcccccatttgccctatcgccaccctcctccagcccagacactggtctgagcagcgtctcctcgccctcggagctgtcggatggcaccttttccgtcacgtcagcctattctagtgccccagatggcagtcccccccctgcacctctgccagcctctgagatgactatggaggacatggccccaggccagctttcctctggtgtcccagaagcccccctactcctcatggactatgaggctaccaactccaaggggcccctctcctcccttcctgccctcccaccagcttcagatgatggggctgctccagaggacgctgacagcccacaggctgtggatgtgatcccggtggacatgatctcactagccaagcagatcatcgaagccacaccggagcggattaaacgagaggacttcgtggggctgcccgaggctggagcctcaatgcgggagcggacaggggctgtggggctcagtgagaccatgtcctggctggccagctacctggagaatgtggaccatttccccagctcaacccctcccagcgaactgccctttgagcgaggtcgcctggctgtcccttcagcaccctcctgggcagagtttctctctgcatccaccagtggcaagatggaaagtgattttgccctgctgacactatcagatcacgagcagcgggaactgtatgaggctgcccgagtcatccagacggccttccgaaagtacaagggccggcggctgaaggagcagcaggaggtagcagcagctgtaatccagcgctgttaccggaagtacaagcagctgacctggattgcacttaagtttgcactctataagaagatgacccaggcggccatcctgatccagagcaagttccgaagctactatgaacagaagcgatttcagcagagccgccgagcggctgtgctcatccagcagcactaccgctcctaccgccgcaggcccggccctccccaccggacttcggccaccctgcctgcccgcaacaaaggctcctttctcaccaagaagcaggaccaggcagcccggaagatcatgagattcctgcggcgctgccgacacaggatgagggaactgaagcagaaccaggagctggaagggcttccccagccgggactggccacatagtaatgaactagtccgtaacttgaaagtatttcgatttcttggctttatatatcttgtggaaaggacgacctgcgagcaaatgataggcgcta

SEQ ID NO: 338 - DNA, 3710 bp, Homo sapiens
  source 1..3710: mol_type = genomic DNA
accgccaccatgaataccaaggacaccaccgaggttgctgaaaacagccaccacctgaagatctttctccccaagaagctgctggagtgtcttcctcgctgcccgctgctgcctccagagaggctacggtggaatacaaatgaggagattgcatcctacctgatcacctttgagaagcatgatgagtggctgtcttgtgccccaaagacaaggcctcagaatggctccatcatcctctacaatcgcaagaaggtgaaatatcggaaggatggttacctctggaagaagcggaaggatgggaagaccacccgagaggaccacatgaagctgaaggtccagggcatggagtgtctctatggctgctacgttcactcttccatcgtccccacattccatcggcgctgctactggctgctccagaaccctgacatcgtccttgtgcactacctgaacgtcccagccctggaggactgtggaaagggctgcagccccatcttttgttccatcagcagcgaccgtcgagagtggctgaagtggtcccgggaggagttgttgggacagctgaagcccatgtttcatggcatcaagtggagctgcgggaatggaacagaagagttctctgtagaacacctggtgcagcagattttggacacccacccaaccaagcctgctccccgaacccacgcctgtctctgcagtggggggcttggttctgggagccttacccacaaatgcagcagcacgaaacaccgcatcatctctcccaaagtggagccccgagctttaaccctgacctctatcccccacgctcaccccccagagcctcctccactgatagccccacttcccccagagctccccaaggcacacacctccccatcttcttcctcttcttcctcctcatcaggttttgcagagcccctagaaatcagacctagccctcccacttctcgagggggttcttcaagaggaggcactgctatcctcctcctgacaggactggagcagcgggctggaggcttgacgcccaccaggcacttggctccacaggctgatcctaggccttccatgagtttggcagtggttgtaggcactgagccttctgccccaccagctcctcccagtcctgcctttgaccctgatcgttttctcaacagcccccagaggggccagacatatggaggggggcagggagtaagcccagacttccccgaggcagaggccgctcataccccctgttctgccctagagcctgctgctgccctggagccccaggcagctgctcggggtcccccaccacagtcagtagcaggtgggagaagaggaaactgcttcttcatccaagatgatgacagtggggaggagctcaagggtcacggggctgccccacccataccttcaccccctccctcacccccaccctcacctgcccccttggagccgtcaagcagggtaggaagaggagaggccttgtttggaggacctgttggggccagtgaactggagcccttcagtctttcatcattcccagaccttatgggagaactcatcagtgacgaagctccaagcatccctgctccgaccccccagctgtctcctgctcttagcaccatcacagacttctccccagagtggtcctacccagagggtggggtcaaggtgctcatcacaggtccttggaccgaagccgccgagcattactcctgtgtctttgatcacatcgcagtgccagcctcacttgtccagcctggtgtcttacgctgctactgtcccgcccatgaggtagggctggtgtctttgcaggtggcagggcgggaggggcccctttctgcttctgtgctctttgagtatcgagcccgccgattcctgtctctgcctagtactcaacttgactggctgtcactggacgacaaccagttccggatgtccatactagagcgactggagcagatggagaagcggatggcagagatcgcagcagctgggcaggtgccttgccagggtcctgatgctcctccagttcaggatgaaggccaggggcctgggttcgaagcacgggtagtggtcttggtagaaagcatgatcccacgctccacctggaagggtcctgaacgtctggcccatggaagccccttccggggcatgagccttctgcacctggctgctgcccagggctatgcccgcctcatcgagaccctgagccagtggcggagtgtggagactggaagcttggacttagagcaggaggttgacccgctcaacgtggatcatttctcttgcacccctctgatgtgggcttgtgccctgggacacctggaagctgctgtgctccttttccgttggaaccgacaggcactgagcattcccgactctctgggccgtctgccattgtctgtggctcattcccggggtcatgtgcgccttgcccgctgccttgaggaactacagagacaggagccttcggtggagcccccatttgccctatcgccaccctcctccagcccagacactggtctgagcagcgtctcctcgccctcggagctgtcggatggcaccttttccgtcacgtcagcctattctagtgccccagatggcagtcccccccctgcacctctgccagcctctgagatgactatggaggacatggccccaggccagctttcctctggtgtcccagaagcccccctactcctcatggactatgaggctaccaactccaaggggcccctctcctcccttcctgccctcccaccagcttcagatgatggggctgctccagaggacgctgacagcccacaggctgtggatgtgatcccggtggacatgatctcactagccaagcagatcatcgaagccacaccggagcggattaaacgagaggacttcgtggggctgcccgaggctggagcctcaatgcgggagcggacaggggctgtggggctcagtgagaccatgtcctggctggccagctacctggagaatgtggaccatttccccagctcaacccctcccagcgaactgccctttgagcgaggtcgcctggctgtcccttcagcaccctcctgggcagagtttctctctgcatccaccagtggcaagatggaaagtgattttgccctgctgacactatcagatcacgagcagcgggaactgtatgaggctgcccgagtcatccagacggccttccgaaagtacaagggccggcggctgaaggagcagcaggaggtagcagcagctgtaatccagcgctgttaccggaagtacaagcagctgacctggattgcacttaagtttgcactctataagaagatgacccaggcggccatcctgatccagagcaagttccgaagctactatgaacagaagcgatttcagcagagccgccgagcggctgtgctcatccagcagcactaccgctcctaccgccgcaggcccggccctccccaccggacttcggccaccctgcctgcccgcaacaaaggctcctttctcaccaagaagcaggaccaggcagcccggaagatcatgagattcctgcggcgctgccgacacaggatgagggaactgaagcagaaccaggagctggaagggcttccccagccgggactggccacatagtaatgaactagtccgtaacttgaaagtatttcgatttcttggctttatatatcttgtggaaaggacgaggtataggccttcaaacgctagcc

SEQ ID NO: 339 - DNA, 3707 bp, Homo sapiens
  source 1..3707: mol_type = genomic DNA
accgccaccatgggcacagactccccctccccccggcccctcaggccgggggtgaccttgccccctggagccctcaccatgaataccaaggacaccaccgaggttgctgaaaacagccaccacctgaagatctttctccccaagaagctgctggagtgtcttcctcgctgcccgctgctgcctccagagaggctacggtggaatacaaatgaggagattgcatcctacctgatcacctttgagaagcatgatgagtggctgtcttgtgccccaaagacaaggcctcagaatggctccatcatcctctacaatcgcaagaaggtgaaatatcggaaggatggttacctctggaagaagcggaaggatgggaagaccacccgagaggaccacatgaagctgaaggtccagggcatggagaaccctgacatcgtccttgtgcactacctgaacgtcccagccctggaggactgtggaaagggctgcagccccatcttttgttccatcagcagcgaccgtcgagagtggctgaagtggtcccgggaggagttgttgggacagctgaagcccatgtttcatggcatcaagtggagctgcgggaatggaacagaagagttctctgtagaacacctggtgcagcagattttggacacccacccaaccaagcctgctccccgaacccacgcctgtctctgcagtggggggcttggttctgggagccttacccacaaatgcagcagcacgaaacaccgcatcatctctcccaaagtggagccccgagctttaaccctgacctctatcccccacgctcaccccccagagcctcctccactgatagccccacttcccccagagctccccaaggcacacacctccccatcttcttcctcttcttcctcctcatcaggttttgcagagcccctagaaatcagacctagccctcccacttctcgagggggttcttcaagaggaggcactgctatcctcctcctgacaggactggagcagcgggctggaggcttgacgcccaccaggcacttggctccacaggctgatcctaggccttccatgagtttggcagtggttgtaggcactgagccttctgccccaccagctcctcccagtcctgcctttgaccctgatcgttttctcaacagcccccagaggggccagacatatggaggggggcagggagtaagcccagacttccccgaggcagaggccgctcataccccctgttctgccctagagcctgctgctgccctggagccccaggcagctgctcggggtcccccaccacagtcagtagcaggtgggagaagaggaaactgcttcttcatccaagatgatgacagtggggaggagctcaagggtcacggggctgccccacccataccttcaccccctccctcacccccaccctcacctgcccccttggagccgtcaagcagggtaggaagaggagaggccttgtttggaggacctgttggggccagtgaactggagcccttcagtctttcatcattcccagaccttatgggagaactcatcagtgacgaagctccaagcatccctgctccgaccccccagctgtctcctgctcttagcaccatcacagacttctccccagagtggtcctacccagagggtggggtcaaggtgctcatcacaggtccttggaccgaagccgccgagcattactcctgtgtctttgatcacatcgcagtgccagcctcacttgtccagcctggtgtcttacgctgctactgtcccgcccatgaggtagggctggtgtctttgcaggtggcagggcgggaggggcccctttctgcttctgtgctctttgagtatcgagcccgccgattcctgtctctgcctagtactcaacttgactggctgtcactggacgacaaccagttccggatgtccatactagagcgactggagcagatggagaagcggatggcagagatcgcagcagctgggcaggtgccttgccagggtcctgatgctcctccagttcaggatgaaggccaggggcctgggttcgaagcacgggtagtggtcttggtagaaagcatgatcccacgctccacctggaagggtcctgaacgtctggcccatggaagccccttccggggcatgagccttctgcacctggctgctgcccagggctatgcccgcctcatcgagaccctgagccagtggcggagtgtggagactggaagcttggacttagagcaggaggttgacccgctcaacgtggatcatttctcttgcacccctctgatgtgggcttgtgccctgggacacctggaagctgctgtgctccttttccgttggaaccgacaggcactgagcattcccgactctctgggccgtctgccattgtctgtggctcattcccggggtcatgtgcgccttgcccgctgccttgaggaactacagagacaggagccttcggtggagcccccatttgccctatcgccaccctcctccagcccagacactggtctgagcagcgtctcctcgccctcggagctgtcggatggcaccttttccgtcacgtcagcctattctagtgccccagatggcagtcccccccctgcacctctgccagcctctgagatgactatggaggacatggccccaggccagctttcctctggtgtcccagaagcccccctactcctcatggactatgaggctaccaactccaaggggcccctctcctcccttcctgccctcccaccagcttcagatgatggggctgctccagaggacgctgacagcccacaggctgtggatgtgatcccggtggacatgatctcactagccaagcagatcatcgaagccacaccggagcggattaaacgagaggacttcgtggggctgcccgaggctggagcctcaatgcgggagcggacaggggctgtggggctcagtgagaccatgtcctggctggccagctacctggagaatgtggaccatttccccagctcaacccctcccagcgaactgccctttgagcgaggtcgcctggctgtcccttcagcaccctcctgggcagagtttctctctgcatccaccagtggcaagatggaaagtgattttgccctgctgacactatcagatcacgagcagcgggaactgtatgaggctgcccgagtcatccagacggccttccgaaagtacaagggccggcggctgaaggagcagcaggaggtagcagcagctgtaatccagcgctgttaccggaagtacaagcagctgacctggattgcacttaagtttgcactctataagaagatgacccaggcggccatcctgatccagagcaagttccgaagctactatgaacagaagcgatttcagcagagccgccgagcggctgtgctcatccagcagcactaccgctcctaccgccgcaggcccggccctccccaccggacttcggccaccctgcctgcccgcaacaaaggctcctttctcaccaagaagcaggaccaggcagcccggaagatcatgagattcctgcggcgctgccgacacaggatgagggaactgaagcagaaccaggagctggaagggcttccccagccgggactggccacatagtaatgaactagtccgtaacttgaaagtatttcgatttcttggctttatatatcttgtggaaaggacgaggtattcactcacgcgtcgtttga

SEQ ID NO: 340 - DNA, 1667 bp, Homo sapiens
  source 1..1667: mol_type = genomic DNA
accgccaccatggaggccaactggaccgcgttcctgttccaggcccatgaagcttcccatcaccaacagcaggcagcacagaacagcttgctgcccctcctgagctctgccgtggagccccctgatcagaaaccattgcttccaataccaataactcagaaacctcagggtgcaccagaaacattaaaggatgccattgggattaaaaaagaaaaacccaaaacttcatttgtgtgcacttactgcagtaaagctttcagggacagctatcacctgaggcgccacgaatcctgccacacagggatcaagttggtgtcccggccaaagaaaacccccaccacggtggttccccttatctctaccatcgctggggacagcagccgaacttcgttggtctcgaccattgcaggcatcttgtcaacagtcactacatcttcctcgggcaccaaccccagtagcagtgccagcaccacagctatgccagtgacccagtctgtcaagaaacccagtaagcctgtcaagaagaaccatgcttgtgagatgtgtgggaaggccttccgagatgtgtaccatctcaatcgacacaagctctcccattcagatgagaaaccctttgagtgtcctatttgtaatcagcgcttcaagaggaaggaccggatgacttaccatgtgaggtctcatgaaggaggcatcaccaaaccctatacttgcagtgtttgtgggaaaggcttctcaaggcctgaccacttaagctgtcatgtaaaacatgtccattcaacagaaagacccttcaaatgccaaacgtgcactgctgcctttgccaccaaagacagactgcggacacacatggtgcgccatgaaggcaaggtatcatgtaacatctgtgggaagctcctgagtgcagcatacatcaccagccacttaaagactcatgggcagagccaaagtatcaactgtaatacatgtaaacaaggcatcagtaaaacatgcatgagtgaagagaccagtaaccaaaagcagcagcagcagcagcagcagcagcagcagcagcagcaacaacaacaacaacaacatgtgacaagctggccagggaagcaagtagaaacactgagactgtgggaagaagctgttaaagcaaggaagaaagaagctgctaacctgtgccaaacctccacggctgctacgacacctgtgactctcactactccattcagtataacatcctctgtgtcgtctgggactatgtcaaacccagtcacagtggcagctgcaatgagcatgagaagtccagtaaatgtttcaagtgcagttaacataaccagcccaatgaacatagggcatcctgtaactataaccagtccattatccatgacctctcctttaacactcactaccccagtcaacctccccacccccgtcactgccccagtgaatatagcacaccctgtcaccatcacatctccaatgaatctacccacacctatgacattagccgcccctctcaatatagcaatgagacctgtagagagcatgcctttcttgccccaagctttgcctacatcaccgccttggtagtaatgaactagtccgtaacttgaaagtatttcgatttcttggctttatatatcttgtggaaaggacgaacactatcttgccggattctccgg

SEQ ID NO: 341 - DNA, 1640 bp, Homo sapiens
  source 1..1640: mol_type = genomic DNA
accgccaccatggcagcccatgaagcttcccatcaccaacagcaggcagcacagaacagcttgctgcccctcctgagctctgccgtggagccccctgatcagaaaccattgcttccaataccaataactcagaaacctcagggtgcaccagaaacattaaaggatgccattgggattaaaaaagaaaaacccaaaacttcatttgtgtgcacttactgcagtaaagctttcagggacagctatcacctgaggcgccacgaatcctgccacacagggatcaagttggtgtcccggccaaagaaaacccccaccacggtggttccccttatctctaccatcgctggggacagcagccgaacttcgttggtctcgaccattgcaggcatcttgtcaacagtcactacatcttcctcgggcaccaaccccagtagcagtgccagcaccacagctatgccagtgacccagtctgtcaagaaacccagtaagcctgtcaagaagaaccatgcttgtgagatgtgtgggaaggccttccgagatgtgtaccatctcaatcgacacaagctctcccattcagatgagaaaccctttgagtgtcctatttgtaatcagcgcttcaagaggaaggaccggatgacttaccatgtgaggtctcatgaaggaggcatcaccaaaccctatacttgcagtgtttgtgggaaaggcttctcaaggcctgaccacttaagctgtcatgtaaaacatgtccattcaacagaaagacccttcaaatgccaaacgtgcactgctgcctttgccaccaaagacagactgcggacacacatggtgcgccatgaaggcaaggtatcatgtaacatctgtgggaagctcctgagtgcagcatacatcaccagccacttaaagactcatgggcagagccaaagtatcaactgtaatacatgtaaacaaggcatcagtaaaacatgcatgagtgaagagaccagtaaccaaaagcagcagcagcagcagcagcagcagcagcagcagcagcaacaacaacaacaacaacatgtgacaagctggccagggaagcaagtagaaacactgagactgtgggaagaagctgttaaagcaaggaagaaagaagctgctaacctgtgccaaacctccacggctgctacgacacctgtgactctcactactccattcagtataacatcctctgtgtcgtctgggactatgtcaaacccagtcacagtggcagctgcaatgagcatgagaagtccagtaaatgtttcaagtgcagttaacataaccagcccaatgaacatagggcatcctgtaactataaccagtccattatccatgacctctcctttaacactcactaccccagtcaacctccccacccccgtcactgccccagtgaatatagcacaccctgtcaccatcacatctccaatgaatctacccacacctatgacattagccgcccctctcaatatagcaatgagacctgtagagagcatgcctttcttgccccaagctttgcctacatcaccgccttggtagtaatgaactagtccgtaacttgaaagtatttcgatttcttggctttatatatcttgtggaaaggacgaatcactagttccttgcgatgcatg

SEQ ID NO: 342 - DNA, 407 bp, Homo sapiens
  source 1..407: mol_type = genomic DNA
accgccaccatgtggcgcgcggaggggaaatggctgccgaaaacaagccggaagagcgtttcccaaagtgtattctgcggaactagcacctactgtgttctcaacaccgtgccacctatagaagatgatcatgggaacagcaatagtagtcatgtaaaaatctttttaccgaaaaagctgcttgaatgtctgccgaaatgttcaagtttaccaaaagagaggcaccgctggaacactaatgaggctctcaccacacacttgttcatgggcgcagcaaagaagagggatccacagagctggagccatgagggctagtaatgaactagtccgtaacttgaaagtatttcgatttcttggctttatatatcttgtggaaaggacgagtttagaagcctagcgatttgagt

SEQ ID NO: 343 - DNA, 5123 bp, Homo sapiens
  source 1..5123: mol_type = genomic DNA
accgccaccatgtggcgcgcggaggggaaatggctgccgaaaacaagccggaagagcgtttcccaaagtgtattctgcggaactagcacctactgtgttctcaacaccgtgccacctatagaagatgatcatgggaacagcaatagtagtcatgtaaaaatctttttaccgaaaaagctgcttgaatgtctgccgaaatgttcaagtttaccaaaagagaggcaccgctggaacactaatgaggaaattgcagcttatttaataacatttgagaaacacgaagaatggctaaccacctcccctaagacaagaccacagaatggctcaatgatactctacaacaggaagaaagtgaaatacaggaaagatgggtattgctggaaaaagaggaaagatgggaaaacgaccagagaggaccacatgaaactcaaggtccagggagtggagtgcttgtacggctgctatgtccattcctccatcatccccaccttccaccggaggtgctactggctccttcagaaccccgacatcgtcctggtgcactacctgaacgtgccggccatcgaggactgcggcaagccttgcggccccatcctctgctccatcaacaccgacaagaaggagtgggcgaaatggacgaaagaagagctcatcgggcagctgaaacccatgttccatggcatcaagtggacctgcagcaatgggaacagcagctcaggcttctcggtggaacagctggtgcagcagatcctcgacagccaccagaccaagccccagccgcggacccacaactgcctctgcaccggcagcctgggagctggcggcagcgtgcatcacaagtgtaacagcgccaaacaccgcatcatctcgcccaaggtggagccacggacaggggggtacgggagccactcggaggtgcagcacaatgacgtgtcggagggcaagcacgagcacagccacagcaagggctccagccgtgagaagaggaacggcaaggtggccaagcccgtgctcctgcaccagagcagcaccgaggtctcctccaccaaccaggtggaagtccccgacaccacccagagctcccctgtgtccatcagcagcgggctcaacagcgacccggacatggtggacagcccggtggtcacaggtgtgtccggtatggcggtggcctctgtgatggggagcttgtcccagagcgccacggtgttcatgtcagaggtcaccaatgaggccgtgtacaccatgtcccccaccgctggccccaaccaccacctcctctcacctgacgcctctcagggcctcgtcctggccgtgagctctgatggccacaagttcgcctttcccaccacgggcagctcggagagcctgtccatgctgcccaccaacgtgtccgaagagctggtcctctccaccaccctcgacggtggccggaagattccagaaaccaccatgaactttgaccccgactgtttccttaataacccaaagcagggccagacgtacgggggtggaggcctgaaagccgagatggtcagctccaacatccggcactcgccacccggggagcggagcttcagctttaccaccgtcctcaccaaggagatcaagaccgaggacacctccttcgagcagcagatggccaaagaagcgtactcctcctccgcggcggctgtggcagccagctccctcaccctgaccgccggctccagcctcctgccgtcgggcggcggcctgagtcccagcaccaccctggagcagatggacttcagcgccatcgactccaacaaggactacacgtccagcttcagccagacgggccacagcccccacatccaccagaccccctccccgagcttcttcctgcaggacgccagcaaacccctccccgtcgagcagaacacccacagcagcctgagtgactctgggggcaccttcgtgatgcccacggtgaaaacggaggcctcgtcccaaaccagctcctgcagcggtcacgtggagacgcggatcgagtccacttcctccctccacctcatgcagttccaggccaacttccaggccatgacggcagaaggggaggtcaccatggagacctcgcaggcggcggaagggagcgaggtcctgctcaagtctggggagctgcaggcttgcagctctgagcactacctgcagccggagaccaacggggtaatccgaagcgccggcggcgtccccatcctcccgggcaacgtggtgcagggactctaccccgtggcccagcccagcctcggcaacgcctccaacatggagctcagcctggaccactttgacatctccttcagcaaccagttctccgacctgatcaacgacttcatctccgtggaggggggcagcagcaccatctatgggcaccagctggtgtcgggggacagcacggcgctctcacagtcagaggacggggcgcgggcccccttcacccaggcagagatgtgcctcccctgctgtagcccccagcagggtagcctgcagctgagcagctcggagggcggggccagcaccatggcctacatgcacgtcgccgaggtggtctcggccgcctcggcccagggcaccctaggcatgctgcagcagagcggacgggtgttcatggtgaccgactactccccagagtggtcttacccagagggaggagtgaaggtcctcatcacaggcccgtggcaagaagccagcaataactacagctgcctgtttgaccagatctcagtgcctgcatccctgattcagcctggggtgctgcgctgctactgcccagcccatgacactggtcttgtgaccctacaagttgccttcaacaaccagatcatctccaactcggtggtgtttgagtacaaagcccgggctctgcccacgctcccttcctcccagcacgactggctgtcgttggacgataaccagttcaggatgtccatcctggaacgactggagcagatggagaggaggatggccgagatgacggggtcccagcagcacaaacaggcgagcggaggcggcagcagtggaggcggcagcgggagcgggaatggagggagccaggcacagtgtgcttctgggactggggccttggggagctgctttgagagccgtgtggtcgtggtatgcgagaagatgatgagccgagcctgctgggcgaagtccaagcacttgatccactcaaagactttccgcggaatgaccctactccacctggccgctgcccagggctatgccaccctaatccagaccctcatcaaatggcgtacaaagcacgcggatagcattgacctggaactggaagttgaccccttgaatgtggaccacttctcctgtactcctctgatgtgggcgtgtgccctagggcacttggaagctgccgtcgtgctgtacaagtgggaccgtcgggccatctcgattcccgactctctaggaaggctgcctttgggaattgccaggtcacggggtcatgtgaaattagcagagtgtctggagcacctgcagagagatgagcaggctcagctgggacagaaccccagaatccactgtcctgcaagcgaagagcccagcacagagagctggatggcccagtggcacagcgaagccatcagctctccagaaatacccaagggagtcactgttattgcaagcaccaacccagagctgagaagacctcgttctgaaccctctaattactacagcagtgagagccacaaagattatccggctcccaaaaagcataaattgaaccctgagtacttccagacaaggcaggagaagctgcttcccactgcactgagtctggaagagccaaatatcaggaagcaaagccctagttctaagcagtctgtccccgagacactcagccccagtgaaggagtgagggacttcagccgggaactctcccctcccactccagagactgcagcatttcaagcctctggatctcagcctgtaggaaagtggaattccaaagatctttacattggtgtgtctacagtacaggtgactggaaatccgaaggggaccagtgtaggaaaggaggcagcaccttcacaggtgcgtccacgggaaccaatgagtgtcctgatgatggctaacagagaggtggtgaatacagagctggggtcctaccgtgatagtgcagaaaatgaagaatgcggccagcccatggatgacatacaggtgaacatgatgaccttggcagaacacattattgaagccacacctgaccgaatcaagcaggagaattttgtgcccatggagtcctcaggattggaaagaacagaccctgccaccattagcagtacaatgagctggctggccagttatctagcggatgctgactgccttcccagtgctgcccagatccgaagtgcatataacgagcctctaaccccttcttctaataccagcttgagccctgttggctctcccgtcagtgaaatcgctttcgagaaacctaaccttccctccgccgcggattggtcagaattcctgagtgcatctaccagtgagaaggtagagaatgagtttgctcagctcactctgtctgatcatgaacagagagaactctatgaggctgccaggcttgtccagacagctttccggaaatacaagggccgacccttgcgggaacagcaagaagtagctgctgctgttattcagcgttgttacagaaaatataaacagtacgcactttataaaaagatgacacaggctgccatccttatccagagcaaattccgaagttactatgaacaaaaaaaattccagcagagccgacgggctgctgtgctcatccaaaagtactaccgaagttataagaaatgtggcaaaagacggcaggctcgccggacggctgtgattgtacaacagaaactcaggagcagtttgctaaccaaaaagcaggatcaagctgctcgaaaaataatgaggtttcttcgccgctgtcgccacagccccctggtggaccataggctgtacaaaaggagtgaaagaattgaaaaaggccaaggaacttagtaatgaactagtccgtaacttgaaagtatttcgatttcttggctttatatatcttgtggaaaggacgacctgtcaagggccgcccgcctaat

SEQ ID NO: 344 - DNA, 344 bp, Homo sapiens
  source 1..344: mol_type = genomic DNA
accgccaccatgtggcgcgcggaggggaaatggctgccgaaaacaagccggaagagcgtttcccaaagtgtattctgcggaactagcacctactgtgttctcaacaccgtgccacctatagaagatgatcatgggaacagcaatagtagtcatgtaaaaatctttttaccgaaaaagctgcttgaatgtctgccgaaatgttcaagtttaccaaaagagaggcaccgctggaacactaatgagagatcatagtaatgaactagtccgtaacttgaaagtatttcgatttcttggctttatatatcttgtggaaaggacgatttgaagaacgtctgaacagcggt

SEQ ID NO: 345 - DNA, 2135 bp, Homo sapiens
  source 1..2135: mol_type = genomic DNA
accgccaccatgcatcaccaacagcgaatggctgccttagggacggacaaagagctgagtgatttactggatttcagtgcgatgttttcacctcctgtgagcagtgggaaaaatggaccaacttctttggcaagtggacattttactggctcaaatgtagaagacagaagtagctcagggtcctgggggaatggaggacatccaagcccgtccaggaactatggagatgggactccctatgaccacatgaccagcagggaccttgggtcacatgacaatctctctccaccttttgtcaattccagaatacaaagtaaaacagaaaggggctcatactcatcttatgggagagaatcaaacttacagggttgccaccagcagagtctccttggaggtgacatggatatgggcaacccaggaaccctttcgcccaccaaacctggttcccagtactatcagtattctagcaataatccccgaaggaggcctcttcacagtagtgccatggaggtacagacaaagaaagttcgaaaagttcctccaggtttgccatcttcattggttctttctcctcaggtctatgctccatcagcaagcactgccgactacaatagggactcgccaggctatccttcctccaaaccagcaaccagcactttccctagctccttcttcatgcaagatggccatcacagcagtgacccttggagctcctccagtgggatgaatcagcctggctatgcaggaatgttgggcaactcttctcatattccacagtccagcagctactgtagcctgcatccacatgaacgtttgagctatccatcacactcctcagcagacatcaattccagtcttcctccgatgtccactttccatcgtagtggtacaaaccattacagcacctcttcctgtacgcctcctgccaacgggacagacagtataatggcaaatagaggaagcggggcagccggcagctcccagactggagatgctctggggaaagcacttgcttcgatctattctccagatcacactaacaacagcttttcatcaaacccttcaactcctgttggctctcctccatctctctcagcaggcacagctgtttggtctagaaatggaggacaggcctcatcgtctcctaattatgaaggacccttacactctttgcaaagccgaattgaagatcgtttagaaagactggatgatgctattcatgttctccggaaccatgcagtgggcccatccacagctatgcctggtggtcatggggacatgcatggaatcattggaccttctcataatggagccatgggtggtctgggctcagggtatggaaccggccttctttcagccaacagacattcactcatggtggggacccatcgtgaagatggcgtggccctgagaggcagccattctcttctgccaaaccaggttccggttccacagcttcctgtccagtctgcgacttcccctgacctgaacccaccccaggacccttacagaggcatgccaccaggactacaggggcagagtgtctcctctggcagctctgagatcaaatccgatgacgagggtgatgagaacctgcaagacacgaaatcttcggaggacaagaaattagatgacgacaagaaggatatcaaatcaattactaggtcaagatctagcaataatgacgatgaggacctgacaccagagcagaaggcagagcgtgagaaggagcggaggatggccaacaatgcccgagagcgtctgcgggtccgtgacatcaacgaggctttcaaagagctcggccgcatggtgcagctccacctcaagagtgacaagccccagaccaagctcctgatcctccaccaggcggtggccgtcatcctcagtctggagcagcaagtccgagaaaggaatctgaatccgaaagctgcgtgtctgaaaagaagggaggaagagaaggtgtcctcagagcctccccctctctccttggccggcccacaccctggaatgggagacgcatcgaatcacatgggacagatgtagtaatgaactagtccgtaacttgaaagtatttcgatttcttggctttatatatcttgtggaaaggacgatcttcacatgcccggagagactca

SEQ ID NO: 346 - DNA, 1715 bp, Homo sapiens
  source 1..1715: mol_type = genomic DNA
accgccaccatggatatgggcaacccaggaaccctttcgcccaccaaacctggttcccagtactatcagtattctagcaataatccccgaaggaggcctcttcacagtagtgccatggaggtacagacaaagaaagttcgaaaagttcctccaggtttgccatcttcagtctatgctccatcagcaagcactgccgactacaatagggactcgccaggctatccttcctccaaaccagcaaccagcactttccctagctccttcttcatgcaagatggccatcacagcagtgacccttggagctcctccagtgggatgaatcagcctggctatgcaggaatgttgggcaactcttctcatattccacagtccagcagctactgtagcctgcatccacatgaacgtttgagctatccatcacactcctcagcagacatcaattccagtcttcctccgatgtccactttccatcgtagtggtacaaaccattacagcacctcttcctgtacgcctcctgccaacgggacagacagtataatggcaaatagaggaagcggggcagccggcagctcccagactggagatgctctggggaaagcacttgcttcgatctattctccagatcacactaacaacagcttttcatcaaacccttcaactcctgttggctctcctccatctctctcagcaggcacagctgtttggtctagaaatggaggacaggcctcatcgtctcctaattatgaaggacccttacactctttgcaaagccgaattgaagatcgtttagaaagactggatgatgctattcatgttctccggaaccatgcagtgggcccatccacagctatgcctggtggtcatggggacatgcatggaatcattggaccttctcataatggagccatgggtggtctgggctcagggtatggaaccggccttctttcagccaacagacattcactcatggtggggacccatcgtgaagatggcgtggccctgagaggcagccattctcttctgccaaaccaggttccggttccacagcttcctgtccagtctgcgacttcccctgacctgaacccaccccaggacccttacagaggcatgccaccaggactacaggggcagagtgtctcctctggcagctctgagatcaaatccgatgacgagggtgatgagaacctgcaagacacgaaatcttcggaggacaagaaattagatgacgacaagaaggatatcaaatcaattactagcaataatgacgatgaggacctgacaccagagcagaaggcagagcgtgagaaggagcggaggatggccaacaatgcccgagagcgtctgcgggtccgtgacatcaacgaggctttcaaagagctcggccgcatggtgcagctccacctcaagagtgacaagccccagaccaagctcctgatcctccaccaggcggtggccgtcatcctcagtctggagcagcaagtccgagaaaggaatctgaatccgaaagctgcgtgtctgaaaagaagggaggaagagaaggtgtcctcagagcctccccctctctccttggccggcccacaccctggaatgggagacgcatcgaatcacatgggacagatgtagtaatgaactagtccgtaacttgaaagtatttcgatttcttggctttatatatcttgtggaaaggacgaccacaagcaggcttagcgcgggca

SEQ ID NO: 347 - DNA, 1892 bp, Homo sapiens
  source 1..1892: mol_type = genomic DNA
accgccaccatgaaggatatttttttccagtttatcatagccagagtgaggaagtgttattccctctcttgcttgcatacattgccagtagtgcctactttacgtaaaacagaaaggggctcatactcatcttatgggagagaatcaaacttacagggttgccaccagagtctccttggaggtgacatggatatgggcaacccaggaaccctttcgcccaccaaacctggttcccagtactatcagtattctagcaataatccccgaaggaggcctcttcacagtagtgccatggaggtacagacaaagaaagttcgaaaagttcctccaggtttgccatcttcagtctatgctccatcagcaagcactgccgactacaatagggactcgccaggctatccttcctccaaaccagcaaccagcactttccctagctccttcttcatgcaagatggccatcacagcagtgacccttggagctcctccagtgggatgaatcagcctggctatgcaggaatgttgggcaactcttctcatattccacagtccagcagctactgtagcctgcatccacatgaacgtttgagctatccatcacactcctcagcagacatcaattccagtcttcctccgatgtccactttccatcgtagtggtacaaaccattacagcacctcttcctgtacgcctcctgccaacgggacagacagtataatggcaaatagaggaagcggggcagccggcagctcccagactggagatgctctggggaaagcacttgcttcgatctattctccagatcacactaacaacagcttttcatcaaacccttcaactcctgttggctctcctccatctctctcagcaggcacagctgtttggtctagaaatggaggacaggcctcatcgtctcctaattatgaaggacccttacactctttgcaaagccgaattgaagatcgtttagaaagactggatgatgctattcatgttctccggaaccatgcagtgggcccatccacagctatgcctggtggtcatggggacatgcatggaatcattggaccttctcataatggagccatgggtggtctgggctcagggtatggaaccggccttctttcagccaacagacattcactcatggtggggacccatcgtgaagatggcgtggccctgagaggcagccattctcttctgccaaaccaggttccggttccacagcttcctgtccagtctgcgacttcccctgacctgaacccaccccaggacccttacagaggcatgccaccaggactacaggggcagagtgtctcctctggcagctctgagatcaaatccgatgacgagggtgatgagaacctgcaagacacgaaatcttcggaggacaagaaattagatgacgacaagaaggatatcaaatcaattactagcaataatgacgatgaggacctgacaccagagcagaaggcagagcgtgagaaggagcggaggatggccaacaatgcccgagagcgtctgcgggtccgtgacatcaacgaggctttcaaagagctcggccgcatggtgcagctccacctcaagagtgacaagccccagaccaagctcctgatcctccaccaggcggtggccgtcatcctcagtctggagcagcaagtccgagaaaggaatctgaatccgaaagctgcgtgtctgaaaagaagggaggaagagaaggtgtcctcagagcctccccctctctccttggccggcccacaccctggaatgggagacgcatcgaatcacatgggacagatgtagtaatgaactagtccgtaacttgaaagtatttcgatttcttggctttatatatcttgtggaaaggacgagctctggccagtctgccacatgtg

SEQ ID NO: 348 - DNA, 2030 bp, Homo sapiens
  source 1..2030: mol_type = genomic DNA
accgccaccatgttttcacctcctgtgagcagtgggaaaaatggaccaacttctttggcaagtggacattttactggctcaaatgtagaagacagaagtagctcagggtcctgggggaatggaggacatccaagcccgtccaggaactatggagatgggactccctatgaccacatgaccagcagggaccttgggtcacatgacaatctctctccaccttttgtcaattccagaatacaaagtaaaacagaaaggggctcatactcatcttatgggagagaatcaaacttacagggttgccaccagagtctccttggaggtgacatggatatgggcaacccaggaaccctttcgcccaccaaacctggttcccagtactatcagtattctagcaataatccccgaaggaggcctcttcacagtagtgccatggaggtacagacaaagaaagttcgaaaagttcctccaggtttgccatcttcagtctatgctccatcagcaagcactgccgactacaatagggactcgccaggctatccttcctccaaaccagcaaccagcactttccctagctccttcttcatgcaagatggccatcacagcagtgacccttggagctcctccagtgggatgaatcagcctggctatgcaggaatgttgggcaactcttctcatattccacagtccagcagctactgtagcctgcatccacatgaacgtttgagctatccatcacactcctcagcagacatcaattccagtcttcctccgatgtccactttccatcgtagtggtacaaaccattacagcacctcttcctgtacgcctcctgccaacgggacagacagtataatggcaaatagaggaagcggggcagccggcagctcccagactggagatgctctggggaaagcacttgcttcgatctattctccagatcacactaacaacagcttttcatcaaacccttcaactcctgttggctctcctccatctctctcagcaggcacagctgtttggtctagaaatggaggacaggcctcatcgtctcctaattatgaaggacccttacactctttgcaaagccgaattgaagatcgtttagaaagactggatgatgctattcatgttctccggaaccatgcagtgggcccatccacagctatgcctggtggtcatggggacatgcatggaatcattggaccttctcataatggagccatgggtggtctgggctcagggtatggaaccggccttctttcagccaacagacattcactcatggtggggacccatcgtgaagatggcgtggccctgagaggcagccattctcttctgccaaaccaggttccggttccacagcttcctgtccagtctgcgacttcccctgacctgaacccaccccaggacccttacagaggcatgccaccaggactacaggggcagagtgtctcctctggcagctctgagatcaaatccgatgacgagggtgatgagaacctgcaagacacgaaatcttcggaggacaagaaattagatgacgacaagaaggatatcaaatcaattactagcaataatgacgatgaggacctgacaccagagcagaaggcagagcgtgagaaggagcggaggatggccaacaatgcccgagagcgtctgcgggtccgtgacatcaacgaggctttcaaagagctcggccgcatggtgcagctccacctcaagagtgacaagccccagaccaagctcctgatcctccaccaggcggtggccgtcatcctcagtctggagcagcaagtccgagaaaggaatctgaatccgaaagctgcgtgtctgaaaagaagggaggaagagaaggtgtcctcagagcctccccctctctccttggccggcccacaccctggaatgggagacgcatcgaatcacatgggacagatgtagtaatgaactagtccgtaacttgaaagtatttcgatttcttggctttatatatcttgtggaaaggacgacgcctgctcgggcgtgtagtcgca

SEQ ID NO: 349 - DNA, 1625 bp, Homo sapiens
  source 1..1625: mol_type = genomic DNA
accgccaccatgaaatttaaacaatgcagatgctcagatacagggctatgttgcctggaccacgaagggaaagcagaggtctatgctccatcagcaagcactgccgactacaatagggactcgccaggctatccttcctccaaaccagcaaccagcactttccctagctccttcttcatgcaagatggccatcacagcagtgacccttggagctcctccagtgggatgaatcagcctggctatgcaggaatgttgggcaactcttctcatattccacagtccagcagctactgtagcctgcatccacatgaacgtttgagctatccatcacactcctcagcagacatcaattccagtcttcctccgatgtccactttccatcgtagtggtacaaaccattacagcacctcttcctgtacgcctcctgccaacgggacagacagtataatggcaaatagaggaagcggggcagccggcagctcccagactggagatgctctggggaaagcacttgcttcgatctattctccagatcacactaacaacagcttttcatcaaacccttcaactcctgttggctctcctccatctctctcagcaggcacagctgtttggtctagaaatggaggacaggcctcatcgtctcctaattatgaaggacccttacactctttgcaaagccgaattgaagatcgtttagaaagactggatgatgctattcatgttctccggaaccatgcagtgggcccatccacagctatgcctggtggtcatggggacatgcatggaatcattggaccttctcataatggagccatgggtggtctgggctcagggtatggaaccggccttctttcagccaacagacattcactcatggtggggacccatcgtgaagatggcgtggccctgagaggcagccattctcttctgccaaaccaggttccggttccacagcttcctgtccagtctgcgacttcccctgacctgaacccaccccaggacccttacagaggcatgccaccaggactacaggggcagagtgtctcctctggcagctctgagatcaaatccgatgacgagggtgatgagaacctgcaagacacgaaatcttcggaggacaagaaattagatgacgacaagaaggatatcaaatcaattactagcaataatgacgatgaggacctgacaccagagcagaaggcagagcgtgagaaggagcggaggatggccaacaatgcccgagagcgtctgcgggtccgtgacatcaacgaggctttcaaagagctcggccgcatggtgcagctccacctcaagagtgacaagccccagaccaagctcctgatcctccaccaggcggtggccgtcatcctcagtctggagcagcaagtccgagaaaggaatctgaatccgaaagctgcgtgtctgaaaagaagggaggaagagaaggtgtcctcagagcctccccctctctccttggccggcccacaccctggaatgggagacgcatcgaatcacatgggacagatgtagtaatgaactagtccgtaacttgaaagtatttcgatttcttggctttatatatcttgtggaaaggacgaccgcggtactgttgattgtctcga

SEQ ID NO: 350 - DNA, 2423 bp, Homo sapiens
  source 1..2423: mol_type = genomic DNA
accgccaccatgttttctaaaaggctggagaaaataccacaggtgcctctcctctttcccttcatcttcatcattttgacaaattactcaaagatggagggtgcagttgaaagccagccatcattttttaaaacttctcaggacattgtaacatgcacttgggttgagaactgctactcgagcttctccaggaggcccttggagcaaatgttttgtaaacaccaatctaagaacattatctcttggacgggcatggtggctcacacctgtaatcccagcactttgggaggccaaggtttgtgtgattttgctaaaatgcatcaccaacagcgaatggctgccttagggacggacaaagagctgagtgatttactggatttcagtgcgatgttttcacctcctgtgagcagtgggaaaaatggaccaacttctttggcaagtggacattttactggctcaaatgtagaagacagaagtagctcagggtcctgggggaatggaggacatccaagcccgtccaggaactatggagatgggactccctatgaccacatgaccagcagggaccttgggtcacatgacaatctctctccaccttttgtcaattccagaatacaaagtaaaacagaaaggggctcatactcatcttatgggagagaatcaaacttacagggttgccaccagcagagtctccttggaggtgacatggatatgggcaacccaggaaccctttcgcccaccaaacctggttcccagtactatcagtattctagcaataatccccgaaggaggcctcttcacagtagtgccatggaggtacagacaaagaaagttcgaaaagttcctccaggtttgccatcttcagtctatgctccatcagcaagcactgccgactacaatagggactcgccaggctatccttcctccaaaccagcaaccagcactttccctagctccttcttcatgcaagatggccatcacagcagtgacccttggagctcctccagtgggatgaatcagcctggctatgcaggaatgttgggcaactcttctcatattccacagtccagcagctactgtagcctgcatccacatgaacgtttgagctatccatcacactcctcagcagacatcaattccagtcttcctccgatgtccactttccatcgtagtggtacaaaccattacagcacctcttcctgtacgcctcctgccaacgggacagacagtataatggcaaatagaggaagcggggcagccggcagctcccagactggagatgctctggggaaagcacttgcttcgatctattctccagatcacactaacaacagcttttcatcaaacccttcaactcctgttggctctcctccatctctctcagcaggcacagctgtttggtctagaaatggaggacaggcctcatcgtctcctaattatgaaggacccttacactctttgcaaagccgaattgaagatcgtttagaaagactggatgatgctattcatgttctccggaaccatgcagtgggcccatccacagctatgcctggtggtcatggggacatgcatggaatcattggaccttctcataatggagccatgggtggtctgggctcagggtatggaaccggccttctttcagccaacagacattcactcatggtggggacccatcgtgaagatggcgtggccctgagaggcagccattctcttctgccaaaccaggttccggttccacagcttcctgtccagtctgcgacttcccctgacctgaacccaccccaggacccttacagaggcatgccaccaggactacaggggcagagtgtctcctctggcagctctgagatcaaatccgatgacgagggtgatgagaacctgcaagacacgaaatcttcggaggacaagaaattagatgacgacaagaaggatatcaaatcaattactaggtcaagatctagcaataatgacgatgaggacctgacaccagagcagaaggcagagcgtgagaaggagcggaggatggccaacaatgcccgagagcgtctgcgggtccgtgacatcaacgaggctttcaaagagctcggccgcatggtgcagctccacctcaagagtgacaagccccagaccaagctcctgatcctccaccaggcggtggccgtcatcctcagtctggagcagcaagtccgagaaaggaatctgaatccgaaagctgcgtgtctgaaaagaagggaggaagagaaggtgtcctcagagcctccccctctctccttggccggcccacaccctggaatgggagacgcatcgaatcacatgggacagatgtagtaatgaactagtccgtaacttgaaagtatttcgatttcttggctttatatatcttgtggaaaggacgaaacgagacacggtaaagtcgtctg

SEQ ID NO: 351 - DNA, 1637 bp, Homo sapiens
  source 1..1637: mol_type = genomic DNA
accgccaccatgtactgcgcatacacaatcccgggcatgggcggcaactctttgatgtactactataatgggaaagcggtctatgctccatcagcaagcactgccgactacaatagggactcgccaggctatccttcctccaaaccagcaaccagcactttccctagctccttcttcatgcaagatggccatcacagcagtgacccttggagctcctccagtgggatgaatcagcctggctatgcaggaatgttgggcaactcttctcatattccacagtccagcagctactgtagcctgcatccacatgaacgtttgagctatccatcacactcctcagcagacatcaattccagtcttcctccgatgtccactttccatcgtagtggtacaaaccattacagcacctcttcctgtacgcctcctgccaacgggacagacagtataatggcaaatagaggaagcggggcagccggcagctcccagactggagatgctctggggaaagcacttgcttcgatctattctccagatcacactaacaacagcttttcatcaaacccttcaactcctgttggctctcctccatctctctcagcaggcacagctgtttggtctagaaatggaggacaggcctcatcgtctcctaattatgaaggacccttacactctttgcaaagccgaattgaagatcgtttagaaagactggatgatgctattcatgttctccggaaccatgcagtgggcccatccacagctatgcctggtggtcatggggacatgcatggaatcattggaccttctcataatggagccatgggtggtctgggctcagggtatggaaccggccttctttcagccaacagacattcactcatggtggggacccatcgtgaagatggcgtggccctgagaggcagccattctcttctgccaaaccaggttccggttccacagcttcctgtccagtctgcgacttcccctgacctgaacccaccccaggacccttacagaggcatgccaccaggactacaggggcagagtgtctcctctggcagctctgagatcaaatccgatgacgagggtgatgagaacctgcaagacacgaaatcttcggaggacaagaaattagatgacgacaagaaggatatcaaatcaattactaggtcaagatctagcaataatgacgatgaggacctgacaccagagcagaaggcagagcgtgagaaggagcggaggatggccaacaatgcccgagagcgtctgcgggtccgtgacatcaacgaggctttcaaagagctcggccgcatggtgcagctccacctcaagagtgacaagccccagaccaagctcctgatcctccaccaggcggtggccgtcatcctcagtctggagcagcaagtccgagaaaggaatctgaatccgaaagctgcgtgtctgaaaagaagggaggaagagaaggtgtcctcagagcctccccctctctccttggccggcccacaccctggaatgggagacgcatcgaatcacatgggacagatgtagtaatgaactagtccgtaacttgaaagtatttcgatttcttggctttatatatcttgtggaaaggacgattctctatgagcgcagtggaccga

SEQ ID NO: 352 - DNA, 2033 bp, Homo sapiens
  source 1..2033: mol_type = genomic DNA
accgccaccatgttttcacctcctgtgagcagtgggaaaaatggaccaacttctttggcaagtggacattttactggctcaaatgtagaagacagaagtagctcagggtcctgggggaatggaggacatccaagcccgtccaggaactatggagatgggactccctatgaccacatgaccagcagggaccttgggtcacatgacaatctctctccaccttttgtcaattccagaatacaaagtaaaacagaaaggggctcatactcatcttatgggagagaatcaaacttacagggttgccaccagcagagtctccttggaggtgacatggatatgggcaacccaggaaccctttcgcccaccaaacctggttcccagtactatcagtattctagcaataatccccgaaggaggcctcttcacagtagtgccatggaggtacagacaaagaaagttcgaaaagttcctccaggtttgccatcttcagtctatgctccatcagcaagcactgccgactacaatagggactcgccaggctatccttcctccaaaccagcaaccagcactttccctagctccttcttcatgcaagatggccatcacagcagtgacccttggagctcctccagtgggatgaatcagcctggctatgcaggaatgttgggcaactcttctcatattccacagtccagcagctactgtagcctgcatccacatgaacgtttgagctatccatcacactcctcagcagacatcaattccagtcttcctccgatgtccactttccatcgtagtggtacaaaccattacagcacctcttcctgtacgcctcctgccaacgggacagacagtataatggcaaatagaggaagcggggcagccggcagctcccagactggagatgctctggggaaagcacttgcttcgatctattctccagatcacactaacaacagcttttcatcaaacccttcaactcctgttggctctcctccatctctctcagcaggcacagctgtttggtctagaaatggaggacaggcctcatcgtctcctaattatgaaggacccttacactctttgcaaagccgaattgaagatcgtttagaaagactggatgatgctattcatgttctccggaaccatgcagtgggcccatccacagctatgcctggtggtcatggggacatgcatggaatcattggaccttctcataatggagccatgggtggtctgggctcagggtatggaaccggccttctttcagccaacagacattcactcatggtggggacccatcgtgaagatggcgtggccctgagaggcagccattctcttctgccaaaccaggttccggttccacagcttcctgtccagtctgcgacttcccctgacctgaacccaccccaggacccttacagaggcatgccaccaggactacaggggcagagtgtctcctctggcagctctgagatcaaatccgatgacgagggtgatgagaacctgcaagacacgaaatcttcggaggacaagaaattagatgacgacaagaaggatatcaaatcaattactagcaataatgacgatgaggacctgacaccagagcagaaggcagagcgtgagaaggagcggaggatggccaacaatgcccgagagcgtctgcgggtccgtgacatcaacgaggctttcaaagagctcggccgcatggtgcagctccacctcaagagtgacaagccccagaccaagctcctgatcctccaccaggcggtggccgtcatcctcagtctggagcagcaagtccgagaaaggaatctgaatccgaaagctgcgtgtctgaaaagaagggaggaagagaaggtgtcctcagagcctccccctctctccttggccggcccacaccctggaatgggagacgcatcgaatcacatgggacagatgtagtaatgaactagtccgtaacttgaaagtatttcgatttcttggctttatatatcttgtggaaaggacgagccggtctattccgaaatacgccg

SEQ ID NO: 353 - DNA, 1727 bp, Homo sapiens
  source 1..1727: mol_type = genomic DNA
accgccaccatggatatgggcaacccaggaaccctttcgcccaccaaacctggttcccagtactatcagtattctagcaataatccccgaaggaggcctcttcacagtagtgccatggaggtacagacaaagaaagttcgaaaagttcctccaggtttgccatcttcagtctatgctccatcagcaagcactgccgactacaatagggactcgccaggctatccttcctccaaaccagcaaccagcactttccctagctccttcttcatgcaagatggccatcacagcagtgacccttggagctcctccagtgggatgaatcagcctggctatgcaggaatgttgggcaactcttctcatattccacagtccagcagctactgtagcctgcatccacatgaacgtttgagctatccatcacactcctcagcagacatcaattccagtcttcctccgatgtccactttccatcgtagtggtacaaaccattacagcacctcttcctgtacgcctcctgccaacgggacagacagtataatggcaaatagaggaagcggggcagccggcagctcccagactggagatgctctggggaaagcacttgcttcgatctattctccagatcacactaacaacagcttttcatcaaacccttcaactcctgttggctctcctccatctctctcagcaggcacagctgtttggtctagaaatggaggacaggcctcatcgtctcctaattatgaaggacccttacactctttgcaaagccgaattgaagatcgtttagaaagactggatgatgctattcatgttctccggaaccatgcagtgggcccatccacagctatgcctggtggtcatggggacatgcatggaatcattggaccttctcataatggagccatgggtggtctgggctcagggtatggaaccggccttctttcagccaacagacattcactcatggtggggacccatcgtgaagatggcgtggccctgagaggcagccattctcttctgccaaaccaggttccggttccacagcttcctgtccagtctgcgacttcccctgacctgaacccaccccaggacccttacagaggcatgccaccaggactacaggggcagagtgtctcctctggcagctctgagatcaaatccgatgacgagggtgatgagaacctgcaagacacgaaatcttcggaggacaagaaattagatgacgacaagaaggatatcaaatcaattactaggtcaagatctagcaataatgacgatgaggacctgacaccagagcagaaggcagagcgtgagaaggagcggaggatggccaacaatgcccgagagcgtctgcgggtccgtgacatcaacgaggctttcaaagagctcggccgcatggtgcagctccacctcaagagtgacaagccccagaccaagctcctgatcctccaccaggcggtggccgtcatcctcagtctggagcagcaagtccgagaaaggaatctgaatccgaaagctgcgtgtctgaaaagaagggaggaagagaaggtgtcctcagagcctccccctctctccttggccggcccacaccctggaatgggagacgcatcgaatcacatgggacagatgtagtaatgaactagtccgtaacttgaaagtatttcgatttcttggctttatatatcttgtggaaaggacgacatgaagagcatatcttgcggacg

SEQ ID NO: 354 - DNA, 2045 bp, Homo sapiens
  source 1..2045: mol_type = genomic DNA
accgccaccatgttttcacctcctgtgagcagtgggaaaaatggaccaacttctttggcaagtggacattttactggctcaaatgtagaagacagaagtagctcagggtcctgggggaatggaggacatccaagcccgtccaggaactatggagatgggactccctatgaccacatgaccagcagggaccttgggtcacatgacaatctctctccaccttttgtcaattccagaatacaaagtaaaacagaaaggggctcatactcatcttatgggagagaatcaaacttacagggttgccaccagcagagtctccttggaggtgacatggatatgggcaacccaggaaccctttcgcccaccaaacctggttcccagtactatcagtattctagcaataatccccgaaggaggcctcttcacagtagtgccatggaggtacagacaaagaaagttcgaaaagttcctccaggtttgccatcttcagtctatgctccatcagcaagcactgccgactacaatagggactcgccaggctatccttcctccaaaccagcaaccagcactttccctagctccttcttcatgcaagatggccatcacagcagtgacccttggagctcctccagtgggatgaatcagcctggctatgcaggaatgttgggcaactcttctcatattccacagtccagcagctactgtagcctgcatccacatgaacgtttgagctatccatcacactcctcagcagacatcaattccagtcttcctccgatgtccactttccatcgtagtggtacaaaccattacagcacctcttcctgtacgcctcctgccaacgggacagacagtataatggcaaatagaggaagcggggcagccggcagctcccagactggagatgctctggggaaagcacttgcttcgatctattctccagatcacactaacaacagcttttcatcaaacccttcaactcctgttggctctcctccatctctctcagcaggcacagctgtttggtctagaaatggaggacaggcctcatcgtctcctaattatgaaggacccttacactctttgcaaagccgaattgaagatcgtttagaaagactggatgatgctattcatgttctccggaaccatgcagtgggcccatccacagctatgcctggtggtcatggggacatgcatggaatcattggaccttctcataatggagccatgggtggtctgggctcagggtatggaaccggccttctttcagccaacagacattcactcatggtggggacccatcgtgaagatggcgtggccctgagaggcagccattctcttctgccaaaccaggttccggttccacagcttcctgtccagtctgcgacttcccctgacctgaacccaccccaggacccttacagaggcatgccaccaggactacaggggcagagtgtctcctctggcagctctgagatcaaatccgatgacgagggtgatgagaacctgcaagacacgaaatcttcggaggacaagaaattagatgacgacaagaaggatatcaaatcaattactaggtcaagatctagcaataatgacgatgaggacctgacaccagagcagaaggcagagcgtgagaaggagcggaggatggccaacaatgcccgagagcgtctgcgggtccgtgacatcaacgaggctttcaaagagctcggccgcatggtgcagctccacctcaagagtgacaagccccagaccaagctcctgatcctccaccaggcggtggccgtcatcctcagtctggagcagcaagtccgagaaaggaatctgaatccgaaagctgcgtgtctgaaaagaagggaggaagagaaggtgtcctcagagcctccccctctctccttggccggcccacaccctggaatgggagacgcatcgaatcacatgggacagatgtagtaatgaactagtccgtaacttgaaagtatttcgatttcttggctttatatatcttgtggaaaggacgaccctgttacccgctcgaatcaacc

SEQ ID NO: 355 - DNA, 1904 bp, Homo sapiens
  source 1..1904: mol_type = genomic DNA
accgccaccatgaaggatatttttttccagtttatcatagccagagtgaggaagtgttattccctctcttgcttgcatacattgccagtagtgcctactttacgtaaaacagaaaggggctcatactcatcttatgggagagaatcaaacttacagggttgccaccagagtctccttggaggtgacatggatatgggcaacccaggaaccctttcgcccaccaaacctggttcccagtactatcagtattctagcaataatccccgaaggaggcctcttcacagtagtgccatggaggtacagacaaagaaagttcgaaaagttcctccaggtttgccatcttcagtctatgctccatcagcaagcactgccgactacaatagggactcgccaggctatccttcctccaaaccagcaaccagcactttccctagctccttcttcatgcaagatggccatcacagcagtgacccttggagctcctccagtgggatgaatcagcctggctatgcaggaatgttgggcaactcttctcatattccacagtccagcagctactgtagcctgcatccacatgaacgtttgagctatccatcacactcctcagcagacatcaattccagtcttcctccgatgtccactttccatcgtagtggtacaaaccattacagcacctcttcctgtacgcctcctgccaacgggacagacagtataatggcaaatagaggaagcggggcagccggcagctcccagactggagatgctctggggaaagcacttgcttcgatctattctccagatcacactaacaacagcttttcatcaaacccttcaactcctgttggctctcctccatctctctcagcaggcacagctgtttggtctagaaatggaggacaggcctcatcgtctcctaattatgaaggacccttacactctttgcaaagccgaattgaagatcgtttagaaagactggatgatgctattcatgttctccggaaccatgcagtgggcccatccacagctatgcctggtggtcatggggacatgcatggaatcattggaccttctcataatggagccatgggtggtctgggctcagggtatggaaccggccttctttcagccaacagacattcactcatggtggggacccatcgtgaagatggcgtggccctgagaggcagccattctcttctgccaaaccaggttccggttccacagcttcctgtccagtctgcgacttcccctgacctgaacccaccccaggacccttacagaggcatgccaccaggactacaggggcagagtgtctcctctggcagctctgagatcaaatccgatgacgagggtgatgagaacctgcaagacacgaaatcttcggaggacaagaaattagatgacgacaagaaggatatcaaatcaattactaggtcaagatctagcaataatgacgatgaggacctgacaccagagcagaaggcagagcgtgagaaggagcggaggatggccaacaatgcccgagagcgtctgcgggtccgtgacatcaacgaggctttcaaagagctcggccgcatggtgcagctccacctcaagagtgacaagccccagaccaagctcctgatcctccaccaggcggtggccgtcatcctcagtctggagcagcaagtccgagaaaggaatctgaatccgaaagctgcgtgtctgaaaagaagggaggaagagaaggtgtcctcagagcctccccctctctccttggccggcccacaccctggaatgggagacgcatcgaatcacatgggacagatgtagtaatgaactagtccgtaacttgaaagtatttcgatttcttggctttatatatcttgtggaaaggacgaatatagctccgaaccgtcttgcga

SEQ ID NO: 356 - DNA, 1979 bp, Homo sapiens
  source 1..1979: mol_type = genomic DNA
accgccaccatggaagaggacagcagagatgtagaagacagaagtagctcagggtcctgggggaatggaggacatccaagcccgtccaggaactatggagatgggactccctatgaccacatgaccagcagggaccttgggtcacatgacaatctctctccaccttttgtcaattccagaatacaaagtaaaacagaaaggggctcatactcatcttatgggagagaatcaaacttacagggttgccaccagcagagtctccttggaggtgacatggatatgggcaacccaggaaccctttcgcccaccaaacctggttcccagtactatcagtattctagcaataatccccgaaggaggcctcttcacagtagtgccatggaggtacagacaaagaaagttcgaaaagttcctccaggtttgccatcttcagtctatgctccatcagcaagcactgccgactacaatagggactcgccaggctatccttcctccaaaccagcaaccagcactttccctagctccttcttcatgcaagatggccatcacagcagtgacccttggagctcctccagtgggatgaatcagcctggctatgcaggaatgttgggcaactcttctcatattccacagtccagcagctactgtagcctgcatccacatgaacgtttgagctatccatcacactcctcagcagacatcaattccagtcttcctccgatgtccactttccatcgtagtggtacaaaccattacagcacctcttcctgtacgcctcctgccaacgggacagacagtataatggcaaatagaggaagcggggcagccggcagctcccagactggagatgctctggggaaagcacttgcttcgatctattctccagatcacactaacaacagcttttcatcaaacccttcaactcctgttggctctcctccatctctctcagcaggcacagctgtttggtctagaaatggaggacaggcctcatcgtctcctaattatgaaggacccttacactctttgcaaagccgaattgaagatcgtttagaaagactggatgatgctattcatgttctccggaaccatgcagtgggcccatccacagctatgcctggtggtcatggggacatgcatggaatcattggaccttctcataatggagccatgggtggtctgggctcagggtatggaaccggccttctttcagccaacagacattcactcatggtggggacccatcgtgaagatggcgtggccctgagaggcagccattctcttctgccaaaccaggttccggttccacagcttcctgtccagtctgcgacttcccctgacctgaacccaccccaggacccttacagaggcatgccaccaggactacaggggcagagtgtctcctctggcagctctgagatcaaatccgatgacgagggtgatgagaacctgcaagacacgaaatcttcggaggacaagaaattagatgacgacaagaaggatatcaaatcaattactagcaataatgacgatgaggacctgacaccagagcagaaggcagagcgtgagaaggagcggaggatggccaacaatgcccgagagcgtctgcgggtccgtgacatcaacgaggctttcaaagagctcggccgcatggtgcagctccacctcaagagtgacaagccccagaccaagctcctgatcctccaccaggcggtggccgtcatcctcagtctggagcagcaagtccgagaaaggaatctgaatccgaaagctgcgtgtctgaaaagaagggaggaagagaaggtgtcctcagagcctccccctctctccttggccggcccacaccctggaatgggagacgcatcgaatcacatgggacagatgtagtaatgaactagtccgtaacttgaaagtatttcgatttcttggctttatatatcttgtggaaaggacgatgcgcgtcccgaccagaaagctgc

SEQ ID NO: 357 - DNA, 2114 bp, Homo sapiens
  source 1..2114: mol_type = genomic DNA
accgccaccatgcatcaccaacagcgaatggctgccttagggacggacaaagagctgagtgatttactggatttcagtgcgatgttttcacctcctgtgagcagtgggaaaaatggaccaacttctttggcaagtggacattttactggctcaaatgtagaagacagaagtagctcagggtcctgggggaatggaggacatccaagcccgtccaggaactatggagatgggactccctatgaccacatgaccagcagggaccttgggtcacatgacaatctctctccaccttttgtcaattccagaatacaaagtaaaacagaaaggggctcatactcatcttatgggagagaatcaaacttacagggttgccaccagcagagtctccttggaggtgacatggatatgggcaacccaggaaccctttcgcccaccaaacctggttcccagtactatcagtattctagcaataatccccgaaggaggcctcttcacagtagtgccatggaggtacagacaaagaaagttcgaaaagttcctccaggtttgccatcttcagtctatgctccatcagcaagcactgccgactacaatagggactcgccaggctatccttcctccaaaccagcaaccagcactttccctagctccttcttcatgcaagatggccatcacagcagtgacccttggagctcctccagtgggatgaatcagcctggctatgcaggaatgttgggcaactcttctcatattccacagtccagcagctactgtagcctgcatccacatgaacgtttgagctatccatcacactcctcagcagacatcaattccagtcttcctccgatgtccactttccatcgtagtggtacaaaccattacagcacctcttcctgtacgcctcctgccaacgggacagacagtataatggcaaatagaggaagcggggcagccggcagctcccagactggagatgctctggggaaagcacttgcttcgatctattctccagatcacactaacaacagcttttcatcaaacccttcaactcctgttggctctcctccatctctctcaggcacagctgtttggtctagaaatggaggacaggcctcatcgtctcctaattatgaaggacccttacactctttgcaaagccgaattgaagatcgtttagaaagactggatgatgctattcatgttctccggaaccatgcagtgggcccatccacagctatgcctggtggtcatggggacatgcatggaatcattggaccttctcataatggagccatgggtggtctgggctcagggtatggaaccggccttctttcagccaacagacattcactcatggtggggacccatcgtgaagatggcgtggccctgagaggcagccattctcttctgccaaaccaggttccggttccacagcttcctgtccagtctgcgacttcccctgacctgaacccaccccaggacccttacagaggcatgccaccaggactacaggggcagagtgtctcctctggcagctctgagatcaaatccgatgacgagggtgatgagaacctgcaagacacgaaatcttcggaggacaagaaattagatgacgacaagaaggatatcaaatcaattactaggtcaagatctagcaataatgacgatgaggacctgacaccagagcagaaggcagagcgtgagaaggagcggaggatggccaacaatgcccgagagcgtctgcgggtccgtgacatcaacgaggctttcaaagagctcggccgcatggtgcagctccacctcaagagtgacaagccccagaccaagctcctgatcctccaccaggcggtggccgtcatcctcagtctggagcagcaagtccgagaaaggaatctgaatccgaaagctgcgtgtctgaaaagaagggaggaagagaaggtgtcctcagagcctccccctctctccttggccggcccacaccctggaatgggagacgcatcgaatcacatgggacagatgtagtaatgaactagtccgtaacttgaaagtatttcgatttcttggctttatatatcttgtggaaaggacgatacgactgacaccgcgttccgttt

SEQ ID NO: 358 - DNA, 1625 bp, Homo sapiens
  source 1..1625: mol_type = genomic DNA
accgccaccatgtactgcgcatacacaatcccgggcatgggcggcaactctttgatgtactactataatgggaaagcggtctatgctccatcagcaagcactgccgactacaatagggactcgccaggctatccttcctccaaaccagcaaccagcactttccctagctccttcttcatgcaagatggccatcacagcagtgacccttggagctcctccagtgggatgaatcagcctggctatgcaggaatgttgggcaactcttctcatattccacagtccagcagctactgtagcctgcatccacatgaacgtttgagctatccatcacactcctcagcagacatcaattccagtcttcctccgatgtccactttccatcgtagtggtacaaaccattacagcacctcttcctgtacgcctcctgccaacgggacagacagtataatggcaaatagaggaagcggggcagccggcagctcccagactggagatgctctggggaaagcacttgcttcgatctattctccagatcacactaacaacagcttttcatcaaacccttcaactcctgttggctctcctccatctctctcagcaggcacagctgtttggtctagaaatggaggacaggcctcatcgtctcctaattatgaaggacccttacactctttgcaaagccgaattgaagatcgtttagaaagactggatgatgctattcatgttctccggaaccatgcagtgggcccatccacagctatgcctggtggtcatggggacatgcatggaatcattggaccttctcataatggagccatgggtggtctgggctcagggtatggaaccggccttctttcagccaacagacattcactcatggtggggacccatcgtgaagatggcgtggccctgagaggcagccattctcttctgccaaaccaggttccggttccacagcttcctgtccagtctgcgacttcccctgacctgaacccaccccaggacccttacagaggcatgccaccaggactacaggggcagagtgtctcctctggcagctctgagatcaaatccgatgacgagggtgatgagaacctgcaagacacgaaatcttcggaggacaagaaattagatgacgacaagaaggatatcaaatcaattactagcaataatgacgatgaggacctgacaccagagcagaaggcagagcgtgagaaggagcggaggatggccaacaatgcccgagagcgtctgcgggtccgtgacatcaacgaggctttcaaagagctcggccgcatggtgcagctccacctcaagagtgacaagccccagaccaagctcctgatcctccaccaggcggtggccgtcatcctcagtctggagcagcaagtccgagaaaggaatctgaatccgaaagctgcgtgtctgaaaagaagggaggaagagaaggtgtcctcagagcctccccctctctccttggccggcccacaccctggaatgggagacgcatcgaatcacatgggacagatgtagtaatgaactagtccgtaacttgaaagtatttcgatttcttggctttatatatcttgtggaaaggacgagggagtcagaccactctacggcag

SEQ ID NO: 359 - DNA, 2096 bp, Homo sapiens
  source 1..2096: mol_type = genomic DNA
accgccaccatgcaacgggcaaaaactgaactgttcaggcttcagattgtaactgacgatctgaggaaaaatgagatgttttcacctcctgtgagcagtgggaaaaatggaccaacttctttggcaagtggacattttactggctcaaatgtagaagacagaagtagctcagggtcctgggggaatggaggacatccaagcccgtccaggaactatggagatgggactccctatgaccacatgaccagcagggaccttgggtcacatgacaatctctctccaccttttgtcaattccagaatacaaagtaaaacagaaaggggctcatactcatcttatgggagagaatcaaacttacagggttgccaccagcagagtctccttggaggtgacatggatatgggcaacccaggaaccctttcgcccaccaaacctggttcccagtactatcagtattctagcaataatccccgaaggaggcctcttcacagtagtgccatggaggtacagacaaagaaagttcgaaaagttcctccaggtttgccatcttcagtctatgctccatcagcaagcactgccgactacaatagggactcgccaggctatccttcctccaaaccagcaaccagcactttccctagctccttcttcatgcaagatggccatcacagcagtgacccttggagctcctccagtgggatgaatcagcctggctatgcaggaatgttgggcaactcttctcatattccacagtccagcagctactgtagcctgcatccacatgaacgtttgagctatccatcacactcctcagcagacatcaattccagtcttcctccgatgtccactttccatcgtagtggtacaaaccattacagcacctcttcctgtacgcctcctgccaacgggacagacagtataatggcaaatagaggaagcggggcagccggcagctcccagactggagatgctctggggaaagcacttgcttcgatctattctccagatcacactaacaacagcttttcatcaaacccttcaactcctgttggctctcctccatctctctcaggcacagctgtttggtctagaaatggaggacaggcctcatcgtctcctaattatgaaggacccttacactctttgcaaagccgaattgaagatcgtttagaaagactggatgatgctattcatgttctccggaaccatgcagtgggcccatccacagctatgcctggtggtcatggggacatgcatggaatcattggaccttctcataatggagccatgggtggtctgggctcagggtatggaaccggccttctttcagccaacagacattcactcatggtggggacccatcgtgaagatggcgtggccctgagaggcagccattctcttctgccaaaccaggttccggttccacagcttcctgtccagtctgcgacttcccctgacctgaacccaccccaggacccttacagaggcatgccaccaggactacaggggcagagtgtctcctctggcagctctgagatcaaatccgatgacgagggtgatgagaacctgcaagacacgaaatcttcggaggacaagaaattagatgacgacaagaaggatatcaaatcaattactagcaataatgacgatgaggacctgacaccagagcagaaggcagagcgtgagaaggagcggaggatggccaacaatgcccgagagcgtctgcgggtccgtgacatcaacgaggctttcaaagagctcggccgcatggtgcagctccacctcaagagtgacaagccccagaccaagctcctgatcctccaccaggcggtggccgtcatcctcagtctggagcagcaagtccgagaaaggaatctgaatccgaaagctgcgtgtctgaaaagaagggaggaagagaaggtgtcctcagagcctccccctctctccttggccggcccacaccctggaatgggagacgcatcgaatcacatgggacagatgtagtaatgaactagtccgtaacttgaaagtatttcgatttcttggctttatatatcttgtggaaaggacgagttacagtcgtcgaagttcaaagc

SEQ ID NO: 360 - DNA, 911 bp, Homo sapiens
  source 1..911: mol_type = genomic DNA
accgccaccatgtacaaagagaccgtctactccgccttcaatctgctcatgcattacccacccccctcgggagcagggcagcacccccagccgcagcccccgctgcacaaggccaatcagcccccccacggtgtcccccaactctctctctacgaacatttcaacagcccacatcccacccctgcacctgcggacatcagccagaagcaagttcacaggcctctgcagacccctgacctctctggcttctactccctgacctcaggcagcatggggcagctcccccacactgtgagctggttcacccacccatccttgatgctaggttctggtgtacctggtcacccagcagccatcccccacccggccattgtgcccccctcagggaagcaggagctgcagcccttcgaccgcaacctgaagacacaagcagagtccaaggcagagaaggaggccaagaagccaaccatcaagaagcccctcaatgccttcatgctgtacatgaaggagatgagagccaaggtcattgcagagtgcacacttaaggagagcgctgccatcaaccagatcctgggccgcaggtggcacgcgctgtcgcgagaagagcaggccaagtactatgagctggcccgcaaggagaggcagctgcacatgcagctatacccaggctggtcagcgcgggacaactacgggaagaagaagaggcggtcgagggaaaagcaccaagaatccaccacaggaggaaaaagaaatgcattcggtacttacccggagaaggccgctgccccagccccgttccttccgatgacagtgctctagtaatgaactagtccgtaacttgaaagtatttcgatttcttggctttatatatcttgtggaaaggacgacgagcccattggtctcgctagagt

SEQ ID NO: 361 - DNA, 911 bp, Homo sapiens
  source 1..911: mol_type = genomic DNA
accgccaccatgtacaaagagaccgtctactccgccttcaatctgctcatgcattacccacccccctcgggagcagggcagcacccccagccgcagcccccgctgcacaaggccaatcagcccccccacggtgtcccccaactctctctctacgaacatttcaacagcccacatcccacccctgcacctgcggacatcagccagaagcaagttcacaggcctctgcagacccctgacctctctggcttctactccctgacctcaggcagcatggggcagctcccccacactgtgagctggttcacccacccatccttgatgctaggttctggtgtacctggtcacccagcagccatcccccacccggccattgtgcccccctcagggaagcaggagctgcagcccttcgaccgcaacctgaagacacaagcagagtccaaggcagagaaggaggccaagaagccaaccatcaagaagcccctcaatgccttcatgctgtacatgaaggagatgagagccaaggtcattgcagagtgcacacttaaggagagcgctgccatcaaccagatcctgggccgcaggtggcacgcgctgtcgcgagaagagcaggccaagtactatgagctggcccgcaaggagaggcagctgcacatgcagctatacccaggctggtcagcgcgggacaactacgggaagaagaagaggcggtcgagggaaaagcaccaagaatccaccacagagacaaactggcccagagaactcaaggatggtaatggacaagagtcactgtccatgtcttcttcctctagcccagcttagtaatgaactagtccgtaacttgaaagtatttcgatttcttggctttatatatcttgtggaaaggacgagaatacatgtatagctcacccgta

SEQ ID NO: 362 - DNA, 908 bp, Homo sapiens
  source 1..908: mol_type = genomic DNA
accgccaccatgtacaaagagaccgtctactccgccttcaatctgctcatgcattacccacccccctcgggagcagggcagcacccccagccgcagcccccgctgcacaaggccaatcagcccccccacggtgtcccccaactctctctctacgaacatttcaacagcccacatcccacccctgcacctgcggacatcagccagaagcaagttcacaggcctctgcagacccctgacctctctggcttctactccctgacctcaggcagcatggggcagctcccccacactgtgagctggttcacccacccatccttgatgctaggttctggtgtacctggtcacccagcagccatcccccacccggccattgtgcccccctcagggaagcaggagctgcagcccttcgaccgcaacctgaagacacaagcagagtccaaggcagagaaggaggccaagaagccaaccatcaagaagcccctcaatgccttcatgctgtacatgaaggagatgagagccaaggtcattgcagagtgcacacttaaggagagcgctgccatcaaccagatcctgggccgcaggtggcacgcgctgtcgcgagaagagcaggccaagtactatgagctggcccgcaaggagaggcagctgcacatgcagctatacccaggctggtcagcgcgggacaactacgggaagaagaagaggcggtcgagggaaaagcaccaagaatccaccacagaccctggctcgcctaagaaatgccgtgctcgctttggcctcaaccagcagacggattggtgtggtccgtgcagatagtaatgaactagtccgtaacttgaaagtatttcgatttcttggctttatatatcttgtggaaaggacgaacgcatacacgtttaggccgctac

SEQ ID NO: 363 - DNA, 2141 bp, Homo sapiens
  source 1..2141: mol_type = genomic DNA
accgccaccatgaaccagccgcagaggatggcgcctgtgggcacagacaaggagctcagtgacctcctggacttcagcatgatgttcccgctgcctgtcaccaacgggaagggccggcccgcctccctggccggggcgcagttcggaggttcaggtcttgaggaccggcccagctcaggctcctggggcagcggcgaccagagcagctcctcctttgaccccagccggaccttcagcgagggcacccacttcactgagtcgcacagcagcctctcttcatccacattcctgggaccgggactcggaggtgagtgcctggcctggtgcggtccctctgctgtgcacagatgtgcagacgtgggccttggcatggtcagtgcacgcacagcgccaggcaagagcggtgagcggggcgcctatgcctccttcgggagagacgcaggcgtgggcggcctgactcaggctggcttcctgtcaggcgagctggccctcaacagccccgggcccctgtccccttcgggcatgaaggggacctcccagtactacccctcctactccggcagctcccggcggagagcggcagacggcagcctagacacgcagcccaagaaggtccggaaggtcccgccgggtcttccatcctcggtgtacccacccagctcaggtgaggactacggcagggatgccaccgcctacccgtccgccaagacccccagcagcacctatcccgcccccttctacgtggcagatggcagcctgcacccctcagccgagctctggagtcccccgggccaggcgggcttcgggcccatgctgggtgggggctcatccccgctgcccctcccgcccggtagcggcccggtgggcagcagtggaagcagcagcacgtttggtggcctgcaccagcacgagcgtatgggctaccagctgcatggagcagaggtgaacggtgggctcccatctgcatcctccttctcctcagcccccggagccacgtacggcggcgtctccagccacacgccgcctgtcagcggggccgacagcctcctgggctcccgagggaccacagctggcagctccggggatgccctcggcaaagcactggcctcgatctactccccggatcactcaagcaataacttctcgtccagcccttctacccccgtgggctccccccagggcctggcaggaacgtcacagtggcctcgagcaggagcccccggtgccttatcgcccagctacgacgggggtctccacggcctgcagagtaagatagaagaccacctggacgaggccatccacgtgctccgcagccacgccgtgggcacagccggcgacatgcacacgctgctgcctggccacggggcgctggcctcaggtttcaccggccccatgtcactgggcgggcggcacgcaggcctggttggaggcagccaccccgaggacggcctcgcaggcagcaccagcctcatgcacaaccacgcggccctccccagccagccaggcaccctccctgacctgtctcggcctcccgactcctacagtgggctagggcgagcaggtgccacggcggccgccagcgagatcaagcgggaggagaaggaggacgaggagaacacgtcagcggctgaccactcggaggaggagaagaaggagctgaaggccccccgggcccggaccagtacggacgaggtgctgtccctggaggagaaagacctgagggaccgggagaggcgcatggccaataacgcgcgggagcgggtgcgcgtgcgggatattaacgaggccttccgggagctggggcgcatgtgccagatgcacctcaagtcggacaaagcgcagaccaagctgctcatcctgcagcaggccgtgcaggtcatcctggggctggagcagcaggtgcgagagcggaacctgaatcccaaagcagcctgtttgaaacggcgagaagaggaaaaggtgtcaggtgtggttggagacccccagatggtgctttcagctccccacccaggcctgagcgaagcccacaaccccgccgggcacatgtagtaatgaactagtccgtaacttgaaagtatttcgatttcttggctttatatatcttgtggaaaggacgaatattgtttcgtctgcgtgaggat

SEQ ID NO: 364 - DNA, 2078 bp, Homo sapiens
  source 1..2078: mol_type = genomic DNA
accgccaccatgaaccagccgcagaggatggcgcctgtgggcacagacaaggagctcagtgacctcctggacttcagcatgatgttcccgctgcctgtcaccaacgggaagggccggcccgcctccctggccggggcgcagttcggaggttcaggcaagagcggtgagcggggcgcctatgcctccttcgggagagacgcaggcgtgggcggcctgactcaggctggcttcctgtcaggcgagctggccctcaacagccccgggcccctgtccccttcgggcatgaaggggacctcccagtactacccctcctactccggcagctcccggcggagagcggcagacggcagcctagacacgcagcccaagaaggtccggaaggtcccgccgggtcttccatcctcggtgtacccacccagctcaggtgaggactacggcagggatgccaccgcctacccgtccgccaagacccccagcagcacctatcccgcccccttctacgtggcagatggcagcctgcacccctcagccgagctctggagtcccccgggccaggcgggcttcgggcccatgctgggtgggggctcatccccgctgcccctcccgcccggtagcggcccggtgggcagcagtggaagcagcagcacgtttggtggcctgcaccagcacgagcgtatgggctaccagctgcatggagcagaggtgaacggtgggctcccatctgcatcctccttctcctcagcccccggagccacgtacggcggcgtctccagccacacgccgcctgtcagcggggccgacagcctcctgggctcccgagggaccacagctggcagctccggggatgccctcggcaaagcactggcctcgatctactccccggatcactcaagcaataacttctcgtccagcccttctacccccgtgggctccccccagggcctggcaggaacgtcacagtggcctcgagcaggagcccccggtgccttatcgcccagctacgacgggggtctccacggcctgcagagtaagatagaagaccacctggacgaggccatccacgtgctccgcagccacgccgtgggcacagccggcgacatgcacacgctgctgcctggccacggggcgctggcctcaggtttcaccggccccatgtcactgggcgggcggcacgcaggcctggttggaggcagccaccccgaggacggcctcgcaggcagcaccagcctcatgcacaaccacgcggccctccccagccagccaggcaccctccctgacctgtctcggcctcccgactcctacagtgggctagggcgagcaggtgccacggcggccgccagcgagatcaagcgggaggagaaggaggacgaggagaacacgtcagcggctgaccactcggaggaggagaagaaggagctgaaggccccccgggcccggaccaggtgccaacccacccctcggcactccccaccctcaccccatcaggacgcacatgtgcacaggccacacgcacaccgcacccacactgggaggccgtcggcgggccccacgctcttcccccaacctcactgtctccctctggccccctcccggcgccctccccatagcccagacgaggacgaggacgaccttctccccccagagcagaaggccgagcgggagaaggagcgccgggtggccaataacgcccgggagcggctgcgggtccgtgacatcaacgaggcctttaaggagctggggcgcatgtgccaactgcacctcaacagcgagaagccccagaccaaactgctcatcctgcaccaggctgtctcggtcatcctgaacttggagcagcaagtgcgagagcggaacctgaatcccaaagcagcctgtttgaaacggcgagaagaggaaaaggtgtcaggtgtggttggagacccccagatggtgctttcagctccccacccaggcctgagcgaagcccacaaccccgccgggcacatgtagtaatgaactagtccgtaacttgaaagtatttcgatttcttggctttatatatcttgtggaaaggacgacgcgagcctacttcctgatagtgc

SEQ ID NO: 365 - DNA, 2066 bp, Homo sapiens
  source 1..2066: mol_type = genomic DNA
accgccaccatgaaccagccgcagaggatggcgcctgtgggcacagacaaggagctcagtgacctcctggacttcagcatgatgttcccgctgcctgtcaccaacgggaagggccggcccgcctccctggccggggcgcagttcggaggttcaggtcttgaggaccggcccagctcaggctcctggggcagcggcgaccagagcagctcctcctttgaccccagccggaccttcagcgagggcacccacttcactgagtcgcacagcagcctctcttcatccacattcctgggaccgggactcggaggcaagagcggtgagcggggcgcctatgcctccttcgggagagacgcaggcgtgggcggcctgactcaggctggcttcctgtcaggcgagctggccctcaacagccccgggcccctgtccccttcgggcatgaaggggacctcccagtactacccctcctactccggcagctcccggcggagagcggcagacggcagcctagacacgcagcccaagaaggtccggaaggtcccgccgggtcttccatcctcggtgtacccacccagctcaggtgaggactacggcagggatgccaccgcctacccgtccgccaagacccccagcagcacctatcccgcccccttctacgtggcagatggcagcctgcacccctcagccgagctctggagtcccccgggccaggcgggcttcgggcccatgctgggtgggggctcatccccgctgcccctcccgcccggtagcggcccggtgggcagcagtggaagcagcagcacgtttggtggcctgcaccagcacgagcgtatgggctaccagctgcatggagcagaggtgaacggtgggctcccatctgcatcctccttctcctcagcccccggagccacgtacggcggcgtctccagccacacgccgcctgtcagcggggccgacagcctcctgggctcccgagggaccacagctggcagctccggggatgccctcggcaaagcactggcctcgatctactccccggatcactcaagcaataacttctcgtccagcccttctacccccgtgggctccccccagggcctggcaggaacgtcacagtggcctcgagcaggagcccccggtgccttatcgcccagctacgacgggggtctccacggcctgcagagtaagatagaagaccacctggacgaggccatccacgtgctccgcagccacgccgtgggcacagccggcgacatgcacacgctgctgcctggccacggggcgctggcctcaggtttcaccggccccatgtcactgggcgggcggcacgcaggcctggttggaggcagccaccccgaggacggcctcgcaggcagcaccagcctcatgcacaaccacgcggccctccccagccagccaggcaccctccctgacctgtctcggcctcccgactcctacagtgggctagggcgagcaggtgccacggcggccgccagcgagatcaagcgggaggagaaggaggacgaggagaacacgtcagcggctgaccactcggaggaggagaagaaggagctgaaggccccccgggcccggaccagcccagacgaggacgaggacgaccttctccccccagagcagaaggccgagcgggagaaggagcgccgggtggccaataacgcccgggagcggctgcgggtccgtgacatcaacgaggcctttaaggagctggggcgcatgtgccaactgcacctcaacagcgagaagccccagaccaaactgctcatcctgcaccaggctgtctcggtcatcctgaacttggagcagcaagtgcgagagcggaacctgaatcccaaagcagcctgtttgaaacggcgagaagaggaaaaggtgtcaggtgtggttggagacccccagatggtgctttcagctccccacccaggcctgagcgaagcccacaaccccgccgggcacatgtagtaatgaactagtccgtaacttgaaagtatttcgatttcttggctttatatatcttgtggaaaggacgatttctcggagaggcggccgagcca

SEQ ID NO: 366 - DNA, 2057 bp, Homo sapiens
  source 1..2057: mol_type = genomic DNA
accgccaccatgaaccagccgcagaggatggcgcctgtgggcacagacaaggagctcagtgacctcctggacttcagcatgatgttcccgctgcctgtcaccaacgggaagggccggcccgcctccctggccggggcgcagttcggaggttcaggtcttgaggaccggcccagctcaggctcctggggcagcggcgaccagagcagctcctcctttgaccccagccggaccttcagcgagggcacccacttcactgagtcgcacagcagcctctcttcatccacattcctgggaccgggactcggaggcaagagcggtgagcggggcgcctatgcctccttcgggagagacgcaggcgtgggcggcctgactcaggctggcttcctgtcaggcgagctggccctcaacagccccgggcccctgtccccttcgggcatgaaggggacctcccagtactacccctcctactccggcagctcccggcggagagcggcagacggcagcctagacacgcagcccaagaaggtccggaaggtcccgccgggtcttccatcctcggtgtacccacccagctcaggtgaggactacggcagggatgccaccgcctacccgtccgccaagacccccagcagcacctatcccgcccccttctacgtggcagatggcagcctgcacccctcagccgagctctggagtcccccgggccaggcgggcttcgggcccatgctgggtgggggctcatccccgctgcccctcccgcccggtagcggcccggtgggcagcagtggaagcagcagcacgtttggtggcctgcaccagcacgagcgtatgggctaccagctgcatggagcagaggtgaacggtgggctcccatctgcatcctccttctcctcagcccccggagccacgtacggcggcgtctccagccacacgccgcctgtcagcggggccgacagcctcctgggctcccgagggaccacagctggcagctccggggatgccctcggcaaagcactggcctcgatctactccccggatcactcaagcaataacttctcgtccagcccttctacccccgtgggctccccccagggcctggcaggaacgtcacagtggcctcgagcaggagcccccggtgccttatcgcccagctacgacgggggtctccacggcctgcagagtaagatagaagaccacctggacgaggccatccacgtgctccgcagccacgccgtgggcacagccggcgacatgcacacgctgctgcctggccacggggcgctggcctcaggtttcaccggccccatgtcactgggcgggcggcacgcaggcctggttggaggcagccaccccgaggacggcctcgcaggcagcaccagcctcatgcacaaccacgcggccctccccagccagccaggcaccctccctgacctgtctcggcctcccgactcctacagtgggctagggcgagcaggtgccacggcggccgccagcgagatcaagcgggaggagaaggaggacgaggagaacacgtcagcggctgaccactcggaggaggagaagaaggagctgaaggccccccgggcccggaccagcagtacggacgaggtgctgtccctggaggagaaagacctgagggaccgggagaggcgcatggccaataacgcgcgggagcgggtgcgcgtgcgggatattaacgaggccttccgggagctggggcgcatgtgccagatgcacctcaagtcggacaaagcgcagaccaagctgctcatcctgcagcaggccgtgcaggtcatcctggggctggagcagcaggtgcgagagcggaacctgaatcccaaagcagcctgtttgaaacggcgagaagaggaaaaggtgtcaggtgtggttggagacccccagatggtgctttcagctccccacccaggcctgagcgaagcccacaaccccgccgggcacatgtagtaatgaactagtccgtaacttgaaagtatttcgatttcttggctttatatatcttgtggaaaggacgagactcacgcattgactcagaatct

SEQ ID NO: 367 - DNA, 1904 bp, Homo sapiens
  source 1..1904: mol_type = genomic DNA
accgccaccatgaaccagccgcagaggatggcgcctgtgggcacagacaaggagctcagtgacctcctggacttcagcatgatgttcccgctgcctgtcaccaacgggaagggccggcccgcctccctggccggggcgcagttcggaggttcaggcaagagcggtgagcggggcgcctatgcctccttcgggagagacgcaggcgtgggcggcctgactcaggctggcttcctgtcaggcgagctggccctcaacagccccgggcccctgtccccttcgggcatgaaggggacctcccagtactacccctcctactccggcagctcccggcggagagcggcagacggcagcctagacacgcagcccaagaaggtccggaaggtcccgccgggtcttccatcctcggtgtacccacccagctcaggtgaggactacggcagggatgccaccgcctacccgtccgccaagacccccagcagcacctatcccgcccccttctacgtggcagatggcagcctgcacccctcagccgagctctggagtcccccgggccaggcgggcttcgggcccatgctgggtgggggctcatccccgctgcccctcccgcccggtagcggcccggtgggcagcagtggaagcagcagcacgtttggtggcctgcaccagcacgagcgtatgggctaccagctgcatggagcagaggtgaacggtgggctcccatctgcatcctccttctcctcagcccccggagccacgtacggcggcgtctccagccacacgccgcctgtcagcggggccgacagcctcctgggctcccgagggaccacagctggcagctccggggatgccctcggcaaagcactggcctcgatctactccccggatcactcaagcaataacttctcgtccagcccttctacccccgtgggctccccccagggcctggcaggaacgtcacagtggcctcgagcaggagcccccggtgccttatcgcccagctacgacgggggtctccacggcctgcagagtaagatagaagaccacctggacgaggccatccacgtgctccgcagccacgccgtgggcacagccggcgacatgcacacgctgctgcctggccacggggcgctggcctcaggtttcaccggccccatgtcactgggcgggcggcacgcaggcctggttggaggcagccaccccgaggacggcctcgcaggcagcaccagcctcatgcacaaccacgcggccctccccagccagccaggcaccctccctgacctgtctcggcctcccgactcctacagtgggctagggcgagcaggtgccacggcggccgccagcgagatcaagcgggaggagaaggaggacgaggagaacacgtcagcggctgaccactcggaggaggagaagaaggagctgaaggccccccgggcccggaccagcagtacggacgaggtgctgtccctggaggagaaagacctgagggaccgggagaggcgcatggccaataacgcgcgggagcgggtgcgcgtgcgggatattaacgaggccttccgggagctggggcgcatgtgccagatgcacctcaagtcggacaaagcgcagaccaagctgctcatcctgcagcaggccgtgcaggtcatcctggggctggagcagcaggtgcgagagcggaacctgaatcccaaagcagcctgtttgaaacggcgagaagaggaaaaggtgtcaggtgtggttggagacccccagatggtgctttcagctccccacccaggcctgagcgaagcccacaaccccgccgggcacatgtagtaatgaactagtccgtaacttgaaagtatttcgatttcttggctttatatatcttgtggaaaggacgaatctcggctccacgatgtctgacg

SEQ ID NO: 368 - DNA, 5609 bp, Homo sapiens
  source 1..5609: mol_type = genomic DNA
accgccaccatggcaaactcgacggggaaggcgcctccggacgagcggagaaagggactcgctttcctggacgagctgcggcagttccaccacagcagagggtcgccttttaaaaaaatccctgcggtgggtgggaaggagctggatcttcacggtctctacaccagagtcactactttaggcggattcgcgaaggtttctgagaagaatcagtggggagaaattgttgaagagttcaactttcccagaagttgttctaacgctgcctttgctttaaaacagtattacttgcgttacctagaaaagtacgagaaagttcatcattttggggaggatgatgatgaggtaccaccaggcaatccaaagccacagcttcctattggtgcaattccatcttcctacaattaccagcaacacagtgtgtcggattatctgcgtcaaagttatgggctgtccatggactttaattcgccaaatgattataataaattggtgctttcactgttatctggactcccaaatgaagtggactttgctattaacgtatgcactctcctatcaaatgaaagcaagcacgtcatgcaacttgaaaaagatcctaaaatcatcactttactacttgctaatgccggggtgtttgacgacactttaggatccttttccactgtatttggagaagaatggaaagagaagactgatagagacttcgttaagttttggaaagacatcgttgatgataatgaagttcgtgacctcatttctgacagaaacaagtctcatgaaggtacatcaggagaatggatttgggagtctttatttcatccacctcgaaagctgggcattaacgatattgaaggacagcgggtacttcagattgcagtgattttgagaaatctttcctttgaggagggcaatgttaagctcttggcagctaatcgtacctgtcttcgtttcctattactttctgcacatagtcattttatttctttaaggcaattaggccttgacacattaggaaatattgcagctgagcttttactggaccctgttgatttcaaaactactcatctgatgtttcatactgttacaaaatgtctaatgtcaagggatagatttttaaagatgagaggcatggaaattttgggaaatctttgcaaagcagaagataatggtgttttaatttgtgaatatgtggatcaggattcctacagagagatcatttgtcatctcactttacctgatgtgctgcttgtaatctcaacactcgaggtgctatacatgctcacggaaatgggagatgttgcttgcacaaaaattgcaaaagtagaaaagagcatagacatgttagtgtgtctggtttctatggatattcagatgtttggccctgatgcactagctgcggtaaaactcattgaacacccaagttccagtcatcaaatgttatctgaaattaggccacaagctatagagcaagtccaaacccagactcatgtagcatctgccccagcttccagagcagttgtagcgcagcatgttgctccacctccaggaatagtggaaatagatagtgagaagtttgcttgtcagtggctaaatgctcattttgaagtaaatccagattgttctgtttctcgagcagaaatgtattctgaatacctctcgacttgcagtaaattagctcgtggtggaatcctaacatcaactggattttataaatgtcttagaacggtctttccaaatcatacagtgaagagagtggaggattccagtagcaatgggcaggcacatattcatgtggtaggagtaaaacggagggctataccacttcccattcagatgtactatcagcagcaaccagtttctacttctgttgttcgtgttgattctgttcctgatgtatctcctgctccttcacctgcaggaatccctcatggatcacaaaccataggaaaccattttcagaggactcctgttgccaaccaatcttcaaatctgactgcaacacaaatgtcttttcctgtacaaggtgttcatactgtggcacaaactgtttcaagaattccacaaaatccttcacctcatacccaccagcaacaaaatgctccagtgactgtcattcaaagtaaagctccaattccttgtgaagttgttaaggctacagttatccagaattccataccccagacaggagttcctgttagtattgctgttggaggaggacctccacagagttctgttgttcagaatcatagtacagggccacaacctgttacagttgtgaattctcagacattgcttcaccatccatctgtaattccacagcagtctccattacacacagtggtaccaggacagatcccttcaggcactcctgttacagtaattcaacaagctgtcccacagagtcatatgtttggcagagtacagaacataccagcatgtacttctacagtttcacagggtcaacagttaatcaccacatcaccccaacctgtgcaaacttcatctcaacagacatcagctggtagccagtcacaagatactgttatcatagcacccccacagtatgtaacaacttctgcatccaatattgtctcagcaacttcagtacagaattttcaggtagctacaggacaaatggttactattgctggtgtcccaagtccacaagcctcaagggtagggtttcagaacattgcaccaaaacctctcccttctcagcaagtttcatctacagtggtacagcagcctattcaacaaccacagcagccaacccaacaaagcgtagtgattgtaagccagccagctcaacaaggtcaaacttatgcaccagccattcaccaaattgttcttgctaatccagcagctcttccagctggtcagacagttcagctaactggacaacctaacataactccatcttcttcaccatcacctgtcccagctactaataaccaagtccctactgccatgtcgtcgtcctctacccctcaatcacagggaccacctcctactgtcagtcaaatgttatctgtgaaaaggcagcaacagcagcaacattcaccagcacccccaccacagcaggtacaagtacaagttcagcagccccaacaagtacagatgcaagttcaacctcaacagtcgaatgcaggagttggtcagcctgcctctggtgagtcgagtctgattaaacagcttctgcttccgaaacgtggtccttcaacaccaggtggtaagcttattctcccagctccacagattcctccccctaataatgcaagagctcctagccctcaggtggtctatcaggtggccagtaaccaagccgcaggttttggagtgcaggggcaaactccagctcagcagctattggttgggcagcaaaatgttcagttggtcccaagtgcaatgccaccctcagggggagtacaaactgtgcccatttcgaacttacaaatattgccaggtccactgatctcaaatagcccagcaaccattttccaagggacttctggcaaccaggtaaccataacagttgtgccaaatacgagttttgcacctgcaactgtgagtcagggaaatgcaactcagctcattgctccagcaggaattaccatgagcggaacgcagacaggagttggacttccagtacaaacgcttccagccactcaagcatctcctgctggacaatcatcatgtactactgctactcccccattcaaaggtgataaaataatttgccaaaaggaggaggaagcaaaggaagcaacaggtttacatgttcatgaacgtaaaattgaagtcatggagaacccgtcctgccgacgaggagccacaaacaccagcaatggggatacaaaggaaaatgaaatgcatgtgggaagtcttttaaatgggagaaagtacagtgactcaagtctacctccttcaaactcagggaaaattcaaagtgagactaatcagtgctcactaatcagtaatgggccatcattggaattaggtgagaatggagcatctgggaaacagaactcagaacaaatagacatgcaagatatcaaaagtgatttgagaaaaccgctagttaatggaatctgtgattttgataaaggagatggttctcatttaagcaaaaacattccaaatcataaaacttccaatcatgtaggaaatggtgagatatctccaatggaaccacaagggactttagatatcactcagcaagatactgccaaaggtgatcaactagaaagaatttctaatggacctgtattaactttgggtggttcatctgtgagcagtatacaggaggcttcaaatgcggcaacacagcaatttagtggtactgatttgcttaatggacctctagcttcaagtttgaattcagatgtgcctcagcaacgcccaagtgtagttgtctcaccacattctacaacctctgttatacagggacatcaaatcatagcagttcccgactcaggatcaaaagtatcccattctcctgccctatcatctgacgttcggtctacaaatggcacagcagaatgcaaaactgtaaagaggccagcagaggatactgatagggaaacagtcgcaggaattccaaataaagtaggagttagaattgttacaatcagtgaccccaacaatgctggctgcagcgcaacaatggttgctgtgccagcaggagcagatccaagcactgtagctaaagtagcaatagaaagtgctgttcagcaaaagcaacagcatccaccaacatatgtacagaatgtggtcccgcagaacactcctatgccaccttcaccagctgtacaagtgcagggccagcctaacagttctcagccttctccattcagtggatccagtcagcctggagatccaatgagaaaacctggacagaacttcatgtgtctgtggcagtcttgtaaaaagtggtttcagacaccctcacaggttttctaccatgcagcaactgaacatggaggaaaagatgtatatccagggcagtgtctttgggaaggttgtgagccttttcagcgacagcggttttcttttattacccacttgcaggataagcactgttcaaaggatgccctacttgcaggattaaaacaagatgaaccaggacaagcaggaagtcagaagtcttctaccaagcagccaactgtagggggcacaagctcaactcctagagcacaaaaggccattgtgaatcatcccagtgctgcacttatggctctgaggagaggatcaagaaaccttgtctttcgagattttacagatgaaaaagagggaccaataactaaacacatccgactaacagctgccttaatattaaaaaatattggtaaatattcagaatgtggtcgcagattgttaaagagacatgaaaataacttatcagtgctagccattagtaacatggaagcttcctccacccttgccaaatgcctttatgaacttaattttacagttcagagtaaggaacaagaaaaagactcagaaatgctgcagtagtaatgaactagtccgtaacttgaaagtatttcgatttcttggctttatatatcttgtggaaaggacgacttaagtccattaaatatgggtgg

SEQ ID NO: 369 - DNA, 1658 bp, Homo sapiens
  source 1..1658: mol_type = genomic DNA
accgccaccatggcggcggccgcgctgaggcccccggctcagggcactgtgacctttgaagatgtggctgtgaacttttcccaggaggaatggagtctccttagtgaggctcagagatgcctttatcatgacgtgatgctggagaacctgacacttatatcttctctaggttgttggtatggagcaaaagacgagacaccttctaagcagaccctttctatacaacaggagtccccactcaggacacattggacaggtgtatgtaccaagaaggtccacctctggggaatgtgtggccctctcctgggagatatcttacaccagggaacacaacacaatcagaaattgaatgggtttggggcatatgaaaaaaaattggatgacgatgcaaaccatcatcaagaccagaagcagcacattggagagaaatcgtacagaagcaatgccaagggaacatcttttgtaaagaactgtaaattccatatgtcacatgagccatttatctttcatgaggttgggaaagactttttgtccagcttgagattactccaacaagaggacattcacacttcagggaagtcaaactttgaaactaagcatgggataccccttcagggtggaaaaactcattacatctgtggagagtccacaataccgtttagcaacaaacactcacttgtccttcaccagagacttctccctagagaaggaccttatgtatgcagtgattctgggaaattcactagcaaaagtaatagttttaataatcatcagggagttcgcactggaaaaagaccttatcagtgtggacaatgtgatgaatcattttggtataaggcccacctcactgaacaccagagagttcacactggagaaagaccttatgagtgtggagaatgtgataaatcttttagtcataagcacagtcttgttgaccatcagcgagttcacactggagaaagaccttatgaatgtgacgaatgtgggaaatcttttagccataagcgcagccttgttcaccaccagcgagttcacactggagaaagaccttatcagtgtggagaatgtgggaaatcgtttaatcacaagtgcaacctcattcagcatcagcgagttcacactggagaaagaccttttgagtgtacggcatgtgggaagttatttaggagcaactcccacctaaaggaacaccagagagttcacactggagaaagaccctatgagtgtaaagaatgtaggaaatcatttaggtacaagtcacacctcactgaacaccagagagttcacactggagaaaggccatatgagtgtagagaatgtgggaaatgttttcatcaaaagggcagtctcattcaacatcagcagatccactctggagaaaggccacatgagtgtggagaatgtgggaaatgttttcatcaaaagggcagtctcattcgacatcagcagattcactctggagaaaggccacatgagtgtggagaatgtggaaagtgttttcgtcaaaagggaaacctcattaaacatcaacgagttcacacgggagaaagacatcatgaatgttagtaatgaactagtccgtaacttgaaagtatttcgatttcttggctttatatatcttgtggaaaggacgagaatctgccaaactgataggaccc

SEQ ID NO: 370 - DNA, 881 bp, Homo sapiens
  source 1..881: mol_type = genomic DNA
accgccaccatgtcagaggtccccgttgctcgcgtctggctggtactgctcctgctgactgtccaggtcggcgtgacagccggcgctccgtggcagtgcgcgccctgctccgccgagaagctcgcgctctgcccgccggtgtccgcctcgtgctcggaggtcacccggtccgccggctgcggctgttgcccgatgtgcgccctgcctctgggcgccgcgtgcggcgtggcgactgcacgctgcgcccggggactcagttgccgcgcgctgccgggggagcagcaacctctgcacgccctcacccgcggccaaggcgcctgcgtgcaggagtctgacgcctccgctccccatgctgcagaggcagggagccctgaaagcccagagagcacggagataactgaggaggagctcctggataatttccatctgatggccccttctgaagaggatcattccatcctttgggacgccatcagtacctatgatggctcgaaggctctccatgtcaccaacatcaaaaaatggaaggagccctgccgaatagaactctacagagtcgtagagagtttagccaaggcacaggagacatcaggagaagaaatttccaaattttacctgccaaactgcaacaagaatggattttatcacagcagacagtgtgagacatccatggatggagaggcgggactctgctggtgcgtctacccttggaatgggaagaggatccctgggtctccagagatcaggggagaccccaactgccagatatattttaatgtacaaaactagtaatgaactagtccgtaacttgaaagtatttcgatttcttggctttatatatcttgtggaaaggacgatattgtacctctggcacacacccg

SEQ ID NO: 371 - DNA, 1907 bp, Homo sapiens
  source 1..1907: mol_type = genomic DNA
accgccaccatgggaccattggaatttagagatgtggccatagaattctctctggaggagtggcattgcctggacactgcacagcagaatttatatagggatgtgatgttagagaactacagacacctggtcttccttggtattgttgtcactaagccagacctgatcacctgtctggagcaaggaaaaaaacccttcactgtgaagagacatgagatgattgccaaatccccagttatgtgttttcattttgcccaagacctttgtccagagcagagcctaaaagattccttccaaaaagtgatagtgacaagatatgaaaaacgtgaatatggcaatttagagttaaaaaaaggttgtgaaagtgtggatgagggtaaagtacacaaaagaggttataatggacttaaccaatgtttgacagctacccagagcaaagtatttcaatgtgatacatatgtgaaagtctctcatatattttcaaattcaaacagacataagataagagatactggaaaaaaacctttcaaatgtatagaatgtggcaaagctttcaaccagtcctcaacccttgctacacataagaaaattcatactggagagataacctgcaaatgtgaagaatgtggcaaagccttcaacaggtcctcacaccttacttcacataagagaattcatactggagagaaacggtacaaatgtgaagattgtggcaaagaattaaagtattcctctacccttactgcacataagagaattcatactggagagaaacggtacaaatgtgaagattgtggcaaagaattaaagtattcctctacccttactgcacataagagaattcatactggagagaaaccctacaagtgtgataaatgtggcagagcatttatttcatcctcgatcctttatgtacataagataagtcatactgaagagaaaccctacaaatgtgaagaatgtggcaaagccttcaagctctcctcaatccttagtacacataagagaatccatactggagagaaaccctacaaatgtgaagaatgtggcaaagccttcaggcgctccttagtccttcgtacacataagagaattcatactggagagaaaccctacaagtgtgataaatgtggcaaagcatttatttcatcctcactcctttataaacataagataagtcatagtgaaaagaaaccctacaaatgtgaagaatgtggcaaagccttcaagcgctcctcaacacttactatacataagataagtcatactgaagagaaaccctacaaatgtcaagaatgtgacaaagtcttcaaacgctcctcagcccttagcacacataagataattcatagtggagagaaaccctacaaatgtgaagaatgtggcaaagccttcaagcgctcctcaaaccttactacacataagataagtcatactgaagagaaactctacaaatgtcaagaatgtgacaaagccttcaagtactcctcagcccttagcacacataagataattcacagtggagagaatccctacaaatgtgaagaatgtggcaaagccttcaagcgctcctcagtccttagtaaacataagataattcatactggagcgaaaccctacaaatgtgaagaatgtggcaaagcctttaagcgctcctcacagcttactagtcataagataagtcatactggagagaaaccctacaaatgtgaagaatgtggcaaagcttttaacttgtcctcagaccttaatacacataagaggattcatattggacagaaagcctacatagtgaagaacatggcaaatctttagtaatgaactagtccgtaacttgaaagtatttcgatttcttggctttatatatcttgtggaaaggacgacaccgcttgcgaaatcctctttaa

SEQ ID NO: 372 - DNA, 1523 bp, Homo sapiens
  source 1..1523: mol_type = genomic DNA
accgccaccatggggagaaaaaagattcagattacgaggattatggatgaacgtaacagacaggtgacatttacaaagaggaaatttgggttgatgaagaaggcttatgagctgagcgtgctgtgtgactgtgagattgcgctgatcatcttcaacagcaccaacaagctgttccagtatgccagcaccgacatggacaaagtgcttctcaagtacacggagtacaacgagccgcatgagagccggacaaactcagacatcgtggagacgttgagaaagaagggccttaatggctgtgacagcccagaccccgatgcggacgattccgtaggtcacagccctgagtctgaggacaagtacaggaaaattaacgaagatattgatctaatgatcagcaggcaaagattgtgtgctgttccacctcccaacttcgagatgccagtctccatcccagtgtccagccacaacagtttggtgtacagcaaccctgtcagctcactgggaaaccccaacctattgccactggctcacccttctctgcagaggaatagtatgtctcctggtgtaacacatcgacctccaagtgcaggtaacacaggtggtctgatgggtggagacctcacgtctggtgcaggcaccagtgcagggaacgggtatggcaatccccgaaactcaccaggtctgctggtctcacctggtaacttgaacaagaatatgcaagcaaaatctcctcccccaatgaatttaggaatgaataaccgtaaaccagatctccgagttcttattccaccaggcagcaagaatacgatgccatcagtgtctgaggatgtcgacctgcttttgaatcaaaggataaataactcccagtcggctcagtcattggctaccccagtggtttccgtagcaactcctactttaccaggacaaggaatgggaggatatccatcagccatttcaacaacatatggtaccgagtactctctgagtagtgcagacctgtcatctctgtctgggtttaacaccgccagcgctcttcaccttggttcagtaactggctggcaacagcaacacctacataacatgccaccatctgccctcagtcagttgggagcttgcactagcactcatttatctcagagttcaaatctctccctgccttctactcaaagcctcaacatcaagtcagaacctgtttctcctcctagagaccgtaccaccaccccttcgagatacccacaacacacgcgccacgaggcggggagatctcctgttgacagcttgagcagctgtagcagttcgtacgacgggagcgaccgagaggatcaccggaacgaattccactcccccattggactcaccagaccttcgccggacgaaagggaaagtccctcagtcaagcgcatgcgactttctgaaggatgggcaacatagtaatgaactagtccgtaacttgaaagtatttcgatttcttggctttatatatcttgtggaaaggacgacctgcgtgtcctgatgcgagggcc

SEQ ID NO: 373 - DNA, 1403 bp, Homo sapiens
  source 1..1403: mol_type = genomic DNA
accgccaccatggggagaaaaaagattcagattacgaggattatggatgaacgtaacagacaggtgacatttacaaagaggaaatttgggttgatgaagaaggcttatgagctgagcgtgctgtgtgactgtgagattgcgctgatcatcttcaacagcaccaacaagctgttccagtatgccagcaccgacatggacaaagtgcttctcaagtacacggagtacaacgagccgcatgagagccggacaaactcagacatcgtggagacgttgagaaagaagggccttaatggctgtgacagcccagaccccgatgcggacgattccgtaggtcacagccctgagtctgaggacaagtacaggaaaattaacgaagatattgatctaatgatcagcaggcaaagattgtgtgctgttccacctcccaacttcgagatgccagtctccatcccagtgtccagccacaacagtttggtgtacagcaaccctgtcagctcactgggaaaccccaacctattgccactggctcacccttctctgcagaggaatagtatgtctcctggtgtaacacatcgacctccaagtgcaggtaacacaggtggtctgatgggtggagacctcacgtctggtgcaggcaccagtgcagggaacgggtatggcaatccccgaaactcaccaggtctgctggtctcacctggtaacttgaacaagaatatgcaagcaaaatctcctcccccaatgaatttaggaatgaataaccgtaaaccagatctccgagttcttattccaccaggcagcaagaatacgatgccatcagtgaatcaaaggataaataactcccagtcggctcagtcattggctaccccagtggtttccgtagcaactcctactttaccaggacaaggaatgggaggatatccatcagccatttcaacaacatatggtaccgagtactctctgagtagtgcagacctgtcatctctgtctgggtttaacaccgccagcgctcttcaccttggttcagtaactggctggcaacagcaacacctacataacatgccaccatctgccctcagtcagttgggagaccgtaccaccaccccttcgagatacccacaacacacgcgccacgaggcggggagatctcctgttgacagcttgagcagctgtagcagttcgtacgacgggagcgaccgagaggatcaccggaacgaattccactcccccattggactcaccagaccttcgccggacgaaagggaaagtccctcagtcaagcgcatgcgactttctgaaggatgggcaacatagtaatgaactagtccgtaacttgaaagtatttcgatttcttggctttatatatcttgtggaaaggacgacatggagacgatacatgatgaatg

SEQ ID NO: 374 - DNA, 1397 bp, Homo sapiens
  source 1..1397: mol_type = genomic DNA
accgccaccatggggagaaaaaagattcagattacgaggattatggatgaacgtaacagacaggtgacatttacaaagaggaaatttgggttgatgaagaaggcttatgagctgagcgtgctgtgtgactgtgagattgcgctgatcatcttcaacagcaccaacaagctgttccagtatgccagcaccgacatggacaaagtgcttctcaagtacacggagtacaacgagccgcatgagagccggacaaactcagacatcgtggaggcattgaacaagaaagaaaacaaaggctgtgaaagccccgatcccgactcctcttatgcactcaccccacgcactgaagaaaaatacaaaaaaattaatgaagaatttgataatatgatcaagagtcataaaattcctgctgttccacctcccaacttcgagatgccagtctccatcccagtgtccagccacaacagtttggtgtacagcaaccctgtcagctcactgggaaaccccaacctattgccactggctcacccttctctgcagaggaatagtatgtctcctggtgtaacacatcgacctccaagtgcaggtaacacaggtggtctgatgggtggagacctcacgtctggtgcaggcaccagtgcagggaacgggtatggcaatccccgaaactcaccaggtctgctggtctcacctggtaacttgaacaagaatatgcaagcaaaatctcctcccccaatgaatttaggaatgaataaccgtaaaccagatctccgagttcttattccaccaggcagcaagaatacgatgccatcagtgaatcaaaggataaataactcccagtcggctcagtcattggctaccccagtggtttccgtagcaactcctactttaccaggacaaggaatgggaggatatccatcagccatttcaacaacatatggtaccgagtactctctgagtagtgcagacctgtcatctctgtctgggtttaacaccgccagcgctcttcaccttggttcagtaactggctggcaacagcaacacctacataacatgccaccatctgccctcagtcagttgggagaccgtaccaccaccccttcgagatacccacaacacacgcgccacgaggcggggagatctcctgttgacagcttgagcagctgtagcagttcgtacgacgggagcgaccgagaggatcaccggaacgaattccactcccccattggactcaccagaccttcgccggacgaaagggaaagtccctcagtcaagcgcatgcgactttctgaaggatgggcaacatagtaatgaactagtccgtaacttgaaagtatttcgatttcttggctttatatatcttgtggaaaggacgagtgacttaaggtttaactgtgttt

SEQ ID NO: 375 - DNA, 1493 bp, Homo sapiens
  source 1..1493: mol_type = genomic DNA
accgccaccatggggagaaaaaagattcagattacgaggattatggatgaacgtaacagacaggtgacatttacaaagaggaaatttgggttgatgaagaaggcttatgagctgagcgtgctgtgtgactgtgagattgcgctgatcatcttcaacagcaccaacaagctgttccagtatgccagcaccgacatggacaaagtgcttctcaagtacacggagtacaacgagccgcatgagagccggacaaactcagacatcgtggaggcattgaacaagaaagaaaacaaaggctgtgaaagccccgatcccgactcctcttatgcactcaccccacgcactgaagaaaaatacaaaaaaattaatgaagaatttgataatatgatcaagagtcataaaattcctgctgttccacctcccaacttcgagatgccagtctccatcccagtgtccagccacaacagtttggtgtacagcaaccctgtcagctcactgggaaaccccaacctattgccactggctcacccttctctgcagaggaatagtatgtctcctggtgtaacacatcgacctccaagtgcaggtaacacaggtggtctgatgggtggagacctcacgtctggtgcaggcaccagtgcagggaacgggtatggcaatccccgaaactcaccaggtctgctggtctcacctggtaacttgaacaagaatatgcaagcaaaatctcctcccccaatgaatttaggaatgaataaccgtaaaccagatctccgagttcttattccaccaggcagcaagaatacgatgccatcagtgaatcaaaggataaataactcccagtcggctcagtcattggctaccccagtggtttccgtagcaactcctactttaccaggacaaggaatgggaggatatccatcagccatttcaacaacatatggtaccgagtactctctgagtagtgcagacctgtcatctctgtctgggtttaacaccgccagcgctcttcaccttggttcagtaactggctggcaacagcaacacctacataacatgccaccatctgccctcagtcagttgggagcttgcactagcactcatttatctcagagttcaaatctctccctgccttctactcaaagcctcaacatcaagtcagaacctgtttctcctcctagagaccgtaccaccaccccttcgagatacccacaacacacgcgccacgaggcggggagatctcctgttgacagcttgagcagctgtagcagttcgtacgacgggagcgaccgagaggatcaccggaacgaattccactcccccattggactcaccagaccttcgccggacgaaagggaaagtccctcagtcaagcgcatgcgactttctgaaggatgggcaacatagtaatgaactagtccgtaacttgaaagtatttcgatttcttggctttatatatcttgtggaaaggacgatccataagtgattaggtggatcta

SEQ ID NO: 376 - DNA, 1355 bp, Homo sapiens
  source 1..1355: mol_type = genomic DNA
accgccaccatggggagaaaaaagattcagattacgaggattatggatgaacgtaacagacaggtgacatttacaaagaggaaatttgggttgatgaagaaggcttatgagctgagcgtgctgtgtgactgtgagattgcgctgatcatcttcaacagcaccaacaagctgttccagtatgccagcaccgacatggacaaagtgcttctcaagtacacggagtacaacgagccgcatgagagccggacaaactcagacatcgtggaggctgttccacctcccaacttcgagatgccagtctccatcccagtgtccagccacaacagtttggtgtacagcaaccctgtcagctcactgggaaaccccaacctattgccactggctcacccttctctgcagaggaatagtatgtctcctggtgtaacacatcgacctccaagtgcaggtaacacaggtggtctgatgggtggagacctcacgtctggtgcaggcaccagtgcagggaacgggtatggcaatccccgaaactcaccaggtctgctggtctcacctggtaacttgaacaagaatatgcaagcaaaatctcctcccccaatgaatttaggaatgaataaccgtaaaccagatctccgagttcttattccaccaggcagcaagaatacgatgccatcagtgaatcaaaggataaataactcccagtcggctcagtcattggctaccccagtggtttccgtagcaactcctactttaccaggacaaggaatgggaggatatccatcagccatttcaacaacatatggtaccgagtactctctgagtagtgcagacctgtcatctctgtctgggtttaacaccgccagcgctcttcaccttggttcagtaactggctggcaacagcaacacctacataacatgccaccatctgccctcagtcagttgggagcttgcactagcactcatttatctcagagttcaaatctctccctgccttctactcaaagcctcaacatcaagtcagaacctgtttctcctcctagagaccgtaccaccaccccttcgagatacccacaacacacgcgccacgaggcggggagatctcctgttgacagcttgagcagctgtagcagttcgtacgacgggagcgaccgagaggatcaccggaacgaattccactcccccattggactcaccagaccttcgccggacgaaagggaaagtccctcagtcaagcgcatgcgactttctgaaggatgggcaacatagtaatgaactagtccgtaacttgaaagtatttcgatttcttggctttatatatcttgtggaaaggacgacgtatagctctaggtcacttcgtt

SEQ ID NO: 377 - DNA, 1517 bp, Homo sapiens
  source 1..1517: mol_type = genomic DNA
accgccaccatggggagaaaaaagattcagattacgaggattatggatgaacgtaacagacaggtgacatttacaaagaggaaatttgggttgatgaagaaggcttatgagctgagcgtgctgtgtgactgtgagattgcgctgatcatcttcaacagcaccaacaagctgttccagtatgccagcaccgacatggacaaagtgcttctcaagtacacggagtacaacgagccgcatgagagccggacaaactcagacatcgtggaggcattgaacaagaaagaaaacaaaggctgtgaaagccccgatcccgactcctcttatgcactcaccccacgcactgaagaaaaatacaaaaaaattaatgaagaatttgataatatgatcaagagtcataaaattcctgctgttccacctcccaacttcgagatgccagtctccatcccagtgtccagccacaacagtttggtgtacagcaaccctgtcagctcactgggaaaccccaacctattgccactggctcacccttctctgcagaggaatagtatgtctcctggtgtaacacatcgacctccaagtgcaggtaacacaggtggtctgatgggtggagacctcacgtctggtgcaggcaccagtgcagggaacgggtatggcaatccccgaaactcaccaggtctgctggtctcacctggtaacttgaacaagaatatgcaagcaaaatctcctcccccaatgaatttaggaatgaataaccgtaaaccagatctccgagttcttattccaccaggcagcaagaatacgatgccatcagtgtctgaggatgtcgacctgcttttgaatcaaaggataaataactcccagtcggctcagtcattggctaccccagtggtttccgtagcaactcctactttaccaggacaaggaatgggaggatatccatcagccatttcaacaacatatggtaccgagtactctctgagtagtgcagacctgtcatctctgtctgggtttaacaccgccagcgctcttcaccttggttcagtaactggctggcaacagcaacacctacataacatgccaccatctgccctcagtcagttgggagcttgcactagcactcatttatctcagagttcaaatctctccctgccttctactcaaagcctcaacatcaagtcagaacctgtttctcctcctagagaccgtaccaccaccccttcgagatacccacaacacacgcgccacgaggcggggagatctcctgttgacagcttgagcagctgtagcagttcgtacgacgggagcgaccgagaggatcaccggaacgaattccactcccccattggactcaccagaccttcgccggacgaaagggaaagtccctcagtcaagcgcatgcgactttctgaaggatgggcaacatagtaatgaactagtccgtaacttgaaagtatttcgatttcttggctttatatatcttgtggaaaggacgacgcgcacttgcaggtgtgcaactg

SEQ ID NO: 378 - DNA, 1499 bp, Homo sapiens
  source 1..1499: mol_type = genomic DNA
accgccaccatggggagaaaaaagattcagattacgaggattatggatgaacgtaacagacaggtgacatttacaaagaggaaatttgggttgatgaagaaggcttatgagctgagcgtgctgtgtgactgtgagattgcgctgatcatcttcaacagcaccaacaagctgttccagtatgccagcaccgacatggacaaagtgcttctcaagtacacggagtacaacgagccgcatgagagccggacaaactcagacatcgtggagacgttgagaaagaagggccttaatggctgtgacagcccagaccccgatgcggacgattccgtaggtcacagccctgagtctgaggacaagtacaggaaaattaacgaagatattgatctaatgatcagcaggcaaagattgtgtgctgttccacctcccaacttcgagatgccagtctccatcccagtgtccagccacaacagtttggtgtacagcaaccctgtcagctcactgggaaaccccaacctattgccactggctcacccttctctgcagaggaatagtatgtctcctggtgtaacacatcgacctccaagtgcaggtaacacaggtggtctgatgggtggagacctcacgtctggtgcaggcaccagtgcagggaacgggtatggcaatccccgaaactcaccaggtctgctggtctcacctggtaacttgaacaagaatatgcaagcaaaatctcctcccccaatgaatttaggaatgaataaccgtaaaccagatctccgagttcttattccaccaggcagcaagaatacgatgccatcagtgaatcaaaggataaataactcccagtcggctcagtcattggctaccccagtggtttccgtagcaactcctactttaccaggacaaggaatgggaggatatccatcagccatttcaacaacatatggtaccgagtactctctgagtagtgcagacctgtcatctctgtctgggtttaacaccgccagcgctcttcaccttggttcagtaactggctggcaacagcaacacctacataacatgccaccatctgccctcagtcagttgggagcttgcactagcactcatttatctcagagttcaaatctctccctgccttctactcaaagcctcaacatcaagtcagaacctgtttctcctcctagagaccgtaccaccaccccttcgagatacccacaacacacgcgccacgaggcggggagatctcctgttgacagcttgagcagctgtagcagttcgtacgacgggagcgaccgagaggatcaccggaacgaattccactcccccattggactcaccagaccttcgccggacgaaagggaaagtccctcagtcaagcgcatgcgactttctgaaggatgggcaacatagtaatgaactagtccgtaacttgaaagtatttcgatttcttggctttatatatcttgtggaaaggacgacctttgaactcgtacgaccgaagt

SEQ ID NO: 379 - DNA, 1283 bp, Homo sapiens
  source 1..1283: mol_type = genomic DNA
accgccaccatggggagaaaaaagattcagattacgaggattatggatgaacgtaacagacaggtgacatttacaaagaggaaatttgggttgatgaagaaggcttatgagctgagcgtgctgtgtgactgtgagattgcgctgatcatcttcaacagcaccaacaagctgttccagtatgccagcaccgacatggacaaagtgcttctcaagtacacggagtacaacgagccgcatgagagccggacaaactcagacatcgtggaggctgttccacctcccaacttcgagatgccagtctccatcccagtgtccagccacaacagtttggtgtacagcaaccctgtcagctcactgggaaaccccaacctattgccactggctcacccttctctgcagaggaatagtatgtctcctggtgtaacacatcgacctccaagtgcaggtaacacaggtggtctgatgggtggagacctcacgtctggtgcaggcaccagtgcagggaacgggtatggcaatccccgaaactcaccaggtctgctggtctcacctggtaacttgaacaagaatatgcaagcaaaatctcctcccccaatgaatttaggaatgaataaccgtaaaccagatctccgagttcttattccaccaggcagcaagaatacgatgccatcagtgtctgaggatgtcgacctgcttttgaatcaaaggataaataactcccagtcggctcagtcattggctaccccagtggtttccgtagcaactcctactttaccaggacaaggaatgggaggatatccatcagccatttcaacaacatatggtaccgagtactctctgagtagtgcagacctgtcatctctgtctgggtttaacaccgccagcgctcttcaccttggttcagtaactggctggcaacagcaacacctacataacatgccaccatctgccctcagtcagttgggagaccgtaccaccaccccttcgagatacccacaacacacgcgccacgaggcggggagatctcctgttgacagcttgagcagctgtagcagttcgtacgacgggagcgaccgagaggatcaccggaacgaattccactcccccattggactcaccagaccttcgccggacgaaagggaaagtccctcagtcaagcgcatgcgactttctgaaggatgggcaacatagtaatgaactagtccgtaacttgaaagtatttcgatttcttggctttatatatcttgtggaaaggacgaccgtcgcagatgggtaaaccaatc

SEQ ID NO: 380 - DNA, 1427 bp, Homo sapiens
  source 1..1427: mol_type = genomic DNA
accgccaccatggggagaaaaaagattcagattacgaggattatggatgaacgtaacagacaggtgacatttacaaagaggaaatttgggttgatgaagaaggcttatgagctgagcgtgctgtgtgactgtgagattgcgctgatcatcttcaacagcaccaacaagctgttccagtatgccagcaccgacatggacaaagtgcttctcaagtacacggagtacaacgagccgcatgagagccggacaaactcagacatcgtggagacgttgagaaagaagggccttaatggctgtgacagcccagaccccgatgcggacgattccgtaggtcacagccctgagtctgaggacaagtacaggaaaattaacgaagatattgatctaatgatcagcaggcaaagattgtgtgctgttccacctcccaacttcgagatgccagtctccatcccagtgtccagccacaacagtttggtgtacagcaaccctgtcagctcactgggaaaccccaacctattgccactggctcacccttctctgcagaggaatagtatgtctcctggtgtaacacatcgacctccaagtgcaggtaacacaggtggtctgatgggtggagacctcacgtctggtgcaggcaccagtgcagggaacgggtatggcaatccccgaaactcaccaggtctgctggtctcacctggtaacttgaacaagaatatgcaagcaaaatctcctcccccaatgaatttaggaatgaataaccgtaaaccagatctccgagttcttattccaccaggcagcaagaatacgatgccatcagtgtctgaggatgtcgacctgcttttgaatcaaaggataaataactcccagtcggctcagtcattggctaccccagtggtttccgtagcaactcctactttaccaggacaaggaatgggaggatatccatcagccatttcaacaacatatggtaccgagtactctctgagtagtgcagacctgtcatctctgtctgggtttaacaccgccagcgctcttcaccttggttcagtaactggctggcaacagcaacacctacataacatgccaccatctgccctcagtcagttgggagaccgtaccaccaccccttcgagatacccacaacacacgcgccacgaggcggggagatctcctgttgacagcttgagcagctgtagcagttcgtacgacgggagcgaccgagaggatcaccggaacgaattccactcccccattggactcaccagaccttcgccggacgaaagggaaagtccctcagtcaagcgcatgcgactttctgaaggatgggcaacatagtaatgaactagtccgtaacttgaaagtatttcgatttcttggctttatatatcttgtggaaaggacgagaaactgtacagtaggaatgagtc

SEQ ID NO: 381 - DNA, 1553 bp, Homo sapiens
  source 1..1553: mol_type = genomic DNA
accgccaccatggggagaaaaaagattcagattacgaggattatggatgaacgtaacagacaggtgacatttacaaagaggaaatttgggttgatgaagaaggcttatgagctgagcgtgctgtgtgactgtgagattgcgctgatcatcttcaacagcaccaacaagctgttccagtatgccagcaccgacatggacaaagtgcttctcaagtacacggagtacaacgagccgcatgagagccggacaaactcagacatcgtggagacgttgagaaagaagggccttaatggctgtgacagcccagaccccgatgcggacgattccgcattgaacaagaaagaaaacaaaggctgtgaaagccccgatcccgactcctcttatgcactcaccccacgcactgaagaaaaatacaaaaaaattaatgaagaatttgataatatgatcaagagtcataaaattcctgctgttccacctcccaacttcgagatgccagtctccatcccagtgtccagccacaacagtttggtgtacagcaaccctgtcagctcactgggaaaccccaacctattgccactggctcacccttctctgcagaggaatagtatgtctcctggtgtaacacatcgacctccaagtgcaggtaacacaggtggtctgatgggtggagacctcacgtctggtgcaggcaccagtgcagggaacgggtatggcaatccccgaaactcaccaggtctgctggtctcacctggtaacttgaacaagaatatgcaagcaaaatctcctcccccaatgaatttaggaatgaataaccgtaaaccagatctccgagttcttattccaccaggcagcaagaatacgatgccatcagtgaatcaaaggataaataactcccagtcggctcagtcattggctaccccagtggtttccgtagcaactcctactttaccaggacaaggaatgggaggatatccatcagccatttcaacaacatatggtaccgagtactctctgagtagtgcagacctgtcatctctgtctgggtttaacaccgccagcgctcttcaccttggttcagtaactggctggcaacagcaacacctacataacatgccaccatctgccctcagtcagttgggagcttgcactagcactcatttatctcagagttcaaatctctccctgccttctactcaaagcctcaacatcaagtcagaacctgtttctcctcctagagaccgtaccaccaccccttcgagatacccacaacacacgcgccacgaggcggggagatctcctgttgacagcttgagcagctgtagcagttcgtacgacgggagcgaccgagaggatcaccggaacgaattccactcccccattggactcaccagaccttcgccggacgaaagggaaagtccctcagtcaagcgcatgcgactttctgaaggatgggcaacatagtaatgaactagtccgtaacttgaaagtatttcgatttcttggctttatatatcttgtggaaaggacgagccgtacgcaatcccttcctagtt

SEQ ID NO: 382 - DNA, 1208 bp, Homo sapiens
  source 1..1208: mol_type = genomic DNA
accgccaccatggggaggaaaaaaatccagatctcccgcatcctggaccaaaggaatcggcaggtgacgttcaccaagcggaagttcgggctgatgaagaaggcctatgagctgagcgtgctctgtgactgtgagatagccctcatcatcttcaacagcgccaaccgcctcttccagtatgccagcacggacatggaccgtgtgctgctgaagtacacagagtacagcgagccccacgagagccgcaccaacactgacatcctcgagacgctgaagcggaggggcattggcctcgatgggccagagctggagccggatgaagggcctgaggagccaggagagaagtttcggaggctggcaggcgaagggggtgatccggccttgccccgaccccggctgtatcctgcagctcctgctatgcccagcccagatgtggtatacggggccttaccgccaccaggctgtgaccccagtgggcttggggaagcactgcccgcccagagccgcccatctcccttccgaccagcagcccccaaagccgggcccccaggcctggtgcaccctctcttctcaccaagccacctcaccagcaagacaccacccccactgtacctgccgacggaagggcggaggtcagacctgcctggtggcctggctgggccccgagggggactaaacacctccagaagcctctacagtggcctgcagaacccctgctccactgcaactcccggacccccactggggagcttccccttcctccccggaggccccccagaatatggcctgggagaccctccaccgccccctggcttgttgcagccccccaccctggccccctggcagccctcgaggggtgatgggccccccgccgtgtcctcccagcccagtgggggccgaagcctgggcgaggagggtcccccaacccgcggcgcctccccgccgacccccccagtcagcatcaagtctgagcgcctctctccggcccccgggggccccggcgactttcctaagaccttcccctatcccttgctcctcgcccggtccctggcagagcctctgcggcctgggcccgccctgcgccggctgcccttggccgacggctggccccggtagtaatgaactagtccgtaacttgaaagtatttcgatttcttggctttatatatcttgtggaaaggacgagcgtctacaaatttagctttagtc

SEQ ID NO: 383 - DNA, 1415 bp, Homo sapiens
  source 1..1415: mol_type = genomic DNA
accgccaccatggggcggaagaaaatacaaatcacacgcataatggatgaaaggaaccgacagactttaagaaagaaaggccttaatggttgtgagagccctgatgctgacgattactttgagcacagtccactctcggaggacagattcagcaaactaaatgaagatagtgattttattttcaaacgaggccctcctggtctgccacctcagaacttttcaatgtctgtcacagttccagtgaccagccccaatgctttgtcctacactaacccagggagttcactggtgtccccatctttggcagccagctcaacgttaacagattcaagcatgctctctccacctcaaaccacattacatagaaatgtgtctcctggagctcctcagagaccaccaagtactggcaatgcaggtgggatgttgagcactacagacctcacagtgccaaatggagctggaagcagtccagtggggaatggatttgtaaactcaagagcttctccaaatttgattggagctactggtgcaaatagcttaggcaaagtcatgcctacaaagtctccccctccaccaggtggtggtaatcttggaatgaacagtaggaaaccagatcttcgagttgtcatccccccttcaagcaagggcatgatgcctccactatcggaggaagaggaattggagttgaatacccagaggatcagtagttctcaagccactcaacctcttgctaccccagtcgtgtctgtgacaaccccaagcttgcctccgcaaggacttgtgtactcagcaatgccgactgcctacaacactgattattcactgaccagcgctgacctgtcagcccttcaaggcttcaactcgccaggaatgctgtcgctgggacaggtgtcggcctggcagcagcaccacctaggacaagcagccctcagctctcttgttgctggagggcagttatctcagggttccaatttatccattaataccaaccaaaacatcagcatcaagtccgaaccgatttcacctcctcgggatcgtatgaccccatcgggcttccagcagcagcagcagcagcagcagcagcagcagccgccgccaccaccgcagccccagccacaacccccgcagccccagccccgacaggaaatggggcgctcccctgtggacagtctgagcagctctagtagctcctatgatggcagtgatcgggaggatccacggggcgacttccattctccaattgtgcttggccgacccccaaacactgaggacagagaaagcccttctgtaaagcgaatgaggatggacgcgtgggtgacctagtaatgaactagtccgtaacttgaaagtatttcgatttcttggctttatatatcttgtggaaaggacgagaatctcggcaacggcatgggtta

SEQ ID NO: 384 - DNA, 1595 bp, Homo sapiens
  source 1..1595: mol_type = genomic DNA
accgccaccatggggcggaagaaaatacaaatcacacgcataatggatgaaaggaaccgacaggtcacttttacaaagagaaagtttggattaatgaagaaagcctatgaacttagtgtgctctgtgactgtgaaatagcactcatcattttcaacagctctaacaaactgtttcaatatgctagcactgatatggacaaagttcttctcaagtatacagaatataatgaacctcatgaaagcagaaccaactcggatattgttgagactttaagaaagaaaggccttaatggttgtgagagccctgatgctgacgattactttgagcacagtccactctcggaggacagattcagcaaactaaatgaagatagtgattttattttcaaacgaggccctcctggtctgccacctcagaacttttcaatgtctgtcacagttccagtgaccagccccaatgctttgtcctacactaacccagggagttcactggtgtccccatctttggcagccagctcaacgttaacagattcaagcatgctctctccacctcaaaccacattacatagaaatgtgtctcctggagctcctcagagaccaccaagtactggcaatgcaggtgggatgttgagcactacagacctcacagtgccaaatggagctggaagcagtccagtggggaatggatttgtaaactcaagagcttctccaaatttgattggagctactggtgcaaatagcttaggcaaagtcatgcctacaaagtctccccctccaccaggtggtggtaatcttggaatgaacagtaggaaaccagatcttcgagttgtcatccccccttcaagcaagggcatgatgcctccactaaatacccagaggatcagtagttctcaagccactcaacctcttgctaccccagtcgtgtctgtgacaaccccaagcttgcctccgcaaggacttgtgtactcagcaatgccgactgcctacaacactgattattcactgaccagcgctgacctgtcagcccttcaaggcttcaactcgccaggaatgctgtcgctgggacaggtgtcggcctggcagcagcaccacctaggacaagcagccctcagctctcttgttgctggagggcagttatctcagggttccaatttatccattaataccaaccaaaacatcagcatcaagtccgaaccgatttcacctcctcgggatcgtatgaccccatcgggcttccagcagcagcagcagcagcagcagcagcagcagccgccgccaccaccgcagccccagccacaacccccgcagccccagccccgacaggaaatggggcgctcccctgtggacagtctgagcagctctagtagctcctatgatggcagtgatcgggaggatccacggggcgacttccattctccaattgtgcttggccgacccccaaacactgaggacagagaaagcccttctgtaaagcgaatgaggatggacgcgtgggtgacctagtaatgaactagtccgtaacttgaaagtatttcgatttcttggctttatatatcttgtggaaaggacgatcgtcggctaggtaggctgaggtt

SEQ ID NO: 385 - DNA, 1619 bp, Homo sapiens
  source 1..1619: mol_type = genomic DNA
accgccaccatggggcggaagaaaatacaaatcacacgcataatggatgaaaggaaccgacaggtcacttttacaaagagaaagtttggattaatgaagaaagcctatgaacttagtgtgctctgtgactgtgaaatagcactcatcattttcaacagctctaacaaactgtttcaatatgctagcactgatatggacaaagttcttctcaagtatacagaatataatgaacctcatgaaagcagaaccaactcggatattgttgagactttaagaaagaaaggccttaatggttgtgagagccctgatgctgacgattactttgagcacagtccactctcggaggacagattcagcaaactaaatgaagatagtgattttattttcaaacgaggccctcctggtctgccacctcagaacttttcaatgtctgtcacagttccagtgaccagccccaatgctttgtcctacactaacccagggagttcactggtgtccccatctttggcagccagctcaacgttaacagattcaagcatgctctctccacctcaaaccacattacatagaaatgtgtctcctggagctcctcagagaccaccaagtactggcaatgcaggtgggatgttgagcactacagacctcacagtgccaaatggagctggaagcagtccagtggggaatggatttgtaaactcaagagcttctccaaatttgattggagctactggtgcaaatagcttaggcaaagtcatgcctacaaagtctccccctccaccaggtggtggtaatcttggaatgaacagtaggaaaccagatcttcgagttgtcatccccccttcaagcaagggcatgatgcctccactatcggaggaagaggaattggagttgaatacccagaggatcagtagttctcaagccactcaacctcttgctaccccagtcgtgtctgtgacaaccccaagcttgcctccgcaaggacttgtgtactcagcaatgccgactgcctacaacactgattattcactgaccagcgctgacctgtcagcccttcaaggcttcaactcgccaggaatgctgtcgctgggacaggtgtcggcctggcagcagcaccacctaggacaagcagccctcagctctcttgttgctggagggcagttatctcagggttccaatttatccattaataccaaccaaaacatcagcatcaagtccgaaccgatttcacctcctcgggatcgtatgaccccatcgggcttccagcagcagcagcagcagcagcagcagcagcagccgccgccaccaccgcagccccagccacaacccccgcagccccagccccgacaggaaatggggcgctcccctgtggacagtctgagcagctctagtagctcctatgatggcagtgatcgggaggatccacggggcgacttccattctccaattgtgcttggccgacccccaaacactgaggacagagaaagcccttctgtaaagcgaatgaggatggacgcgtgggtgacctagtaatgaactagtccgtaacttgaaagtatttcgatttcttggctttatatatcttgtggaaaggacgagtgctctcggtgcggaggatgtaa

SEQ ID NO: 386 - DNA, 1391 bp, Homo sapiens
  source 1..1391: mol_type = genomic DNA
accgccaccatggggcggaagaaaatacaaatcacacgcataatggatgaaaggaaccgacagactttaagaaagaaaggccttaatggttgtgagagccctgatgctgacgattactttgagcacagtccactctcggaggacagattcagcaaactaaatgaagatagtgattttattttcaaacgaggccctcctggtctgccacctcagaacttttcaatgtctgtcacagttccagtgaccagccccaatgctttgtcctacactaacccagggagttcactggtgtccccatctttggcagccagctcaacgttaacagattcaagcatgctctctccacctcaaaccacattacatagaaatgtgtctcctggagctcctcagagaccaccaagtactggcaatgcaggtgggatgttgagcactacagacctcacagtgccaaatggagctggaagcagtccagtggggaatggatttgtaaactcaagagcttctccaaatttgattggagctactggtgcaaatagcttaggcaaagtcatgcctacaaagtctccccctccaccaggtggtggtaatcttggaatgaacagtaggaaaccagatcttcgagttgtcatccccccttcaagcaagggcatgatgcctccactaaatacccagaggatcagtagttctcaagccactcaacctcttgctaccccagtcgtgtctgtgacaaccccaagcttgcctccgcaaggacttgtgtactcagcaatgccgactgcctacaacactgattattcactgaccagcgctgacctgtcagcccttcaaggcttcaactcgccaggaatgctgtcgctgggacaggtgtcggcctggcagcagcaccacctaggacaagcagccctcagctctcttgttgctggagggcagttatctcagggttccaatttatccattaataccaaccaaaacatcagcatcaagtccgaaccgatttcacctcctcgggatcgtatgaccccatcgggcttccagcagcagcagcagcagcagcagcagcagcagccgccgccaccaccgcagccccagccacaacccccgcagccccagccccgacaggaaatggggcgctcccctgtggacagtctgagcagctctagtagctcctatgatggcagtgatcgggaggatccacggggcgacttccattctccaattgtgcttggccgacccccaaacactgaggacagagaaagcccttctgtaaagcgaatgaggatggacgcgtgggtgacctagtaatgaactagtccgtaacttgaaagtatttcgatttcttggctttatatatcttgtggaaaggacgatatactaaccacgcccgttacaag

SEQ ID NO: 387 - DNA, 428 bp, Homo sapiens
  source 1..428: mol_type = genomic DNA
accgccaccatggctgtaactggagatgacacagctgccactggtgacatgccaacttaccagatccgagctcctactgctgctttgccacagggagtggtgatggctgcatcgcccggaagtttgcacagtccccagcagctggcagaagaagcaacacgcaaacgagagctgaggctaatgaaaaacagggaagctgcccgggagtgtcgcaggaagaagaaagaatatgtcaaatgtcttgaaaatcgtgtggctgtgcttgaaaaccaaaacaagactctcattgaggaactcaaggccctcaaagatctttattgccataaagtagagtagtaatgaactagtccgtaacttgaaagtatttcgatttcttggctttatatatcttgtggaaaggacgaccttatccgctagtacccaggcta

SEQ ID NO: 388 - DNA, 464 bp, Homo sapiens
  source 1..464: mol_type = genomic DNA
accgccaccatggctgtaactggagatgacacagatgaggaaactgaacttgccccaagtcacatggctgctgccactggtgacatgccaacttaccagatccgagctcctactgctgctttgccacagggagtggtgatggctgcatcgcccggaagtttgcacagtccccagcagctggcagaagaagcaacacgcaaacgagagctgaggctaatgaaaaacagggaagctgcccgggagtgtcgcaggaagaagaaagaatatgtcaaatgtcttgaaaatcgtgtggctgtgcttgaaaaccaaaacaagactctcattgaggaactcaaggccctcaaagatctttattgccataaagtagagtagtaatgaactagtccgtaacttgaaagtatttcgatttcttggctttatatatcttgtggaaaggacgacgtgtcatgtatctcacgtacagt

SEQ ID NO: 389 - DNA, 479 bp, Homo sapiens
  source 1..479: mol_type = genomic DNA
accgccaccatgaacagaactcaggagttgtctggccagcttagtgatgaggaaactgaacttgccccaagtcacatggctgctgccactggtgacatgccaacttaccagatccgagctcctactgctgctttgccacagggagtggtgatggctgcatcgcccggaagtttgcacagtccccagcagctggcagaagaagcaacacgcaaacgagagctgaggctaatgaaaaacagggaagctgccaaagaatgtcgacgtcgaaagaaagaatatgtaaaatgtctggagagccgagttgcagtgctggaagtccagaacaagaagcttatagaggaacttgaaaccttgaaagacatttgttctcccaaaacagattactagtaatgaactagtccgtaacttgaaagtatttcgatttcttggctttatatatcttgtggaaaggacgaagccaccgtatcatgaacgcttcc

SEQ ID NO: 390 - DNA, 767 bp, Homo sapiens
  source 1..767: mol_type = genomic DNA
accgccaccatgaccatggaaacagttgaatcccagcatgatggaagtataacagcttctttgacagagagcaagtctgctcatgtgcagactcagactggccaaaattcaatccctgctttagctcaggtagcagcaattgcagagacagatgaatctgcagaatcagaaggtgtaattgattctcataaacgtagagaaatcctttcacgaagaccctcttataggaaaatactgaatgaactgtcctctgatgtgcctggtgttcccaagattgaagaagagagatcagaggaagaaggaacaccacctagtattgctaccatggcagtaccaactagcatatatcagactagcacggggcaatacactgccactggtgacatgccaacttaccagatccgagctcctactgctgctttgccacagggagtggtgatggctgcatcgcccggaagtttgcacagtccccagcagctggcagaagaagcaacacgcaaacgagagctgaggctaatgaaaaacagggaagctgccaaagaatgtcgacgtcgaaagaaagaatatgtaaaatgtctggagagccgagttgcagtgctggaagtccagaacaagaagcttatagaggaacttgaaaccttgaaagacatttgttctcccaaaacagattactagtaatgaactagtccgtaacttgaaagtatttcgatttcttggctttatatatcttgtggaaaggacgaatcatcttctttcagcgtgttgcg

SEQ ID NO: 391 - DNA, 1004 bp, Homo sapiens
  source 1..1004: mol_type = genomic DNA
accgccaccatgagcaaatgtgcaaggaaaaaatatattaagacaaatccaagacaaatgaccatggaaacagttgaatcccagcatgatggaagtataacagcttctttgacagagagcaagtctgctcatgtgcagactcagactggccaaaattcaatccctgctttagctcaggtagcagcaattgcagagacagatgaatctgcagaatcagaaggtgtaattgattctcataaacgtagagaaatcctttcacgaagaccctcttataggaaaatactgaatgaactgtcctctgatgtgcctggtgttcccaagattgaagaagagagatcagaggaagaaggaacaccacctagtattgctaccatggcagtaccaactagcatatatcagactagcacggggcaatacattgctatagcccaaggtggaacaatccagatttctaacccaggatctgatggtgttcagggactgcaggcattaacaatgacaaattcaggagctcctccaccaggtgctacaattgtacagtacgcagcacaatcagctgatggcacacagcagttctttgtcccaggcagccaggttgttgttcaagctgccactggtgacatgccaacttaccagatccgagctcctactgctgctttgccacagggagtggtgatggctgcatcgcccggaagtttgcacagtccccagcagctggcagaagaagcaacacgcaaacgagagctgaggctaatgaaaaacagggaagctgccaaagaatgtcgacgtcgaaagaaagaatatgtaaaatgtctggagagccgagttgcagtgctggaagtccagaacaagaagcttatagaggaacttgaaaccttgaaagacatttgttctcccaaaacagattactagtaatgaactagtccgtaacttgaaagtatttcgatttcttggctttatatatcttgtggaaaggacgagatgggattcgagacttgctcttg

SEQ ID NO: 392 - DNA, 431 bp, Homo sapiens
  source 1..431: mol_type = genomic DNA
accgccaccatggctgtaactggagatgacacagctgccactggtgacatgccaacttaccagatccgagctcctactgctgctttgccacagggagtggtgatggctgcatcgcccggaagtttgcacagtccccagcagctggcagaagaagcaacacgcaaacgagagctgaggctaatgaaaaacagggaagctgccaaagaatgtcgacgtcgaaagaaagaatatgtaaaatgtctggagagccgagttgcagtgctggaagtccagaacaagaagcttatagaggaacttgaaaccttgaaagacatttgttctcccaaaacagattactagtaatgaactagtccgtaacttgaaagtatttcgatttcttggctttatatatcttgtggaaaggacgaaaagattgagttctcgctactagc

SEQ ID NO: 393 - DNA, 839 bp, Homo sapiens
  source 1..839: mol_type = genomic DNA
accgccaccatggtagcagcaattgcagagacagatgaatctgcagaatcagaaggtgtaattgattctcataaacgtagagaaatcctttcacgaagaccctcttataggaaaatactgaatgaactgtcctctgatgtgcctggtgttcccaagattgaagaagagagatcagaggaagaaggaacaccacctagtattgctaccatggcagtaccaactagcatatatcagactagcacggggcaatacattgctatagcccaaggtggaacaatccagatttctaacccaggatctgatggtgttcagggactgcaggcattaacaatgacaaattcaggagctcctccaccaggtgctacaattgtacagtacgcagcacaatcagctgatggcacacagcagttctttgtcccaggcagccaggttgttgttcaagctgccactggtgacatgccaacttaccagatccgagctcctactgctgctttgccacagggagtggtgatggctgcatcgcccggaagtttgcacagtccccagcagctggcagaagaagcaacacgcaaacgagagctgaggctaatgaaaaacagggaagctgccaaagaatgtcgacgtcgaaagaaagaatatgtaaaatgtctggagagccgagttgcagtgctggaagtccagaacaagaagcttatagaggaacttgaaaccttgaaagacatttgttctcccaaaacagattactagtaatgaactagtccgtaacttgaaagtatttcgatttcttggctttatatatcttgtggaaaggacgactgggtgtatcaaataggagcgat

SEQ ID NO: 394 - DNA, 467 bp, Homo sapiens
  source 1..467: mol_type = genomic DNA
accgccaccatggctgtaactggagatgacacagatgaggaaactgaacttgccccaagtcacatggctgctgccactggtgacatgccaacttaccagatccgagctcctactgctgctttgccacagggagtggtgatggctgcatcgcccggaagtttgcacagtccccagcagctggcagaagaagcaacacgcaaacgagagctgaggctaatgaaaaacagggaagctgccaaagaatgtcgacgtcgaaagaaagaatatgtaaaatgtctggagagccgagttgcagtgctggaagtccagaacaagaagcttatagaggaacttgaaaccttgaaagacatttgttctcccaaaacagattactagtaatgaactagtccgtaacttgaaagtatttcgatttcttggctttatatatcttgtggaaaggacgaccgccctctaccgtctgcgtaggc

SEQ ID NO: 395 - DNA, 440 bp, Homo sapiens
  source 1..440: mol_type = genomic DNA
accgccaccatgaacagaactcaggagttgtctggccagcttagtgctgccactggtgacatgccaacttaccagatccgagctcctactgctgctttgccacagggagtggtgatggctgcatcgcccggaagtttgcacagtccccagcagctggcagaagaagcaacacgcaaacgagagctgaggctaatgaaaaacagggaagctgcccgggagtgtcgcaggaagaagaaagaatatgtcaaatgtcttgaaaatcgtgtggctgtgcttgaaaaccaaaacaagactctcattgaggaactcaaggccctcaaagatctttattgccataaagtagagtagtaatgaactagtccgtaacttgaaagtatttcgatttcttggctttatatatcttgtggaaaggacgaagtggcaggagttcccgtgattgc

SEQ ID NO: 396 - DNA, 950 bp, Homo sapiens
  source 1..950: mol_type = genomic DNA
accgccaccatgtggtggcatcagcataatctatgtttcaggcgtcctatagaagaggattattcttcaggggatgtggaagaaaaggtagcagcaattgcagagacagatgaatctgcagaatcagaaggtgtaattgattctcataaacgtagagaaatcctttcacgaagaccctcttataggaaaatactgaatgaactgtcctctgatgtgcctggtgttcccaagattgaagaagagagatcagaggaagaaggaacaccacctagtattgctaccatggcagtaccaactagcatatatcagactagcacggggcaatacattgctatagcccaaggtggaacaatccagatttctaacccaggatctgatggtgttcagggactgcaggcattaacaatgacaaattcaggagctcctccaccaggtgctacaattgtacagtacgcagcacaatcagctgatggcacacagcagttctttgtcccaggcagccaggttgttgttcaagatgaggaaactgaacttgccccaagtcacatggctgctgccactggtgacatgccaacttaccagatccgagctcctactgctgctttgccacagggagtggtgatggctgcatcgcccggaagtttgcacagtccccagcagctggcagaagaagcaacacgcaaacgagagctgaggctaatgaaaaacagggaagctgccaaagaatgtcgacgtcgaaagaaagaatatgtaaaatgtctggagagccgagttgcagtgctggaagtccagaacaagaagcttatagaggaacttgaaaccttgaaagacatttgttctcccaaaacagattactagtaatgaactagtccgtaacttgaaagtatttcgatttcttggctttatatatcttgtggaaaggacgactttctagttatctcagtcgtccg

SEQ ID NO: 397 - DNA, 914 bp, Homo sapiens
  source 1..914: mol_type = genomic DNA
accgccaccatgtggtggcatcagcataatctatgtttcaggcgtcctatagaagaggattattcttcaggggatgtggaagaaaaggtagcagcaattgcagagacagatgaatctgcagaatcagaaggtgtaattgattctcataaacgtagagaaatcctttcacgaagaccctcttataggaaaatactgaatgaactgtcctctgatgtgcctggtgttcccaagattgaagaagagagatcagaggaagaaggaacaccacctagtattgctaccatggcagtaccaactagcatatatcagactagcacggggcaatacattgctatagcccaaggtggaacaatccagatttctaacccaggatctgatggtgttcagggactgcaggcattaacaatgacaaattcaggagctcctccaccaggtgctacaattgtacagtacgcagcacaatcagctgatggcacacagcagttctttgtcccaggcagccaggttgttgttcaagctgccactggtgacatgccaacttaccagatccgagctcctactgctgctttgccacagggagtggtgatggctgcatcgcccggaagtttgcacagtccccagcagctggcagaagaagcaacacgcaaacgagagctgaggctaatgaaaaacagggaagctgccaaagaatgtcgacgtcgaaagaaagaatatgtaaaatgtctggagagccgagttgcagtgctggaagtccagaacaagaagcttatagaggaacttgaaaccttgaaagacatttgttctcccaaaacagattactagtaatgaactagtccgtaacttgaaagtatttcgatttcttggctttatatatcttgtggaaaggacgagctctaatcgcatcgaaagcgtgc

SEQ ID NO: 398 - DNA, 812 bp, Homo sapiens
  source 1..812: mol_type = genomic DNA
accgccaccatgagcaaatgtgcaaggaaaaaatatattaagacaaatccaagacaaatgaccatggaaacagttgaatcccagcatgatggaagtataacagcttctttgacagagagcaagtctgctcatgtgcagactcagactggccaaaattcaatccctgctttagctcaggtagcagcaattgcagagacagatgaatctgcagaatcagaaggtgtaattgattctcataaacgtagagaaatcctttcacgaagaccctcttataggaaaatactgaatgaactgtcctctgatgtgcctggtgttcccaagattgaagaagagagatcagaggaagaaggaacaccacctagtattgctaccatggcagtaccaactagcatatatcagactagcacggggcaatacactgccactggtgacatgccaacttaccagatccgagctcctactgctgctttgccacagggagtggtgatggctgcatcgcccggaagtttgcacagtccccagcagctggcagaagaagcaacacgcaaacgagagctgaggctaatgaaaaacagggaagctgcccgggagtgtcgcaggaagaagaaagaatatgtcaaatgtcttgaaaatcgtgtggctgtgcttgaaaaccaaaacaagactctcattgaggaactcaaggccctcaaagatctttattgccataaagtagagtagtaatgaactagtccgtaacttgaaagtatttcgatttcttggctttatatatcttgtggaaaggacgacgtgctctctacattgcatgtcca

SEQ ID NO: 399 - DNA, 443 bp, Homo sapiens
  source 1..443: mol_type = genomic DNA
accgccaccatgaacagaactcaggagttgtctggccagcttagtgctgccactggtgacatgccaacttaccagatccgagctcctactgctgctttgccacagggagtggtgatggctgcatcgcccggaagtttgcacagtccccagcagctggcagaagaagcaacacgcaaacgagagctgaggctaatgaaaaacagggaagctgccaaagaatgtcgacgtcgaaagaaagaatatgtaaaatgtctggagagccgagttgcagtgctggaagtccagaacaagaagcttatagaggaacttgaaaccttgaaagacatttgttctcccaaaacagattactagtaatgaactagtccgtaacttgaaagtatttcgatttcttggctttatatatcttgtggaaaggacgactcagagggacctggccttctgcg

SEQ ID NO: 400 - DNA, 848 bp, Homo sapiens
  source 1..848: mol_type = genomic DNA
accgccaccatgagcaaatgtgcaaggaaaaaatatattaagacaaatccaagacaaatgaccatggaaacagttgaatcccagcatgatggaagtataacagcttctttgacagagagcaagtctgctcatgtgcagactcagactggccaaaattcaatccctgctttagctcaggtagcagcaattgcagagacagatgaatctgcagaatcagaaggtgtaattgattctcataaacgtagagaaatcctttcacgaagaccctcttataggaaaatactgaatgaactgtcctctgatgtgcctggtgttcccaagattgaagaagagagatcagaggaagaaggaacaccacctagtattgctaccatggcagtaccaactagcatatatcagactagcacggggcaatacaatgaggaaactgaacttgccccaagtcacatggctgctgccactggtgacatgccaacttaccagatccgagctcctactgctgctttgccacagggagtggtgatggctgcatcgcccggaagtttgcacagtccccagcagctggcagaagaagcaacacgcaaacgagagctgaggctaatgaaaaacagggaagctgcccgggagtgtcgcaggaagaagaaagaatatgtcaaatgtcttgaaaatcgtgtggctgtgcttgaaaaccaaaacaagactctcattgaggaactcaaggccctcaaagatctttattgccataaagtagagtagtaatgaactagtccgtaacttgaaagtatttcgatttcttggctttatatatcttgtggaaaggacgatgaagtgcgtggcgtgcgacgcct

SEQ ID NO: 401 - DNA, 1040 bp, Homo sapiens
  source 1..1040: mol_type = genomic DNA
accgccaccatgagcaaatgtgcaaggaaaaaatatattaagacaaatccaagacaaatgaccatggaaacagttgaatcccagcatgatggaagtataacagcttctttgacagagagcaagtctgctcatgtgcagactcagactggccaaaattcaatccctgctttagctcaggtagcagcaattgcagagacagatgaatctgcagaatcagaaggtgtaattgattctcataaacgtagagaaatcctttcacgaagaccctcttataggaaaatactgaatgaactgtcctctgatgtgcctggtgttcccaagattgaagaagagagatcagaggaagaaggaacaccacctagtattgctaccatggcagtaccaactagcatatatcagactagcacggggcaatacattgctatagcccaaggtggaacaatccagatttctaacccaggatctgatggtgttcagggactgcaggcattaacaatgacaaattcaggagctcctccaccaggtgctacaattgtacagtacgcagcacaatcagctgatggcacacagcagttctttgtcccaggcagccaggttgttgttcaagatgaggaaactgaacttgccccaagtcacatggctgctgccactggtgacatgccaacttaccagatccgagctcctactgctgctttgccacagggagtggtgatggctgcatcgcccggaagtttgcacagtccccagcagctggcagaagaagcaacacgcaaacgagagctgaggctaatgaaaaacagggaagctgccaaagaatgtcgacgtcgaaagaaagaatatgtaaaatgtctggagagccgagttgcagtgctggaagtccagaacaagaagcttatagaggaacttgaaaccttgaaagacatttgttctcccaaaacagattactagtaatgaactagtccgtaacttgaaagtatttcgatttcttggctttatatatcttgtggaaaggacgagccggtccgctcacgactaactaa

SEQ ID NO: 402 - DNA, 1001 bp, Homo sapiens
  source 1..1001: mol_type = genomic DNA
accgccaccatgagcaaatgtgcaaggaaaaaatatattaagacaaatccaagacaaatgaccatggaaacagttgaatcccagcatgatggaagtataacagcttctttgacagagagcaagtctgctcatgtgcagactcagactggccaaaattcaatccctgctttagctcaggtagcagcaattgcagagacagatgaatctgcagaatcagaaggtgtaattgattctcataaacgtagagaaatcctttcacgaagaccctcttataggaaaatactgaatgaactgtcctctgatgtgcctggtgttcccaagattgaagaagagagatcagaggaagaaggaacaccacctagtattgctaccatggcagtaccaactagcatatatcagactagcacggggcaatacattgctatagcccaaggtggaacaatccagatttctaacccaggatctgatggtgttcagggactgcaggcattaacaatgacaaattcaggagctcctccaccaggtgctacaattgtacagtacgcagcacaatcagctgatggcacacagcagttctttgtcccaggcagccaggttgttgttcaagctgccactggtgacatgccaacttaccagatccgagctcctactgctgctttgccacagggagtggtgatggctgcatcgcccggaagtttgcacagtccccagcagctggcagaagaagcaacacgcaaacgagagctgaggctaatgaaaaacagggaagctgcccgggagtgtcgcaggaagaagaaagaatatgtcaaatgtcttgaaaatcgtgtggctgtgcttgaaaaccaaaacaagactctcattgaggaactcaaggccctcaaagatctttattgccataaagtagagtagtaatgaactagtccgtaacttgaaagtatttcgatttcttggctttatatatcttgtggaaaggacgaacatttcacagtgtactccggccg

SEQ ID NO: 403 - DNA, 518 bp, Homo sapiens
  source 1..518: mol_type = genomic DNA
accgccaccatgacaaattcaggagctcctccaccaggtgctacaattgtacagtacgcagcacaatcagctgatggcacacagcagttctttgtcccaggcagccaggttgttgttcaagctgccactggtgacatgccaacttaccagatccgagctcctactgctgctttgccacagggagtggtgatggctgcatcgcccggaagtttgcacagtccccagcagctggcagaagaagcaacacgcaaacgagagctgaggctaatgaaaaacagggaagctgccaaagaatgtcgacgtcgaaagaaagaatatgtaaaatgtctggagagccgagttgcagtgctggaagtccagaacaagaagcttatagaggaacttgaaaccttgaaagacatttgttctcccaaaacagattactagtaatgaactagtccgtaacttgaaagtatttcgatttcttggctttatatatcttgtggaaaggacgaggtagccgccagcatttacttggc

SEQ ID NO: 404 - DNA, 515 bp, Homo sapiens
  source 1..515: mol_type = genomic DNA
accgccaccatgaccatggaaacagttgaatcccagcatgatggaagtataacagcttctttgacagagagcaagtctgctcatgtgcagactcagactggccaaaattcaatccctgctttagctcaggtagcagcaattgcagagacagatgaatctgcagaatcagaaggtgtaattgattctcataaacgtagagaaatcctttcacgaagaccctcttataggaaaatactgaatgaactgtcctctgatgtgcctggtgttcccaagattgaagaagagagatcagaggaagaaggaacaccacctagtattgctaccatggcagtaccaactagcatatatcagactagcacggggcaatacagtatgtatgctgcaattcgatatgatacagtgctagctttaagtcttctctagtaatgaactagtccgtaacttgaaagtatttcgatttcttggctttatatatcttgtggaaaggacgatccagcacgttgagaggagctgga

SEQ ID NO: 405 - DNA, 410 bp, Homo sapiens
  source 1..410: mol_type = genomic DNA
accgccaccatggctgctgccactggtgacatgccaacttaccagatccgagctcctactgctgctttgccacagggagtggtgatggctgcatcgcccggaagtttgcacagtccccagcagctggcagaagaagcaacacgcaaacgagagctgaggctaatgaaaaacagggaagctgcccgggagtgtcgcaggaagaagaaagaatatgtcaaatgtcttgaaaatcgtgtggctgtgcttgaaaaccaaaacaagactctcattgaggaactcaaggccctcaaagatctttattgccataaagtagagtagtaatgaactagtccgtaacttgaaagtatttcgatttcttggctttatatatcttgtggaaaggacgagggccacataatcgactaggccta

SEQ ID NO: 406 - DNA, 1646 bp, Homo sapiens
  source 1..1646: mol_type = genomic DNA
accgccaccatggggaggaaaaagattcagatccagcgaatcaccgacgagcggaaccgacaggtgactttcaccaagcggaagtttggcctgatgaagaaggcgtatgagctgagcgtgctatgtgactgcgagatcgcactcatcatcttcaaccactccaacaagctgttccagtacgccagcaccgacatggacaaggtgctgctcaagtacacggagtacaatgagccacacgagagccgcaccaacgccgacatcatcgagaccctgaggaagaagggcttcaacggctgcgacagccccgagcccgacggggaggactcgctggaacagagccccctgctggaggacaagtaccgacgcgccagcgaggagctcgacgggctcttccggcgctatgggtcaactgtcccggcccccaactttgccatgcctgtcacggtgcccgtgtccaatcagagctcactgcagttcagcaatcccagcggctccctggtcaccccttccctggtgacatcatccctcacggacccgcggctcctgtccccccagcagccagcactacagaggaacagtgtgtctcctggcctgccccagcggccagctagtgcgggggccatgctggggggtgacctgaacagtgctaacggagcctgccccagccctgttgggaatggctacgtcagtgctcgggcttcccctggcctcctccctgtggccaatggcaacagcctaaacaaggtcatccctgccaagtctccacccccacctacccacagcacccagcttggagcccccagccgcaagcccgacctgcgagtcatcacttcccaggcaggaaaggggttaatgcatcacttgaacaatgcccagcgccttggggtctcccagtctactcattcgctcaccaccccagtggtttctgtggcaacgccgagtttactcagccagggcctccccttctcttccatgcccactgcctacaacacagattaccagttgaccagtgcagagctctcctccttaccagcctttagttcacctggggggctgtcgctaggcaatgtcactgcctggcaacagccacagcagccccagcagccgcagcagccacagcctccacagcagcagccaccgcagccacagcagccacagccacagcagcctcagcagccgcaacagccacctcagcaacagtcccacctggtccctgtatctctcagcaacctcatcccgggcagccccctgccccacgtgggtgctgccctcacagtcaccacccacccccacatcagcatcaagtcagaaccggtgtccccaagccgtgagcgcagccctgcgcctccccctccagctgtgttcccagctgcccgccctgagcctggcgatggtctcagcagcccagccgggggatcctatgagacgggagaccgggatgacggacggggggacttcgggcccacactgggcctgctgcgcccagccccagagcctgaggctgagggctcagctgtgaagaggatgcggcttgatacctggacattaaagtagtaatgaactagtccgtaacttgaaagtatttcgatttcttggctttatatatcttgtggaaaggacgaagttgggaccagagtttcaagctc

SEQ ID NO: 407 - DNA, 1643 bp, Homo sapiens
  source 1..1643: mol_type = genomic DNA
accgccaccatggggaggaaaaagattcagatccagcgaatcaccgacgagcggaaccgacaggtgactttcaccaagcggaagtttggcctgatgaagaaggcgtatgagctgagcgtgctatgtgactgcgagatcgcactcatcatcttcaaccactccaacaagctgttccagtacgccagcaccgacatggacaaggtgctgctcaagtacacggagtacaatgagccacacgagagccgcaccaacgccgacatcatcgaggcgctgcacaagaagcacagggaatgtgagagccctgaggtggacgaggtgtttgccctgaccccccagacggaagagaaatataaaaagatagacgaggagtttgataaaatgatgcagagttatagactggcctcaactgtcccggcccccaactttgccatgcctgtcacggtgcccgtgtccaatcagagctcactgcagttcagcaatcccagcggctccctggtcaccccttccctggtgacatcatccctcacggacccgcggctcctgtccccccagcagccagcactacagaggaacagtgtgtctcctggcctgccccagcggccagctagtgcgggggccatgctggggggtgacctgaacagtgctaacggagcctgccccagccctgttgggaatggctacgtcagtgctcgggcttcccctggcctcctccctgtggccaatggcaacagcctaaacaaggtcatccctgccaagtctccacccccacctacccacagcacccagcttggagcccccagccgcaagcccgacctgcgagtcatcacttcccaggcaggaaaggggttaatgcatcacttgaacaatgcccagcgccttggggtctcccagtctactcattcgctcaccaccccagtggtttctgtggcaacgccgagtttactcagccagggcctccccttctcttccatgcccactgcctacaacacagattaccagttgaccagtgcagagctctcctccttaccagcctttagttcacctggggggctgtcgctaggcaatgtcactgcctggcaacagccacagcagccccagcagccgcagcagccacagcctccacagcagcagccaccgcagccacagcagccacagccacagcagcctcagcagccgcaacagccacctcagcaacagtcccacctggtccctgtatctctcagcaacctcatcccgggcagccccctgccccacgtgggtgctgccctcacagtcaccacccacccccacatcagcatcaagtcagaaccggtgtccccaagccgtgagcgcagccctgcgcctccccctccagctgtgttcccagctgcccgccctgagcctggcgatggtctcagcagcccagccgggggatcctatgagacgggagaccgggatgacggacggggggacttcgggcccacactgggcctgctgcgcccagccccagagcctgaggctgagggctcagctgtgaagaggatgcggcttgatacctggacattaaagtagtaatgaactagtccgtaacttgaaagtatttcgatttcttggctttatatatcttgtggaaaggacgagactgcagtagccgcagcggtacg

SEQ ID NO: 408 - DNA, 1553 bp, Homo sapiens
  source 1..1553: mol_type = genomic DNA
accgccaccatgaagagacatgagatggtagctaaacatttagttatgttttattattttgcccaacacctttggccagagcagaacataagagattctttccagaaagtgaccctaagaagatatagaaaatgtggatatgagaatttacagttaagaaaaggctgtaaaagtgtggttgagtgtaaacagcacaaaggagattatagtggacttaaccaatgtttgaaaactaccttgagcaaaatatttcaatgtaataaatatgtagaagttttccataaaatttcaaattcaaatagacacaagatgagacatactgaaaataaacattttaaatgtaaagaatgtcgcaaaacattttgcatgctttcacacctaactcaacataaaagaatccaaactagagtgaatttctacaaatgtgaagcatatggaagagcctttaactggtcctcaacccttaataaacataagagaattcatactggagaaaaaccttacaaatgtaaagaatgtggcaaagcctttaaccagacctcacaccttattagacataagagaattcatactgaagagaaaccctacaaatgtgaagaatgtggcaaagcctttaaccagtcatcgacccttactacacataatataattcatactggggaaattccctacaaatgtgagaaatgtgttagagcttttaaccaagcctcaaagcttactgaacataagttaattcataccggagagaaacgttatgaatgtgaagaatgcggcaaagcttttaaccgatcctcaaaacttactgaacataagtacattcatactggagagaagctgtacaaatgtgaagaatgtggtaaagcctttaaccagtcctcaacccttactacacataagagaattcatagtggagagaagccctacaaatgtgaagaatgtggcaaagcttttaaacaattttcaaatcttactgaccataaaaaaattcatactggagagaaaccctacaaatgtgaggaatgtggcaaagcttttaaccaactctcaaaccttactagacataaggtaattcatactggagagaaaccctacaaatgtggagaatgtggcaaagcctttaaccagtcctcagcccttaatacacataagataatccatactggagagaatccccacaaatgtagagaatctggcaaagttttccacctatcctcaaaacttagtacatgtaagaaaattcatactggagagaaactctacaaatgtgaagaatgtggcaaagcctttaaccgatcttcaacccttattggacataagagaattcatactggagagaaaccctacaaatgtgaagaatgtggcaaagcttttaaccaatcttcaacacttactacacataagataattcatactgaagagaaacagtacaaatgtgatgaatgtggcaaagcttctacctagtaatgaactagtccgtaacttgaaagtatttcgatttcttggctttatatatcttgtggaaaggacgaccggtatgcctttaaggcaatacc

SEQ ID NO: 409 - DNA, 1994 bp, Homo sapiens
  source 1..1994: mol_type = genomic DNA
accgccaccatggccttgccaacggctcgacccctgttggggtcctgtgggacccccgccctcggcagcctcctgttcctgctcttcagcctcggatgggtgcagccctcgaggaccctggctggagagacagggcaggaggctgcgcccctggacggagtcctggccaacccacctaacatttccagcctctcccctcgccaactccttggcttcccgtgtgcggaggtgtccggcctgagcacggagcgtgtccgggagctggctgtggccttggcacagaagaatgtcaagctctcaacagagcagctgcgctgtctggctcaccggctctctgagccccccgaggacctggacgccctcccattggacctgctgctattcctcaacccagatgcgttctcggggccccaggcctgcacccgtttcttctcccgcatcacgaaggccaatgtggacctgctcccgaggggggctcccgagcgacagcggctgctgcctgcggctctggcctgctggggtgtgcgggggtctctgctgagcgaggctgatgtgcgggctctgggaggcctggcttgcgacctgcctgggcgctttgtggccgagtcggccgaagtgctgctaccccggctggtgagctgcccgggacccctggaccaggaccagcaggaggcagccagggcggctctgcagggcgggggacccccctacggccccccgtcgacatggtctgtctccacgatggacgctctgcggggcctgctgcccgtgctgggccagcccatcatccgcagcatcccgcagggcatcgtggccgcgtggcggcaacgctcctctcgggacccatcctggcggcagcctgaacggaccatcctccggccgcggttccggcgggaagtggagaagacagcctgtccttcaggcaagaaggcccgcgagatagacgagagcctcatcttctacaagaagtgggagctggaagcctgcgtggatgcggccctgctggccacccagatggaccgcgtgaacgccatccccttcacctacgagcagctggacgtcctaaagcataaactggatgagctctacccacaaggttaccccgagtctgtgatccagcacctgggctacctcttcctcaagatgagccctgaggacattcgcaagtggaatgtgacgtccctggagaccctgaaggctttgcttgaagtcaacaaagggcacgaaatgagtcctcaggctcctcggcggcccctcccacaggtggccaccctgatcgaccgctttgtgaagggaaggggccagctagacaaagacaccctagacaccctgaccgccttctaccctgggtacctgtgctccctcagccccgaggagctgagctccgtgccccccagcagcatctgggcggtcaggccccaggacctggacacgtgtgacccaaggcagctggacgtcctctatcccaaggcccgccttgctttccagaacatgaacgggtccgaatacttcgtgaagatccagtccttcctgggtggggcccccacggaggatttgaaggcgctcagtcagcagaatgtgagcatggacttggccacgttcatgaagctgcggacggatgcggtgctgccgttgactgtggctgaggtgcagaaacttctgggaccccacgtggagggcctgaaggcggaggagcggcaccgcccggtgcgggactggatcctacggcagcggcaggacgacctggacacgctggggctggggctacagggcggcatccccaacggctacctggtcctagacctcagcatgcaagaggccctctcggggacgccctgcctcctaggacctggacctgttctcaccgtcctggcactgctcctagcctccaccctggcctagtaatgaactagtccgtaacttgaaagtatttcgatttcttggctttatatatcttgtggaaaggacgaatcgtgtcacacccgcgaccttct

SEQ ID NO: 410 - DNA, 1970 bp, Homo sapiens
  source 1..1970: mol_type = genomic DNA
accgccaccatggccttgccaacggctcgacccctgttggggtcctgtgggacccccgccctcggcagcctcctgttcctgctcttcagcctcggatgggtgcagccctcgaggaccctggctggagagacagggcaggaggctgcgcccctggacggagtcctggccaacccacctaacatttccagcctctcccctcgccaactccttggcttcccgtgtgcggaggtgtccggcctgagcacggagcgtgtccgggagctggctgtggccttggcacagaagaatgtcaagctctcaacagagcagctgcgctgtctggctcaccggctctctgagccccccgaggacctggacgccctcccattggacctgctgctattcctcaacccagatgcgttctcggggccccaggcctgcacccgtttcttctcccgcatcacgaaggccaatgtggacctgctcccgaggggggctcccgagcgacagcggctgctgcctgcggctctggcctgctggggtgtgcgggggtctctgctgagcgaggctgatgtgcgggctctgggaggcctggcttgcgacctgcctgggcgctttgtggccgagtcggccgaagtgctgctaccccggctggtgagctgcccgggacccctggaccaggaccagcaggaggcagccagggcggctctgcagggcgggggacccccctacggccccccgtcgacatggtctgtctccacgatggacgctctgcggggcctgctgcccgtgctgggccagcccatcatccgcagcatcccgcagggcatcgtggccgcgtggcggcaacgctcctctcgggacccatcctggcggcagcctgaacggaccatcctccggccgcggttccggcgggaagtggagaagacagcctgtccttcaggcaagaaggcccgcgagatagacgagagcctcatcttctacaagaagtgggagctggaagcctgcgtggatgcggccctgctggccacccagatggaccgcgtgaacgccatccccttcacctacgagcagctggacgtcctaaagcataaactggatgagctctacccacaaggttaccccgagtctgtgatccagcacctgggctacctcttcctcaagatgagccctgaggacattcgcaagtggaatgtgacgtccctggagaccctgaaggctttgcttgaagtcaacaaagggcacgaaatgagtcctcaggtggccaccctgatcgaccgctttgtgaagggaaggggccagctagacaaagacaccctagacaccctgaccgccttctaccctgggtacctgtgctccctcagccccgaggagctgagctccgtgccccccagcagcatctgggcggtcaggccccaggacctggacacgtgtgacccaaggcagctggacgtcctctatcccaaggcccgccttgctttccagaacatgaacgggtccgaatacttcgtgaagatccagtccttcctgggtggggcccccacggaggatttgaaggcgctcagtcagcagaatgtgagcatggacttggccacgttcatgaagctgcggacggatgcggtgctgccgttgactgtggctgaggtgcagaaacttctgggaccccacgtggagggcctgaaggcggaggagcggcaccgcccggtgcgggactggatcctacggcagcggcaggacgacctggacacgctggggctggggctacagggcggcatccccaacggctacctggtcctagacctcagcatgcaagaggccctctcggggacgccctgcctcctaggacctggacctgttctcaccgtcctggcactgctcctagcctccaccctggcctagtaatgaactagtccgtaacttgaaagtatttcgatttcttggctttatatatcttgtggaaaggacgagtgttctatccgtctatcttcact

SEQ ID NO: 411 - DNA, 2843 bp, Homo sapiens
  source 1..2843: mol_type = genomic DNA
accgccaccatgaccaaattccaggagatggtgacattcaaggatgttgctgtggtcttcactgaggaggagctggggctgctggactctgtccagaggaagctgtaccgagatgtgatgctggagaacttcaggaacctgctcttagtagcacatcagcccttcaagccagacctaatatcccagctggagagagaagaaaagcttttgatggtggagacagaaaccccaagagatggatgttcaggaaggaagaatcaacaaaagatggagagtattcaggaagtaacagtaagctacttttcccccaaagagctttcctcccgtcagacctggcaacaaagtgcaggtgggttaatcaggtgtcaagatttcctgaaagtttttcaagggaagaattctcagttgcaagaacaaggtaattccctcggccaggtttgggcaggaataccagttcagatttctgaagataagaactatatattcactcatatagggaatggctccaattatataaaaagtcaagggtatccatcttggagggcacatcattcttggaggaaaatgtatctgaaagagtcacataattatcagtgtagatgtcagcaaatttccatgaaaaatcatttctgtaagtgtgacagtgtcagttggctctcacatcacaatgataaactggaagtacacagaaaagaaaactacagctgccatgactgtggagaagatatcatgaaggtatcattacttaatcaggagtcaattcaaacagaggagaagccctatccatgtactgggtatagaaaagccttcagtaatgactccagctctgaggttcatcagcagttccacttggaagggaagccctatacatacagttcatgtggaaagggctgtaattatagttcacttcttcatattcatcaaaatattgagagagaagatgatattgagaattcacatctgaaatcctatcagagagtgcatacagaggagaaaccatgcaaatgtggtgaatatggtgagaacttcaatcactgttcccctcttaacacttatgaacttatccacacaggtgagatgtcctataggcacaacatttatgagaaagccttcagtcatagcttagaccttaatagtatttttagggtccatactagggatgaaccccatgaatatgaggaaaatgagaatgtctttaatcagagttcatgtcttcaagtccatcaaaaaatccacactgaagagaaactatacacagatatagagtatggaaagagtttcatttgtagttcaaatcttgacattcagcatagggttcatatggaagagaattcatataattctgaggagtgtggtaatggcttcagtctggcctcacattttcaggaccttcagatagtccacactaaggaacaaccatataaacgctatgtgtgtagtaacagcttcagccataatttatatcttcaaggtcatccaaaaattcacattggagagaaaccacgtaaggagcatgggaatggcttcaactggagctcaaaacttaaagatcatcagagagtccacactggacagaagccatacaaatgcaatatatgcggcaaaggtttcaatcatagatcagttctgaatgttcatcagagagtccacacaggagagaaaccttataaatgcgaggaatgtgataagggattcagtcggagttcatatcttcaagcccatcagagagtccacactggagaaaaaccttataaatgtgaggaatgtgggaaggggttcagtcgaaattcataccttcaaggccatcagagagttcacactggagaaaaaccatacaagtgtgaggagtgtgggaagggcttcagtcggagttcacaccttcaaggccatcagagagtccacactggagaaaaaccattcaaatgtgaggaatgtgggaaggggttcagttggagctttaatcttcaaattcatcagagggttcacacaggagaaaaaccctataaatgtgaagaatgtggtaaaggcttcagtaaggcctcaacacttttggcccatcagagggtccacacgggagagaagccataccaatgtgatgagtgtggtaagagtttcagtcagagatcataccttcagagtcatcagagtgtccattctggagaaagaccatatatatgtgaggtatgtggaaagggcttcagtcagagagcatatcttcaaggtcatcagagagtccacactagagtgaaaccgtataaatgtgagatgtgtgggaagggctttagtcagagttcgcgccttgaagcacatcggagggttcacacaggagggaaaccatacaaatgtgaggtgtgtacaaagggtttcagtgagagttcacgccttcaagcacaccaaagggttcatgtggaagggagaccctataaatgtgaacagtgtggtaagggtttcagtgggtattcaagtcttcaagcccatcacagagtccacacaggagagaaaccatacaaatgtgaggtatgtggaaagggcttcagtcagagatcaaatcttcaggctcaccagagagtccacacaggagagaaaccatacaaatgtgatgcatgtggtaagggtttccgttggagctcaggtcttctcattcatcaaagagtccatagtagtgataaattctataaaagcgaagactatggtaaggactacccttcatcagagaatctacacagaaatgaagattctgttttgttttagtaatgaactagtccgtaacttgaaagtatttcgatttcttggctttatatatcttgtggaaaggacgaggcgtgcatcctagataaatcatt

SEQ ID NO: 412 - DNA, 2825 bp, Homo sapiens
  source 1..2825: mol_type = genomic DNA
accgccaccatggtgacattcaaggatgttgctgtggtcttcactgaggaggagctggggctgctggactctgtccagaggaagctgtaccgagatgtgatgctggagaacttcaggaacctgctcttagtagcacatcagcccttcaagccagacctaatatcccagctggagagagaagaaaagcttttgatggtggagacagaaaccccaagagatggatgttcaggaaggaagaatcaacaaaagatggagagtattcaggaagtaacagtaagctacttttcccccaaagagctttcctcccgtcagacctggcaacaaagtgcaggtgggttaatcaggtgtcaagatttcctgaaagtttttcaagggaagaattctcagttgcaagaacaaggtaattccctcggccaggtttgggcaggaataccagttcagatttctgaagataagaactatatattcactcatatagggaatggctccaattatataaaaagtcaagggtatccatcttggagggcacatcattcttggaggaaaatgtatctgaaagagtcacataattatcagtgtagatgtcagcaaatttccatgaaaaatcatttctgtaagtgtgacagtgtcagttggctctcacatcacaatgataaactggaagtacacagaaaagaaaactacagctgccatgactgtggagaagatatcatgaaggtatcattacttaatcaggagtcaattcaaacagaggagaagccctatccatgtactgggtatagaaaagccttcagtaatgactccagctctgaggttcatcagcagttccacttggaagggaagccctatacatacagttcatgtggaaagggctgtaattatagttcacttcttcatattcatcaaaatattgagagagaagatgatattgagaattcacatctgaaatcctatcagagagtgcatacagaggagaaaccatgcaaatgtggtgaatatggtgagaacttcaatcactgttcccctcttaacacttatgaacttatccacacaggtgagatgtcctataggcacaacatttatgagaaagccttcagtcatagcttagaccttaatagtatttttagggtccatactagggatgaaccccatgaatatgaggaaaatgagaatgtctttaatcagagttcatgtcttcaagtccatcaaaaaatccacactgaagagaaactatacacagatatagagtatggaaagagtttcatttgtagttcaaatcttgacattcagcatagggttcatatggaagagaattcatataattctgaggagtgtggtaatggcttcagtctggcctcacattttcaggaccttcagatagtccacactaaggaacaaccatataaacgctatgtgtgtagtaacagcttcagccataatttatatcttcaaggtcatccaaaaattcacattggagagaaaccacgtaaggagcatgggaatggcttcaactggagctcaaaacttaaagatcatcagagagtccacactggacagaagccatacaaatgcaatatatgcggcaaaggtttcaatcatagatcagttctgaatgttcatcagagagtccacacaggagagaaaccttataaatgcgaggaatgtgataagggattcagtcggagttcatatcttcaagcccatcagagagtccacactggagaaaaaccttataaatgtgaggaatgtgggaaggggttcagtcgaaattcataccttcaaggccatcagagagttcacactggagaaaaaccatacaagtgtgaggagtgtgggaagggcttcagtcggagttcacaccttcaaggccatcagagagtccacactggagaaaaaccattcaaatgtgaggaatgtgggaaggggttcagttggagctttaatcttcaaattcatcagagggttcacacaggagaaaaaccctataaatgtgaagaatgtggtaaaggcttcagtaaggcctcaacacttttggcccatcagagggtccacacgggagagaagccataccaatgtgatgagtgtggtaagagtttcagtcagagatcataccttcagagtcatcagagtgtccattctggagaaagaccatatatatgtgaggtatgtggaaagggcttcagtcagagagcatatcttcaaggtcatcagagagtccacactagagtgaaaccgtataaatgtgagatgtgtgggaagggctttagtcagagttcgcgccttgaagcacatcggagggttcacacaggagggaaaccatacaaatgtgaggtgtgtacaaagggtttcagtgagagttcacgccttcaagcacaccaaagggttcatgtggaagggagaccctataaatgtgaacagtgtggtaagggtttcagtgggtattcaagtcttcaagcccatcacagagtccacacaggagagaaaccatacaaatgtgaggtatgtggaaagggcttcagtcagagatcaaatcttcaggctcaccagagagtccacacaggagagaaaccatacaaatgtgatgcatgtggtaagggtttccgttggagctcaggtcttctcattcatcaaagagtccatagtagtgataaattctataaaagcgaagactatggtaaggactacccttcatcagagaatctacacagaaatgaagattctgttttgttttagtaatgaactagtccgtaacttgaaagtatttcgatttcttggctttatatatcttgtggaaaggacgacttcggaaggtctattgggagatc

SEQ ID NO: 413 - DNA, 5717 bp, Homo sapiens
  source 1..5717: mol_type = genomic DNA
accgccaccatggacaagggaagagagagaatggccgctgccgccgccgctgctgccgccgccgccgccgccgctcagtgccggagccctcggtgcgcggcggagagaagaggattccggcgggaactcgactcttggcgccaccgcctcatgcactgtgtaggttttgagagtattttagaagggctttatggaccacggctacgaagagacctcagtttatttgaagactgtgaaccagaagagctgactgactggtctatggatgaaaaatgttcattttgtaacctacagagagaagcagtcagtgattgtataccatctcttgattcttcacagtcaacaccaacagaggagctatcatctcagggccagtccaacactgataagattgaatgccaagcagaaaattacctaaatgcactctttcgaaagaaagatcttcctcagaactgtgatcctaacattcccctagttgctcaggaattaatgaaaaagatgatacgtcaatttgcgattgagtacatttcaaaaagtggtaaaactcaagagaatagaaatggttcaattggaccaagtatagtatgtaaaagtatccaaatgaatcaagcagaaaactcccttcaggaagagcaggaaggccccttagacctcactgtgaatcgaatgcaagaacaaaatactcagcaaggggatggagtgttagatctctctacaaagaaaaccagcataaaatctgaagagtcatccatatgtgatccttcttctgaaaattcagtggctggttcaactgttgatgcaaaatcagaggaagctactaaaatggaaaaaagaaaatcagcattaaacaaagttttggaatctttgtgcatacatcaccagcaacaagttttggctatgttgaaatttctagtccaagagcagaatgctgcttctctttgctgttgtaatacatcatgtgttgtgtcttcagaatctcaaaagcccttaatcgaagatgatttatgtggtctgttctgtagttgtgaatataggctggcagaaagaggttgtttacaaaacgaaaaacaaagccctggtttagaacctctgccagtctgtattaaagatttacattgtttatcttgccaaactgtaactgttgaacacgttaagccagtagtgaatagaggaattgcagacagttataattctcacaggtgctgttctggactgttaccaaacattcactctacaaaatcagcctttcgtagtcctcttttgtcaaaggaagtatgtgatctttcagtcactcttaaagatgcctgtagatctcgaagtccctcacccccaccattatcacctatagaaactgaaggatttgaaaaattgaaagacgtcatctcagagatttcagccttagaaaataacaaacttgaagcaaacattaaccagcctccatctctcacaccagcagaaatcagcagcaataagagtgatcatcaagataaaatacttaaaactaaaaaatccagtaactcttattctttactctcaaatgacagcaataattctactacaaatcatgaaaaaggtgaaactgctgtaatttttcaagatttaatggatcgcattaatgaaaaactaaaatcaatagaaaccacggatatgacaagccttgtaaaattatctagcagtgattataatacatataatgatttaaaattgggagatttcataacatctctcttgcataatgcaaaagccagtgattatagttttatggaattattgagtcaacatgataaaaaggtagaaaataaaattattcagacaagatttcgaaagcgtcaagaaactttatttgcaatgcgcaactcctctgattcacccatgtttagaaggcagtctttacagataaaaagagaacttgctagtcttgatgaaaattttacaagaaaaaaatacaccgaaaaaagttcaaggaaattgacacaaaacaatgagatatcttcatcagacaaaggagaattctatcatgaccaagggccttctttacaaaattctaaaagacttcaaggtaaaaatcatgctgaaacatcattttcaccaaattatgcattacagtcactgcaactacctcttcatagttcagaaactaacttgtcttttaatgaattttcagaaagctttaaaacaacttcccctgagaaaatgagcataagaaagccacaggagaaatctgcagatggaaaacaatttttgcaaaatgataggaaaaatccaaagttaggtaatactcaaactcttttgagaaatgatgtttctggacttttgagcagaactaaacgaaatattgtgcctccagggtggtattctgtatatgtaacaaataattatgtttttaaaaaatcccctaaagccaaaaaagtatccgaatccacaacaaaaaacgatccagtgaaaaatattcacattgaaagctcacacaatatagacctaaacaaaattgcaatgaattctaatttacaagtggttgtgaagcgtttggaagatacaataagtatagccaaaaaatcctggaataatcagccattatcagaaggatataaagcatccaagaaattgatagaaattgatggtaaagaccaacatgctgacagaaatatgactcttactctaaatagaatgacatgcaaagaacagagcttatcaaaatctgtggtagcatccggcaatattatcaatagtcactgcatgcctacagtggatttgaataacaaaagacttgaaaatctgaaaaagtcatctattttagatatgggtcgcttgatttccagtgttgaaaatgtaccagcaaaatatgaaggtactgaaagttcatctgtttccaactattctagtcctatcaaactcatgtttttatctgaggttaaaagtagtgaaggggtcaaatatactttaacttcagttggcacttcccattcaaatgttgttctcccttctgaaaaacctacaacccatcacgtaactgaagaaaaaacagaaacaaatgaggatatctcaaatgcgaactctgaaaattatcactccagtcattatgatactgatacttttcaaagagaactaaacaaattcagtcatgcaaaagaaactgcaggatcctctacaatgtttataggtgatataaatagtgataagccacaagaagaacctaaggacaattcaagcagtgctactgatccatcttttaaaagaaaaccaggtagaccaaaaaaaataggtccccaagttgtgaaacagattaagcgaccaattggaagaccaccaaagcctaaaattgatcaaacaaacatcactgtttgccagaatgagccctttagtgctggaaggaaaagcccagaatgtctcatatcagaagtaaaagaaggtatttataaaaagagtattacagtaactgttatttacggaaggtcaagaagaactaaaaggcatgtttctgaaggaagggtaaacataagcaaccttatgtctttaaacaataatgctggtgattttccaactgaatataatagtcccagaaatattagtgaagacaaaattgacttgggtgaaagaataagtgctgtagcaagcttgactactgaaagtgagatcttggggtctggctttgaatatgtgagacccatcaagaacaaatctgtgatacctcagccttccaagaacattattcgaccaaatcagaagcctttggcaataagtaggaagcctggtagaccggcaaaagtgaaaatctctggcatatctgtgactattaatagaacttcacctcaggaaagagaagtaagtattagcagctgcttgcctcctttagaacaggataatacgtcaggaaaaaatctgcctgaagaaaagtatgaccaacagtgcactcaaatggataaaataaggcacactgaagctgatatatttaaaaatggatcaaaacgtatgattgctactgtacctttgagacattctattagggatagaaaaccatctctgcatttcttacattcattagcatcttctagctcacttatttatagaaacgctctgctccataaatcatataaactgcatttgcagaaaaataaaagtcagaaggaaaaacataggcactcaaagatgaaaatagcttacaaagataccccaagaaacagactttcgcggaatgcaaaaaagtgtttggaagataataaattagtacctatttctgaagtatccttggatcctataatttcatcaaaccctttgctcaggtggtgggctacttctgcttcaaatgattccttattagaggaattaaacaatagatttgagcaaataacaaatgcttgggtgcaagtaagtggagatgaagctgaaaattgtattcataaaaaaagagaacacattgaaaatgatcatttcaaagtagcaagccctttggaaacttgtcttttagaacttgaagtttcacctgtaaaaatgctttttcagaaaaagtatgatttgaatgaactctgtacttggtttatgcaaacaacagaaacacagtctctttcactagttagaaaagcaaatgcccgaaaccctttggaagtaataaataccaggggaatcaaattagggaccaaatattctgactttaatgccagccccttcagaaagcactttaaaaaatttgcactctcttctccttcaaaatcagcagagaaattgcatatactgcataaagtggctaactctccactcttaaatgtgaaaagtaatttagcaatagctagattaaaaaggactgagtttaagaggttgcatcatgaaaggtggaaaagagagggaaagctgcacaaccatggaacagttgactggaactctaaaaggagaaacttaagatttttctgccagaaccaatttttaaataagactgagggagaaacaaatgctgacatcccactccaaggaaaaagcatagtagataatcagtgtgttttgccacctgagatcaggggtgacttgcagcagagggtagtaatgcctgacttcaaaatacatgctagttttgagaataaatttaagtcagaagcaaaagagaatggaacaaattgcagccaaaaagactttcaaaagggaccaagactagaaaatgtatgtcctaatagttggaggtcaaaaaccttaaaagactgtagaatatttttgaggaagctcaactgtcttgaacacagaaatacttttaagctaaatacaatcatttactctcctgaatctactgacagtggaaatactcatcagactcatatggaagaatcaaagcgctttactttaagatctcattctgctaggcaaaattcttttaaaaagcaatctaaagaaatagaaaatgctaacacaaataatccttcagctgatgaatttgctgaccatcttggcaatagtaaattaagcaaatgtgttaactttgacaagaatcctgatagttttgaagttcttagcaatttgaacaaaagaaaaagaccaccatggaagatcacagaaatgtcaacaaaaagacataaacgacagtcttgcaacagtggacaaatggcaaactatttttccaaatccctagcatgctacaagtagtaatgaactagtccgtaacttgaaagtatttcgatttcttggctttatatatcttgtggaaaggacgagttatcgggcctcgcgggatgcgc

SEQ ID NO: 414 - DNA, 1058 bp, Homo sapiens
  source 1..1058: mol_type = genomic DNA
accgccaccatggacaagggaagagagagaatggccgctgccgccgccgctgctgccgccgccgccgccgccgctcagtgccggagccctcggtgcgcggcggagagaagaggattccggcgggaactcgactcttggcgccaccgcctcatgcactgtgtaggttttgagagtattttagaagggctttatggaccacggctacgaagagacctcagtttatttgaagactgtgaaccagaagagctgactgactggtctatggatgaaaaatgttcattttgtaacctacagagagaagcagtcagtgattgtataccatctcttgattcttcacagtcaacaccaacagaggagctatcatctcagggccagtccaacactgataagattgaatgccaagcagaaaattacctaaatgcactctttcgaaagaaagatcttcctcagaactgtgatcctaacattcccctagttgctcaggaattaatgaaaaagatgatacgtcaatttgcgattgagtacatttcaaaaagtggtaaaactcaagagaatagaaatggttcaattggaccaagtatagtatgtaaaagtatccaaatgaatcaagcagaaaactcccttcaggaagagcaggaaggccccttagacctcactgtgaatcgaatgcaagaacaaaatactcagcaaggggatggagtgttagatctctctacaaagaaaaccagcataaaatctgaagagtcatccatatgtgatccttcttctgaaaattcagtggctggcatgctacaagtgaaaactgatgagaaactgaatgtgtctgatgagaatacagcaagttgccctttgagccccattaagatgtgccttaatcgtcccattgaatggaatctgaatttgacaacagcatctctaacgagctgtacagttcataaccaaaatctcaaaagcgaagagaaatagtaatgaactagtccgtaacttgaaagtatttcgatttcttggctttatatatcttgtggaaaggacgacaccttagcacccgctctcaacca

SEQ ID NO: 415 - DNA, 1910 bp, Homo sapiens
  source 1..1910: mol_type = genomic DNA
accgccaccatggacaagggaagagagagaatggccgctgccgccgccgctgctgccgccgccgccgccgccgctcagtgccggagccctcggtgcgcggcggagagaagaggattccggcgggaactcgactcttggcgccaccgcctcatgcactgtgtaggttttgagagtattttagaagggctttatggaccacggctacgaagagacctcagtttatttgaagactgtgaaccagaagagctgactgactggtctatggatgaaaaatgttcattttgtaacctacagagagaagcagtcagtgattgtataccatctcttgattcttcacagtcaacaccaacagaggagctatcatctcagggccagtccaacactgataagattgaatgccaagcagaaaattacctaaatgcactctttcgaaagaaagatcttcctcagaactgtgatcctaacattcccctagttgctcaggaattaatgaaaaagatgatacgtcaatttgcgattgagtacatttcaaaaagtggtaaaactcaagagaatagaaatggttcaattggaccaagtatagtatgtaaaagtatccaaatgaatcaagcagaaaactcccttcaggaagagcaggaaggccccttagacctcactgtgaatcgaatgcaagaacaaaatactcagcaaggggatggagtgttagatctctctacaaagaaaaccagcataaaatctgaagagtcatccatatgtgatccttcttctgaaaattcagtggctgggagactacacagaaacagagaggactatgtggaaagaagtgctgagtttgcagatggtttgctctcaaaagctttgaaagacattcagtctggagcactggacataaataaagcaggcatactttatggcatacctcaaaaaactttacttcttcacttagaagccttaccagcagggaagcctgcatcttttaaaaacaaaactcgagatttccatgatagttattcatataaggacagtaaagaaacttgtgcagtgctgcaaaaagtagccttgtgggcaagagctcaagcagagcgcacagaaaaaagtaaactcaatctacttgaaacctcagaaataaaattcccaacagcttccacttacctccatcagctaactctacagaaaatggtcactcagtttaaagaaaaaaatgaaagcctccaatatgaaacttcaaatcctactgtacagttaaaaattcctcagctacgagtaagttctgtctcaaaatcacaacctgatggttctggtctgttggatgttatgtatcaagtttccaaaacctcttcagtcctagaaggatcagctctccaaaaactgaaaaatatactccctaaacagaacaaaatagaatgttctgggcctgtaactcactcaagtgttgactcttactttctacatggggacctctctcctttgtgtcttaattctaaaaatggaacagttgatggaacctctgaaaatactgaagatggattagatcgaaaagacagtaagcagcccaggaaaaaacgtggccgctatcggcaatatgatcatgaaataatggaagaagctattgcaatggtaatgagcggaaaaatgagtgtttccaaagcacaaggaatttatggggtacctcacagcactttagaatacaaggtaaaagaaagatctggaacactgaagactcctccgaagaagaaactacgattaccagacactgggttatataatatgacagattcagggactggcagctgcaaaaacagcagcaagcctgtgtagtaatgaactagtccgtaacttgaaagtatttcgatttcttggctttatatatcttgtggaaaggacgaaggcgcacgattaagatagtctcg

SEQ ID NO: 416 - DNA, 2357 bp, Homo sapiens
  source 1..2357: mol_type = genomic DNA
accgccaccatgggacctcagggagccaggagacaggctttcttggcatttggggatgtcactgtggatttcacccagaaggaatggaggctgctgagccctgctcagagggccctgtacagggaggtgacactggagaactacagccacctggtctcactaggaattctccattctaaaccagaactcatcaggcggctagagcaaggggaagtgccctggggagaagagagaagacgccggccaggcccctgtgcaggaatatatgcagaacatgtcctgcggcccaagaatcttggacttgcacatcagaggcaacagcaactacaattttctgatcaaagcttccagagtgacacagctgaaggtcaagagaaagaaaaaagcactaagcccatggcattttccagcccacccctaagacatgcagtaagctcaaggaggaggaacagtgtagtggaaatagagtctagtcaaggccagagggaaaatcctacagaaatagacaaagtattgaaaggaatagaaaattcaagatggggagcattcaagtgtgcagagcgtgggcaagacttcagccggaagatgatggtaatcatacacaaaaaagcacattccaggcagaaactttttacatgcagggagtgtcaccagggctttagagatgagtcagcattgctcttgcaccagaacacacacacaggagagaagtcctatgtgtgcagtgtgtgtgggcgaggcttcagcctcaaggccaacctcctcagacaccagaggacacactcaggagagaagccttttctgtgcaaggtgtgtggacgaggctataccagtaagtcatacctcactgtgcatgagagaacacacacaggagagaagccttatgaatgccaggagtgtgggcgaaggtttaacgataagtcctcatacaacaagcacttgaaggcgcattcaggggagaagccttttgtgtgcaaggagtgtgggcgaggctatactaataagtcatacttcgttgtgcacaagagaatacactcaggagagaagccttacagatgccaggagtgtggccgaggctttagcaataagtcacaccttatcacacaccagaggacacactcaggggagaagccctttgcgtgcaggcagtgtaagcaaagttttagcgtgaaaggaagtctcctcagacaccagagaacacactcaggggagaagccttttgtgtgcaaggattgtgagcgaagctttagccaaaagtcaactcttgtctaccaccagagaacacactcaggggagaaaccttttgtttgtagagaatgtgggcaaggatttattcagaagtcaacccttgtgaaacatcagatcacacactcagaggagaagccttttgtgtgcaaggactgtggacgaggctttatccaaaagtcaaccttcactttacaccagaggacacactcagaggagaagccttatggatgtcgggagtgtgggcgaaggtttcgggataagtcctcctataacaagcacctgagggcacacttgggtgagaaacgttttttctgcagggattgtgggcgaggctttaccttgaagccaaatctcaccatacatcagaggacacactcaggagagaagcccttcatgtgcaagcagtgtgagaaaagttttagtttgaaggcaaatcttcttagacatcagtggacacactcgggggaaaggccatttaattgcaaggattgcgggcgaggcttcatcctaaaatcaactctcctcttccaccagaagacacactcaggggagaagcctttcatctgtagtgaatgtgggcaaggatttatctggaagtcaaatcttgtgaaacaccagcttgcacattctggcaagcagccttttgtatgcaaggagtgtgggcgaggcttcaactggaagggaaatctcctcacacaccagaggacacactcaggggagaagcccttcgtgtgtaatgtgtgtgggcaaggcttcagctggaagagaagtctcaccagacaccactggcggatacactcaaaggagaagccttttgtttgccaggagtgtaagcgaggctataccagtaagtcagacctcactgtgcatgaaagaatacacacaggagagaggccttatgaatgccaagagtgtggacgaaagtttagcaataagtcatactacagtaagcacttaaagagacacttacgtgagaagcgtttttgtacagggagtgtgggtgaggcttcatcttagtaatgaactagtccgtaacttgaaagtatttcgatttcttggctttatatatcttgtggaaaggacgaaaagttcacgaagtccgcagccgt

SEQ ID NO: 417 - DNA, 2213 bp, Homo sapiens
  source 1..2213: mol_type = genomic DNA
accgccaccatgtgtgttttcttacatctcctttcttacataaaagataccagtttcattccaggacctgactgtgaacttcacccaagaggaatggcagcaactggaccctgctcagaggctcctgtacagggatgtgatgctggagaactacagcaacttggtctctgtggagtctctgatgtccaaagatcttggtccaagttctgtaatttcccattaacagggtatcatgttagcaaaccagatgtgattttcaaattggagcaaggagaagagccatggatagtggaggaattctcaaatcagaactacccagacattgatgatgccttagagaagaacaaggaaatccaagataaacatttgacacaaactgtattcttcagcaacaaaacactgattacagaaagagagaatgtatttgggaaaacacttaatctgggcatgaatagtgttccctcaagaaaaatgccctataaatgtaatccaggaggaaacagtttgaaaactaattcagaagtaattgttgcaaagaaaagcaaagaaaacagaaagattcctgatggatacagtggatttgggaagcatgagaaaagtcatttgggaatgaaaaaatacagatacaatccaatgaggaaagccagcaatcaaaacgaaaatcttattctgcaccagaacattcagattttgaaacaaccgtttgactataataaatgtgggaaaaccttcttcaagagggcaattctcattacacaaaaggggagacagactgaaaggaaaccaaatgaatgtaatgaatgtaggaaaaccttttctaagagatctaccctcattgtacatcagagaattcatacaggggagaaaccgtatgtttgtagtgattgtaggaaaacttttcgtgtgaagacaagcctcactcgacaccgaagaattcatactggagagagaccctatgaatgcagtgaatgcaggaaaaccttcattgacaaatctgcccttattgtacaccagaaaattcatggaggggagaaatcctatgagtgtaatgaatgtggaaagaccttttttcggaagtcagccctggctgaacatttcaggtcacacacaggggagaagccttacgaatgcaaggaatgtggaaatgccttcagcaagaaatcgtatcttgttgtacatcaaagaactcacagaggagagaagccaaatgaatgtaaggaatgtgggaaaaccttcttctgtcagtcagcccttactgcgcatcagagaattcacacaggggaaaaaccctatgaatgtagtgaatgtgagaaaaccttcttttgtcaatctgccctcaatgtgcatcgaagaagtcatacaggagagaagccctatgaatgcagtcaatgtggaaaatttttatgtacgaaatcagccctcattgcacatcagataactcatagaggaaagaagtcttatgaatgtaatgaatgtgggaaatttttctgccataagtcaacactcactatacatcagagaacacacacaggagagaaacatggtgtgtttaataaatgtggtagaatctccattgtgaagtcaaactgcagtcagtgtaagagaatgaacacaaaggagaatctttatgagtgtagtgaacatgggcatgccgtcagcaaaaactcacacctcattgtacatcagagaactatatgggagagaccatatgaatgcaatgaatgtgggagaacctactgcaggaagtcagccctgactcaccatcagagaacacacacaggacagagaccctatgagtgtaatgaatgtgggaaaaccttctgtcagaagttctcctttgttgaacatcagcgaactcacactggggagaaaccatatgaatgtaatgaatgtgggaaatccttctgccataagtcagccttcagagtccatagaagaattcacacaggagagaaaccatatgaatgtaatcaatgtgggaaaacctaccgtcgcctgtggactctcactgaacatcagaaaatacacacaggagagaaaccttatgaatgtaacaaatgtgagaaaacatttcgccacaaatcaaactttcttttacatcagaaatcccacaaggaatagtaatgaactagtccgtaacttgaaagtatttcgatttcttggctttatatatcttgtggaaaggacgaacctcctcgaacgatgcacagttg

SEQ ID NO: 418 - DNA, 2144 bp, Homo sapiens
  source 1..2144: mol_type = genomic DNA
accgccaccatgaaaatgaaaaaatttcagataccagtttcattccaggacctgactgtgaacttcacccaagaggaatggcagcaactggaccctgctcagaggctcctgtacagggatgtgatgctggagaactacagcaacttggtctctgtggggtatcatgttagcaaaccagatgtgattttcaaattggagcaaggagaagagccatggatagtggaggaattctcaaatcagaactacccagacattgatgatgccttagagaagaacaaggaaatccaagataaacatttgacacaaactgtattcttcagcaacaaaacactgattacagaaagagagaatgtatttgggaaaacacttaatctgggcatgaatagtgttccctcaagaaaaatgccctataaatgtaatccaggaggaaacagtttgaaaactaattcagaagtaattgttgcaaagaaaagcaaagaaaacagaaagattcctgatggatacagtggatttgggaagcatgagaaaagtcatttgggaatgaaaaaatacagatacaatccaatgaggaaagccagcaatcaaaacgaaaatcttattctgcaccagaacattcagattttgaaacaaccgtttgactataataaatgtgggaaaaccttcttcaagagggcaattctcattacacaaaaggggagacagactgaaaggaaaccaaatgaatgtaatgaatgtaggaaaaccttttctaagagatctaccctcattgtacatcagagaattcatacaggggagaaaccgtatgtttgtagtgattgtaggaaaacttttcgtgtgaagacaagcctcactcgacaccgaagaattcatactggagagagaccctatgaatgcagtgaatgcaggaaaaccttcattgacaaatctgcccttattgtacaccagaaaattcatggaggggagaaatcctatgagtgtaatgaatgtggaaagaccttttttcggaagtcagccctggctgaacatttcaggtcacacacaggggagaagccttacgaatgcaaggaatgtggaaatgccttcagcaagaaatcgtatcttgttgtacatcaaagaactcacagaggagagaagccaaatgaatgtaaggaatgtgggaaaaccttcttctgtcagtcagcccttactgcgcatcagagaattcacacaggggaaaaaccctatgaatgtagtgaatgtgagaaaaccttcttttgtcaatctgccctcaatgtgcatcgaagaagtcatacaggagagaagccctatgaatgcagtcaatgtggaaaatttttatgtacgaaatcagccctcattgcacatcagataactcatagaggaaagaagtcttatgaatgtaatgaatgtgggaaatttttctgccataagtcaacactcactatacatcagagaacacacacaggagagaaacatggtgtgtttaataaatgtggtagaatctccattgtgaagtcaaactgcagtcagtgtaagagaatgaacacaaaggagaatctttatgagtgtagtgaacatgggcatgccgtcagcaaaaactcacacctcattgtacatcagagaactatatgggagagaccatatgaatgcaatgaatgtgggagaacctactgcaggaagtcagccctgactcaccatcagagaacacacacaggacagagaccctatgagtgtaatgaatgtgggaaaaccttctgtcagaagttctcctttgttgaacatcagcgaactcacactggggagaaaccatatgaatgtaatgaatgtgggaaatccttctgccataagtcagccttcagagtccatagaagaattcacacaggagagaaaccatatgaatgtaatcaatgtgggaaaacctaccgtcgcctgtggactctcactgaacatcagaaaatacacacaggagagaaaccttatgaatgtaacaaatgtgagaaaacatttcgccacaaatcaaactttcttttacatcagaaatcccacaaggaatagtaatgaactagtccgtaacttgaaagtatttcgatttcttggctttatatatcttgtggaaaggacgaggcttggcctaactagttgaggcc

SEQ ID NO: 419 - DNA, 2030 bp, Homo sapiens
  source 1..2030: mol_type = genomic DNA
accgccaccatgctggagaactacagcaacttggtctctgtggggtatcatgttagcaaaccagatgtgattttcaaattggagcaaggagaagagccatggatagtggaggaattctcaaatcagaactacccagacattgatgatgccttagagaagaacaaggaaatccaagataaacatttgacacaaactgtattcttcagcaacaaaacactgattacagaaagagagaatgtatttgggaaaacacttaatctgggcatgaatagtgttccctcaagaaaaatgccctataaatgtaatccaggaggaaacagtttgaaaactaattcagaagtaattgttgcaaagaaaagcaaagaaaacagaaagattcctgatggatacagtggatttgggaagcatgagaaaagtcatttgggaatgaaaaaatacagatacaatccaatgaggaaagccagcaatcaaaacgaaaatcttattctgcaccagaacattcagattttgaaacaaccgtttgactataataaatgtgggaaaaccttcttcaagagggcaattctcattacacaaaaggggagacagactgaaaggaaaccaaatgaatgtaatgaatgtaggaaaaccttttctaagagatctaccctcattgtacatcagagaattcatacaggggagaaaccgtatgtttgtagtgattgtaggaaaacttttcgtgtgaagacaagcctcactcgacaccgaagaattcatactggagagagaccctatgaatgcagtgaatgcaggaaaaccttcattgacaaatctgcccttattgtacaccagaaaattcatggaggggagaaatcctatgagtgtaatgaatgtggaaagaccttttttcggaagtcagccctggctgaacatttcaggtcacacacaggggagaagccttacgaatgcaaggaatgtggaaatgccttcagcaagaaatcgtatcttgttgtacatcaaagaactcacagaggagagaagccaaatgaatgtaaggaatgtgggaaaaccttcttctgtcagtcagcccttactgcgcatcagagaattcacacaggggaaaaaccctatgaatgtagtgaatgtgagaaaaccttcttttgtcaatctgccctcaatgtgcatcgaagaagtcatacaggagagaagccctatgaatgcagtcaatgtggaaaatttttatgtacgaaatcagccctcattgcacatcagataactcatagaggaaagaagtcttatgaatgtaatgaatgtgggaaatttttctgccataagtcaacactcactatacatcagagaacacacacaggagagaaacatggtgtgtttaataaatgtggtagaatctccattgtgaagtcaaactgcagtcagtgtaagagaatgaacacaaaggagaatctttatgagtgtagtgaacatgggcatgccgtcagcaaaaactcacacctcattgtacatcagagaactatatgggagagaccatatgaatgcaatgaatgtgggagaacctactgcaggaagtcagccctgactcaccatcagagaacacacacaggacagagaccctatgagtgtaatgaatgtgggaaaaccttctgtcagaagttctcctttgttgaacatcagcgaactcacactggggagaaaccatatgaatgtaatgaatgtgggaaatccttctgccataagtcagccttcagagtccatagaagaattcacacaggagagaaaccatatgaatgtaatcaatgtgggaaaacctaccgtcgcctgtggactctcactgaacatcagaaaatacacacaggagagaaaccttatgaatgtaacaaatgtgagaaaacatttcgccacaaatcaaactttcttttacatcagaaatcccacaaggaatagtaatgaactagtccgtaacttgaaagtatttcgatttcttggctttatatatcttgtggaaaggacgaccacggtaaccgcaaagagcacgt

SEQ ID NO: 420 - DNA, 2141 bp, Homo sapiens
  source 1..2141: mol_type = genomic DNA
accgccaccatggaaaatgagaaggagataccagtttcattccaggacctgactgtgaacttcacccaagaggaatggcagcaactggaccctgctcagaggctcctgtacagggatgtgatgctggagaactacagcaacttggtctctgtggggtatcatgttagcaaaccagatgtgattttcaaattggagcaaggagaagagccatggatagtggaggaattctcaaatcagaactacccagacattgatgatgccttagagaagaacaaggaaatccaagataaacatttgacacaaactgtattcttcagcaacaaaacactgattacagaaagagagaatgtatttgggaaaacacttaatctgggcatgaatagtgttccctcaagaaaaatgccctataaatgtaatccaggaggaaacagtttgaaaactaattcagaagtaattgttgcaaagaaaagcaaagaaaacagaaagattcctgatggatacagtggatttgggaagcatgagaaaagtcatttgggaatgaaaaaatacagatacaatccaatgaggaaagccagcaatcaaaacgaaaatcttattctgcaccagaacattcagattttgaaacaaccgtttgactataataaatgtgggaaaaccttcttcaagagggcaattctcattacacaaaaggggagacagactgaaaggaaaccaaatgaatgtaatgaatgtaggaaaaccttttctaagagatctaccctcattgtacatcagagaattcatacaggggagaaaccgtatgtttgtagtgattgtaggaaaacttttcgtgtgaagacaagcctcactcgacaccgaagaattcatactggagagagaccctatgaatgcagtgaatgcaggaaaaccttcattgacaaatctgcccttattgtacaccagaaaattcatggaggggagaaatcctatgagtgtaatgaatgtggaaagaccttttttcggaagtcagccctggctgaacatttcaggtcacacacaggggagaagccttacgaatgcaaggaatgtggaaatgccttcagcaagaaatcgtatcttgttgtacatcaaagaactcacagaggagagaagccaaatgaatgtaaggaatgtgggaaaaccttcttctgtcagtcagcccttactgcgcatcagagaattcacacaggggaaaaaccctatgaatgtagtgaatgtgagaaaaccttcttttgtcaatctgccctcaatgtgcatcgaagaagtcatacaggagagaagccctatgaatgcagtcaatgtggaaaatttttatgtacgaaatcagccctcattgcacatcagataactcatagaggaaagaagtcttatgaatgtaatgaatgtgggaaatttttctgccataagtcaacactcactatacatcagagaacacacacaggagagaaacatggtgtgtttaataaatgtggtagaatctccattgtgaagtcaaactgcagtcagtgtaagagaatgaacacaaaggagaatctttatgagtgtagtgaacatgggcatgccgtcagcaaaaactcacacctcattgtacatcagagaactatatgggagagaccatatgaatgcaatgaatgtgggagaacctactgcaggaagtcagccctgactcaccatcagagaacacacacaggacagagaccctatgagtgtaatgaatgtgggaaaaccttctgtcagaagttctcctttgttgaacatcagcgaactcacactggggagaaaccatatgaatgtaatgaatgtgggaaatccttctgccataagtcagccttcagagtccatagaagaattcacacaggagagaaaccatatgaatgtaatcaatgtgggaaaacctaccgtcgcctgtggactctcactgaacatcagaaaatacacacaggagagaaaccttatgaatgtaacaaatgtgagaaaacatttcgccacaaatcaaactttcttttacatcagaaatcccacaaggaatagtaatgaactagtccgtaacttgaaagtatttcgatttcttggctttatatatcttgtggaaaggacgactgtactaagttggagtggtcgag

SEQ ID NO: 421 - DNA, 4130 bp, Homo sapiens
  source 1..4130: mol_type = genomic DNA
accgccaccatggaggagaacgaggtggagagcagcagcgacgcggcccctgggcctggccggcccgaggagccctctgagagcggcctgggtgtgggcacctcagaagccgtgtccgccgacagcagcgacgccgcggccgccccggggcaggcagaggccgatgactctggcgtggggcaaagctcggaccgcggcagccgttctcaggaggaggtatctgagagcagctcgagcgcagaccccctgcctaatagctacctccctgattcatcgtctgtgtctcatgggccagtggcaggggtgacaggcggtcccccagcacttgtgcactctagtgcactcccagaccccaacatgctggtgtccgactgcacagcttcctcctcggacctgggctcggccatcgacaagatcatcgagtccaccatcgggcccgacctcatccagaactgcatcactgtgaccagtgctgaggatggcggggccgagaccacacggtacctgatcctacagggcccagatgatggagcccccatgacatcaccaatgtccagttccaccttggcccacagcctagcagccattgaggccctggcagatggccccacatccacatccacatgcctggaggcacagggtgggcccagctccccggtgcagctgcccccagcctccggtgccgaagagccggacctgcagagcctggaggccatgatggaggtggtggtggtgcagcagttcaaatgcaagatgtgccagtaccggagcagcaccaaggccacactgctgcgccacatgcgggaacgccacttccgtccagtagcagcagccgcagcagcagctggtaaaaaaggacgtctacggaagtggagcacctccaccaagagccaagaggaagagggaccagaggaggaggacgatgatgacattgtagacgctggagccattgatgacctggaggaggatagcgactataatccagctgaggatgagccccgaggccggcagcttcggctccagcgccccacccccagtaccccaaggccccgaaggagacctggccggccccggaagctgccccgcctggagatctcagacctcccagatggtgtggaaggagagcctctagtgagttcccagagtggacagagccctccagagccacaggatcccgaggctcccagctcctcaggcccaggacacctggtggccatgggcaaggtgagcaggacccctgtggaagctggtgtgagccagtcagatgcagagaacgcagccccctcctgcccggatgagcatgacactctgccccggcgccgaggtcgaccttccaggcgcttcctaggcaagaaataccgcaagtactattacaagtcgcccaaaccacttttgaggcccttcctgtgccgcatctgtggttctcgctttctgtcccacgaggacctgcgcttccacgtcaactcccatgaggctggcgatccccagctcttcaagtgcctgcagtgcagctatcgttcccgccgctggtcctcgctcaaggagcacatgttcaaccacgtgggcagcaagccctacaagtgtgacgagtgcagctacaccagtgtctaccggaaggacgtcattcggcacgccgctgtgcacagccgggaccggaagaagaggccagatccgactccaaagctgagctctttcccctgccctgtgtgtggccgtgtgtaccccatgcagaaaagactcacgcagcacatgaagacgcacagcactgagaagccccacatgtgtgacaagtgtggaaagtcctttaagaagcgctacaccttcaaaatgcacctgctcacgcacatccaggctgttgccaaccgcaggttcaagtgtgagttctgtgagtttgtttgtgaagacaagaaggcactgctgaaccaccagttgtcccacgtcagtgacaagcccttcaaatgcagcttttgtccctaccgcaccttccgagaggacttcttgctgtcccatgtggctgtcaagcacacaggggccaagcccttcgcctgtgagtactgccacttcagcacacggcacaagaagaacctgcgcctgcacgtacggtgccgacacgcaagcagcttcgaggaatgggggaggcgccaccctgaggagcccccctcccgccgtcgccccttcttctctctgcagcagattgaggagctgaagcagcagcacagtgcggcccctggaccacctcccagttccccaggacctcctgagatacccccagaggcgacaactttccagtcatctgaggctccctcattgctctgttctgacaccctgggcggcgccaccatcatctaccagcaaggagctgaggagtcgacagcgatggccacgcagacagccttggatcttctgctgaacatgagtgctcagcgggaactggggggcacagccctgcaggtggctgtggtgaagtcggaagatgtggaagcagggttagcatcccctggtgggcagccctcccctgaaggtgccactccacaggtggtcaccctccacgtggcagagccagggggcggtgcagcagccgagagccagctaggccctcctgacctaccgcagatcaccctggcacctggtccatttggtgggactggctacagtgtcatcacagcaccccctatggaggagggaacatcagctcctggcacaccttacagcgaggagcccgcaggagaggcagcccaggctgtggttgtgagtgacaccctaaaagaagctggcacccactacatcatggctactgatggtacccagttgcaccacattgagctcaccgcagatggctccatctccttcccaagtccagatgctctggcctctggtgccaaatggcccctgctgcagtgtgggggactgcccagagacggccctgagcccccatctccagccaagacccactgcgtaggggactcccagagctctgcctcctcacctcctgcaaccagcaaagccctgggcctggcagtgcccccgtcaccgccatctgcagccactgctgcatcaaagaagttttcctgcaagatctgtgccgaggccttccctggccgagctgagatggagagtcacaagcgggcccacgctgggcctggtgccttcaagtgccccgactgccccttcagtgcccgccagtggcccgaggtccgggcgcacatggcacagcactcaagcctacggccccaccagtgtagccagtgcagctttgcctccaagaacaagaaggacctgcgtcggcacatgctgactcacacaaaggagaagccttttgcatgccacctctgcgggcagcgtttcaaccgtaacgggcacctcaagttccacatccagcggctgcacagtcctgatgggaggaagtcaggaacccctacagcccgggcccctacccagaccccaacccagaccatcatcctgaacagtgatgacgaaacactggccaccctgcacactgcactccagtccagtcacggggtcctgggcccagagcggctacagcaggcactgagccaggaacacatcatcgttgcccaggaacagacagtgaccaatcaggaggaagccgcctacatccaagagatcaccacggcagatggccagaccgtacagcacctggtgacctccgacaaccaggtgcagtatatcatctcccaggatggtgtccagcacctgctcccccaggaatatgttgtggtccctgaaggccatcacatccaggtacaggagggccagatcacacacatccagtatgaacaaggagccccgttccttcaggagtcccagatccagtatgtgcctgtgtccccaggccagcagcttgtcacacaggctcaacttgaggctgcagcacactcagctgtcacagcagtggctgatgctgccatggcccaagcccagggcctgtttggtacagacgagacagtgcccgaacacattcaacagctgcagcaccagggcatcgagtacgacgtcatcaccctggccgatgactagtaatgaactagtccgtaacttgaaagtatttcgatttcttggctttatatatcttgtggaaaggacgaaccgtccggtctttattacccgtc

SEQ ID NO: 422 - DNA, 1013 bp, Homo sapiens
  source 1..1013: mol_type = genomic DNA
accgccaccatggaatccgtcacctttgaggatgtggccgtggagttcatccaggagtgggcattgctggacagcgcacggaggagcctgtgcaaatacaggatgcttgaccagtgcaggaccctggcctccaggggaactccaccatgcaaacccagttgtgtctcccagctggggcaaagagcagagccaaaggcaacagaacgagggattctccgtgccacaggtgttgcctgggaatctcaacttaaacccgaagagttgccttctatgcaggatcttttggaagaagcatcctccagggacatgcaaatggggccggggctgttcctgaggatgcagctggtgccctccatagaagagagggagacaccattgactcgagaggaccggccagctctccaggagccgccttggtctctgggatgcacgggactgaaggccgctatgcagattcagagggtggtgataccagtgcctactctgggccaccgcaacccatgggtggccagggattctgctgtgcctgcacgtgaccctgcctggcttcaggaggacaaagtggaggaagaagctatggctcctgggctgccaaccgcctgttcacaggaaccagtcacctttgcagatgtggctgtggtgttcaccccagaagaatgggtgtttctggactctactcagaggagcctgtatagagatgtgatgctggagaactacaggaacctggcctctgtggctgatcaactgtgcaaacccaatgcgttgtcttatttggaagaaagaggagagcagtggaccactgacaggggcgtcctctcagacacctgtgcagaacctcagtgtcaaccccaagaggcaattcctagccaagatacttttacagagatcctgtccattgatgtgaaagggccacccaactagtaatgaactagtccgtaacttgaaagtatttcgatttcttggctttatatatcttgtggaaaggacgaccacggccctcccggacgtttagg

SEQ ID NO: 423 - DNA, 2099 bp, Homo sapiens
  source 1..2099: mol_type = genomic DNA
accgccaccatggaatccgtcacctttgaggatgtggccgtggagttcatccaggagtgggcattgctggacagcgcacggaggagcctgtgcaaatacaggatgcttgaccagtgcaggaccctggcctccaggggaactccaccatgcaaacccagttgtgtctcccagctggggcaaagagcagagccaaaggcaacagaacgagggattctccgtgccacaggtgttgcctgggaatctcaacttaaacccgaagagttgccttctatgcaggatcttttggaagaagcatcctccagggacatgcaaatggggccggggctgttcctgaggatgcagctggtgccctccatagaagagagggagacaccattgactcgagaggaccggccagctctccaggagccgccttggtctctgggatgcacgggactgaaggccgctatgcagattcagagggtggtgataccagtgcctactctgggccaccgcaacccatgggtggccagggattctgctgtgcctgcacgtgaccctgcctggcttcaggaggacaaagtggaggaagaagctatggctcctgggctgccaaccgcctgttcacaggaaccagtcacctttgcagatgtggctgtggtgttcaccccagaagaatgggtgtttctggactctactcagaggagcctgtatagagatgtgatgctggagaactacaggaacctggcctctgtggctgatcaactgtgcaaacccaatgcgttgtcttatttggaagaaagaggagagcagtggaccactgacaggggcgtcctctcagacacctgtgcagaacctcagtgtcaaccccaagaggcaattcctagccaagatacttttacagagatcctgtccattgatgtgaaaggggagcaacctcagcctggagaaaaactctataaatataatgaacttgagaaaccttttaacagcattgaaccacttttccagtaccagagaattcatgctggagaggcatcctgtgaatgtcaagagattagaaattccttcttccagagtgcccacctaattgtgcccgagaaaatccgtagtggggataaatcctatgcatgtaacaaatgtgaaaaatccttcagatacagctctgaccttatcaggcatgagaagactcatactgcagagaagtgctttgactgtcaagaatgtgggcaagccttcaaatattcctcgaatctccggcgacacatgagaacccataccggagagaagccatttgaatgtagtcagtgtgggaaaaccttcacgaggaactttaacctgattttgcaccagagaaaccacacaggagagaagccctacgagtgtaaagattgtgggaaagccttcaatcagccatcatccctcaggagccacgtgagaactcacactggagagaagccctttgaatgcagccagtgtgggaaagccttcagggaacactcttcactgaagacacatctgcgaacccataccagagagaaaccatatgaatgcaaccagtgtggcaagcccttccggacgagcactcatctgaacgtgcacaagaggatacacacaggggagaaactgtatgagtgcgcgacttgcggtcaggtcttgagtcgtctttcaaccctgaagagtcacatgcgaactcacactggagagaagccctatgtgtgccaggaatgtgggcgagccttcagtgagccctcatccctcaggaaacatgcaaggactcacagtggcaagaagccctatgcatgccaggaatgcgggcgagcctttggtcagtcttcacatcttattgtacatgtgagaacacacagtgccgggagaccctatcaatgtaatcagtgtgagaaagccttcaggcacagctcctcactcactgtacacaaaagaacccatgtgggaagagagaccattaggaatggcagcctgcctttatccatgtctcatccatactgtgggccccttgctaattagtaatgaactagtccgtaacttgaaagtatttcgatttcttggctttatatatcttgtggaaaggacgagcttcttcatcccgtttcaccaca

SEQ ID NO: 424 - DNA, 1493 bp, Homo sapiens
  source 1..1493: mol_type = genomic DNA
accgccaccatggcccagggtttggtgacgttcgccgacgtagccatagacttttctcaggaggagtgggcctgtctgaactctgctcagagggacctgtactgggacgtgatgctggagaactacagtaacttggtctcactggatttggagtcagcatatgaaaataagagtttacctacagaaaaaaacattcatgaaataagggcttccaaaaggaattcagatagaagaagtaaatcccttggccgtaactggatatgtgaaggtacgcttgaaagaccacagcgctccagagggaggtatgtcaatcagatgatcatcaattatgtcaaaagacctgctactagagaaggcacccctcctagaacacatcagagacatcataaggagaattcctttgaatgtaaggactgtgggaaggcctttagtcgtggctatcaacttagtcaacatcagaaaatccatactggtgagaaaccttatgaatgtaaagaatgtaagaaggccttccgttggggcaatcagcttactcaacatcaaaaaattcatactggggagaagccctacgaatgtaaagactgtgggaaggcttttcgatggggctcaagcctcgttattcataagaggattcatactggtgaaaaaccctatgaatgtaaagactgtggaaaggcctttcggcgtggtgatgagctcactcagcaccagagattccacactggggagaaagactacgaatgcaaagactgtgggaagacctttagccgtgtgtataaacttattcagcacaagagaattcatagtggggagaagccttacgagtgtaaagactgtgggaaggcttttatttgtggttcaagcctcattcagcataaaagaattcacacaggtgagaaaccctatgaatgtcaagaatgtgggaaggcctttactcgagtcaattaccttactcagcatcagaagatccacaccggtgagaagcctcacgaatgtaaggagtgtgggaaggcctttcgctggggttcgagcctcgttaagcacgagaggatacatacgggcgagaagccgtacaagtgcacagaatgtgggaaggccttcaattgtggctatcacctcactcagcacgagagaatccacacaggcgaaaccccgtataaatgtaaggagtgtgggaaggctttcatttatggatcgagcctcgtgaaacatgagagaattcataccggggtgaaaccctatgggtgtacagaatgtgggaagagctttagtcacggccatcagcttacacaacatcagaaaacgcacagtggggcgaaatcctacgaatgtaaggagtgcgggaaggcatgtaaccacctaaaccatctccgagaacatcagaggatccacaacagttagtaatgaactagtccgtaacttgaaagtatttcgatttcttggctttatatatcttgtggaaaggacgaccagggctcccatgtatggttggt

SEQ ID NO: 425 - DNA, 3581 bp, Homo sapiens
  source 1..3581: mol_type = genomic DNA
accgccaccatgccaggaacccctggaagcctagaaatgggactgttgacatttagggatgtggccatagaattctctccggaggagtggcaatgtctggacactgcacagcagaatttatataggaatgtgatgttagagaactacagaaacctggccttcctgggtatatgtcctcattttcctcaagacttttggccagagcagagcatggaagattcttttcaaaaagtattactgagaaaatatgaaaaatgtggacatgagaatttacagttaagaaaaggttgtaaaagtgtggatgagtgtaaggtgcacaaagaaggttataataaacttaaccagtgtctcacaactgcccagagcaaagtatttcaatgtgggaaatatttgaaagtcttctataaatttttaaattcaaacagacatacgataagacatactggaaagaaatgcttcaaatgtaaaaaatgtgtcaagtcattttgcatccgtttacacaaaacccaacataaatgcgtttatattacagagaagtcctgtaaatgtaaagaatgtgaaaaaacctttcattggtcctcaacccttactaatcataaggaaattcatactgaagataaaccctacaaatgtgaagaatgtggcaaagcttttaagcagctctcaacccttactacacataaaataatctgtgctaaagagaaaatctacaagtgtgaagaatgtggcaaagcatttctatggtcctcaaccctaactagacataagaggatacacactggagagaaaccctacaaatgtgaagaatgtggcaaagcttttagccattcttcaacccttgctaaacataagagaattcatactggagagaaaccctacaaatgtgaagaatgtggcaaagcttttagccgttcttcaacccttgctaaacataagagaattcatactggagagaaaccctacaaatgtaaagaatgtggcaaagcttttagcaattcctcaacccttgctaatcataagataactcatactgaagagaaaccctacaaatgtaaagaatgtgacaaagcttttaagcgactctcaacccttactaaacataaaataatacatgctggagagaaactctacaaatgtgaagaatgtggcaaagcttttaatcgatcttcaaatcttactatacataagtttattcatactggagagaaaccttacaagtgtgaagaatgtggcaaagcatttaactggtcctcaagccttactaaacataaaagatttcatactagagagaaacccttcaaatgtaaagaatgtggcaaagcatttatatggtcttcaaccctaactagacataagaggatacacactggagagaagccctacaaatgtgaagaatgtggcaaagcttttaggcaatcctcaacccttactaaacataagataattcatactggagagaaaccctacaaatttgaagaatgtggcaaagcttttagacaatccttaacccttaataaacataagataattcatagtagagagaaaccctacaaatgtaaagaatgtggcaaagcttttaagcaattctcaacccttactacacataaaataattcatgctggaaagaaactctacaaatgtgaagaatgtggcaaagcttttaatcattcctcaagtctttctacacataagataattcatactggagagaagtcttacaagtgtgaagaatgtggcaaagcatttctatggtcctcaaccctaagaagacataagaggatacacactggagagaaaccctacaaatgtgaagaatgtggcaaagcttttagccattcttcagcccttgctaaacataagagaattcatactggagagaaaccctacaaatgtaaagaatgtggcaaagcttttagcaattcctcaacccttgctaatcataagataactcatactgaagagaaaccctacaaatgtaaagaatgtgacaaaacttttaagcgactctcaacccttactaaacataaaataatacatgctggagagaaactctacaaatgtgaagaatgtggcaaagcttttaatcgatcttcaaatcttactatacataagtttattcatactggagagaaaccttacaagtgtgaagaatgtggcaaagcatttaactggtcctcaagccttactaaacataaaagaattcatactagagagaaacccttcaaatgtaaagaatgtggcaaagcatttatatggtcttcaaccctaactagacataagaggatacacactggagagaagccctacaaatgtgaagaatgtggcaaagcttttagccgttcctcaacccttactaagcataagacaattcatactggagagaaaccctacaaatgtaaagaatgtggcaaagcttttaagcactcctcagcccttgctaaacataaaataatacatgctggagagaaactctacaaatgtgaggaatgtggcaaagcttttaatcaatcttcaaatcttacgacacataagataattcatactaaagagaaaccttccaagagtgaagaatgtgacaaagcatttatctggtcctcaacccttactgaacataagagaattcataccagagagaaaacctacaaatgtgaagaatgtggcaaagcatttagccagccttcacaccttactacacataagaggatgcacactggagagaaaccctacaaatgtgaagaatgtggcaaagcttttagccaatcctcaacccttactacacataagataattcatactggagagaaaccctacaaatgtgaagaatgtggcaaagcttttaggaaatcttcaactcttactgaacataagataattcatactggagagaaaccctacaaatgtgaagaatgtggcaaagcatttagccaatcctcaaccctaactagacatacgaggatgcacactggagagaaaccatacaaatgtgaagaatgtggcaaagcttttaatcgatcctcaaagcttactacacataagataattcatactggagagaaaccttacaagtgtgaagaatgtggcaaagcatttatatcatcctcaaccctaaatggacataagagaattcatactagagagaaaccctacaaatgtgaagaatgtggcaaagcatttagccaatcttcaaccctaactagacataagaggttgcacaccggagagaaaccctacaaatgtggagaatgtggcaaagcctttaaagagtcctcagctcttactaaacataagataattcacactggagagaaaccctacaaatgtgaaaaatgtggcaaagcctttaaccagtcttcaatccttactaaccataagaaaattcatactatcacacctgtaatcccactactttgggaggccgaggcgggcggatcacgaggtcaggagatggagaccatcctggctaacacagtgaaaccccttctctactagtaatgaactagtccgtaacttgaaagtatttcgatttcttggctttatatatcttgtggaaaggacgagcgttgcttgcgcgaggacagcaa

SEQ ID NO: 426 - DNA, 3677 bp, Homo sapiens
  source 1..3677: mol_type = genomic DNA
accgccaccatgccaggaacccctggaagcctagaaatgggactgttgacatttagggatgtggccatagaattctctccggaggagtggcaatgtctggacactgcacagcagaatttatataggaatgtgatgttagagaactacagaaacctggccttcctgggtattgctctctctaagccagacctgattacttatctggagcaaggaaaagagccctggaatatgaagcaacatgagatggtggatgaacccacaggtatatgtcctcattttcctcaagacttttggccagagcagagcatggaagattcttttcaaaaagtattactgagaaaatatgaaaaatgtggacatgagaatttacagttaagaaaaggttgtaaaagtgtggatgagtgtaaggtgcacaaagaaggttataataaacttaaccagtgtctcacaactgcccagagcaaagtatttcaatgtgggaaatatttgaaagtcttctataaatttttaaattcaaacagacatacgataagacatactggaaagaaatgcttcaaatgtaaaaaatgtgtcaagtcattttgcatccgtttacacaaaacccaacataaatgcgtttatattacagagaagtcctgtaaatgtaaagaatgtgaaaaaacctttcattggtcctcaacccttactaatcataaggaaattcatactgaagataaaccctacaaatgtgaagaatgtggcaaagcttttaagcagctctcaacccttactacacataaaataatctgtgctaaagagaaaatctacaagtgtgaagaatgtggcaaagcatttctatggtcctcaaccctaactagacataagaggatacacactggagagaaaccctacaaatgtgaagaatgtggcaaagcttttagccattcttcaacccttgctaaacataagagaattcatactggagagaaaccctacaaatgtgaagaatgtggcaaagcttttagccgttcttcaacccttgctaaacataagagaattcatactggagagaaaccctacaaatgtaaagaatgtggcaaagcttttagcaattcctcaacccttgctaatcataagataactcatactgaagagaaaccctacaaatgtaaagaatgtgacaaagcttttaagcgactctcaacccttactaaacataaaataatacatgctggagagaaactctacaaatgtgaagaatgtggcaaagcttttaatcgatcttcaaatcttactatacataagtttattcatactggagagaaaccttacaagtgtgaagaatgtggcaaagcatttaactggtcctcaagccttactaaacataaaagatttcatactagagagaaacccttcaaatgtaaagaatgtggcaaagcatttatatggtcttcaaccctaactagacataagaggatacacactggagagaagccctacaaatgtgaagaatgtggcaaagcttttaggcaatcctcaacccttactaaacataagataattcatactggagagaaaccctacaaatttgaagaatgtggcaaagcttttagacaatccttaacccttaataaacataagataattcatagtagagagaaaccctacaaatgtaaagaatgtggcaaagcttttaagcaattctcaacccttactacacataaaataattcatgctggaaagaaactctacaaatgtgaagaatgtggcaaagcttttaatcattcctcaagtctttctacacataagataattcatactggagagaagtcttacaagtgtgaagaatgtggcaaagcatttctatggtcctcaaccctaagaagacataagaggatacacactggagagaaaccctacaaatgtgaagaatgtggcaaagcttttagccattcttcagcccttgctaaacataagagaattcatactggagagaaaccctacaaatgtaaagaatgtggcaaagcttttagcaattcctcaacccttgctaatcataagataactcatactgaagagaaaccctacaaatgtaaagaatgtgacaaaacttttaagcgactctcaacccttactaaacataaaataatacatgctggagagaaactctacaaatgtgaagaatgtggcaaagcttttaatcgatcttcaaatcttactatacataagtttattcatactggagagaaaccttacaagtgtgaagaatgtggcaaagcatttaactggtcctcaagccttactaaacataaaagaattcatactagagagaaacccttcaaatgtaaagaatgtggcaaagcatttatatggtcttcaaccctaactagacataagaggatacacactggagagaagccctacaaatgtgaagaatgtggcaaagcttttagccgttcctcaacccttactaagcataagacaattcatactggagagaaaccctacaaatgtaaagaatgtggcaaagcttttaagcactcctcagcccttgctaaacataaaataatacatgctggagagaaactctacaaatgtgaggaatgtggcaaagcttttaatcaatcttcaaatcttacgacacataagataattcatactaaagagaaaccttccaagagtgaagaatgtgacaaagcatttatctggtcctcaacccttactgaacataagagaattcataccagagagaaaacctacaaatgtgaagaatgtggcaaagcatttagccagccttcacaccttactacacataagaggatgcacactggagagaaaccctacaaatgtgaagaatgtggcaaagcttttagccaatcctcaacccttactacacataagataattcatactggagagaaaccctacaaatgtgaagaatgtggcaaagcttttaggaaatcttcaactcttactgaacataagataattcatactggagagaaaccctacaaatgtgaagaatgtggcaaagcatttagccaatcctcaaccctaactagacatacgaggatgcacactggagagaaaccatacaaatgtgaagaatgtggcaaagcttttaatcgatcctcaaagcttactacacataagataattcatactggagagaaaccttacaagtgtgaagaatgtggcaaagcatttatatcatcctcaaccctaaatggacataagagaattcatactagagagaaaccctacaaatgtgaagaatgtggcaaagcatttagccaatcttcaaccctaactagacataagaggttgcacaccggagagaaaccctacaaatgtggagaatgtggcaaagcctttaaagagtcctcagctcttactaaacataagataattcacactggagagaaaccctacaaatgtgaaaaatgtggcaaagcctttaaccagtcttcaatccttactaaccataagaaaattcatactatcacacctgtaatcccactactttgggaggccgaggcgggcggatcacgaggtcaggagatggagaccatcctggctaacacagtgaaaccccttctctactagtaatgaactagtccgtaacttgaaagtatttcgatttcttggctttatatatcttgtggaaaggacgatcctagtccgcagcctcaggtgat

SEQ ID NO: 427 - DNA, 3257 bp, Homo sapiens
  source 1..3257: mol_type = genomic DNA
accgccaccatgaagagcgaagactatccccatgaaactatggcgccggatatccacgaagaacggcaatatcgctgcgaagactgtgaccagctctttgaatctaaggctgaactagcagatcaccaaaagtttccatgcagtactcctcactcagcattttcaatggttgaagaggactttcagcaaaaactcgaaagcgagaatgatctccaagagatacacacgatccaggagtgtaaggaatgtgaccaagtttttcctgatttgcaaagcctggagaaacacatgctgtcacatactgaagagagggaatacaagtgtgatcagtgtcccaaggcatttaactggaagtccaatttaattcgccaccagatgtcacatgacagtggaaagcactatgaatgtgaaaactgtgccaaggttttcacggaccctagcaaccttcagcggcacattcgctctcagcatgtcggtgcccgggcccatgcatgcccggagtgtggcaaaacgtttgccacttcgtcgggcctcaaacaacacaagcacatccacagcagtgtgaagccctttatctgtgaggtctgccataaatcctatactcagttttcaaacctttgccgtcataagcgcatgcatgctgattgcagaacccaaatcaagtgcaaagactgtggacaaatgttcagcactacgtcttccttaaataaacacaggaggttttgtgagggcaagaaccattttgcggcaggtggattttttggccaaggcatttcacttcctggaaccccagctatggataaaacgtccatggttaatatgagtcatgccaacccgggccttgctgactattttggcgccaataggcatcctgctggtcttacctttccaacagctcctggattttcttttagcttccctggtctgtttccttccggcttgtaccacaggcctcctttgatacctgctagttctcctgttaaaggactatcaagtactgaacagacaaacaaaagtcaaagtcccctcatgacacatcctcagatactgccagctacacaggatattttgaaggcactatctaaacacccatctgtaggggacaataagccagtggagctccagcccgagaggtcctctgaagagaggccctttgagaaaatcagtgaccagtcagagagtagtgaccttgatgatgtcagtacaccaagtggcagtgacctggaaacaacctcgggctctgatctggaaagtgacattgaaagtgataaagagaaatttaaagaaaatggtaaaatgttcaaagacaaagtaagccctcttcagaatctggcttcaataaataataagaaagaatacagcaatcattccattttctcaccatctttagaggagcagactgcggtgtcaggagctgtgaatgattctataaaggctattgcttctattgctgaaaaatactttggttcaacaggactggtggggctgcaagacaaaaaagttggagctttaccttacccttccatgtttcccctcccattttttccagcattctctcaatcaatgtacccatttcctgatagagacttgagatcgttacctttgaaaatggaaccccaatcaccaggtgaagtaaagaaactgcagaagggcagctctgagtccccctttgatctcaccactaagcgaaaggatgagaagcccttgactccagtcccctccaagcctccagtgacacctgccacaagccaagaccagcccctggatctaagtatgggcagtaggagtagagccagtgggacaaagctgactgagcctcgaaaaaaccacgtgtttgggggaaaaaaaggaagcaacgtcgaatcaagacctgcttcagatggttccttgcagcatgcaagacccactcctttctttatggaccctatttacagagtagagaaaagaaaactaactgacccacttgaagctttaaaagagaaatacttgaggccttctccaggattcttgtttcacccacaattccaactgcctgatcagagaacttggatgtcagctattgaaaacatggcagaaaagctagagagcttcagtgccctgaaacctgaggccagtgagctcttacagtcagtgccctctatgttcaacttcagggcgcctcccaatgccctgccagagaaccttctgcggaagggaaaggagcgctatacctgcagatactgtggcaagatttttccaaggtctgcaaacctaacacggcacttgagaacccacacaggagagcagccttacagatgcaaatactgtgacagatcatttagcatatcttctaacttgcaaaggcatgttcgcaacatccacaataaagagaagccatttaagtgtcacttatgtgataggtgttttggtcaacaaaccaatttagacagacacctaaagaaacatgagaatgggaacatgtccggtacagcaacatcgtcgcctcattctgaactggaaagtacaggtgcgattctggatgacaaagaagatgcttacttcacagaaattcgaaatttcattgggaacagcaaccatggcagccaatctcccaggaatgtggaggagagaatgaatggcagtcattttaaagatgaaaaggctttggtgaccagtcaaaattcagacttgctggatgatgaagaagttgaagatgaggtgttgttagatgaggaggatgaagacaatgatattactggaaaaacaggaaaggaaccagtgacaagtaatttacatgaaggaaaccctgaggatgactatgaagaaaccagtgccctggagatgagttgcaagacatccccagtgaggtataaagaggaagaatataaaagtggactttctgctctagatcatataaggcacttcacagatagcctcaaaatgaggaaaatggaagataatcaatattctgaagctgagctgtcttcttttagtacttcccatgtgccagaggaacttaagcagccgttacacagaaagtccaaatcgcaggcatatgctatgatgctgtcactgtctgacaaggagtccctccattctacatcccacagttcttccaacgtgtggcacagtatggccagggctgcggcggaatccagtgctatccagtccataagccacgtatagtaatgaactagtccgtaacttgaaagtatttcgatttcttggctttatatatcttgtggaaaggacgataatacccatgcggtacaccctgc

SEQ ID NO: 428 - DNA, 3452 bp, Homo sapiens
  source 1..3452: mol_type = genomic DNA
accgccaccatgatcttagacgaattttacaatgtgaagttctgcatagatgccagtcaaccagatgttggaagctggctcaagtacattagattcgctggctgttatgatcagcacaaccttgttgcatgccagataaatgatcagatattctatagagtagttgcagacattgcgccgggagaggagcttctgctgttcatgaagagcgaagactatccccatgaaactatggcgccggatatccacgaagaacggcaatatcgctgcgaagactgtgaccagctctttgaatctaaggctgaactagcagatcaccaaaagtttccatgcagtactcctcactcagcattttcaatggttgaagaggactttcagcaaaaactcgaaagcgagaatgatctccaagagatacacacgatccaggagtgtaaggaatgtgaccaagtttttcctgatttgcaaagcctggagaaacacatgctgtcacatactgaagagagggaatacaagtgtgatcagtgtcccaaggcatttaactggaagtccaatttaattcgccaccagatgtcacatgacagtggaaagcactatgaatgtgaaaactgtgccaagcaggttttcacggaccctagcaaccttcagcggcacattcgctctcagcatgtcggtgcccgggcccatgcatgcccggagtgtggcaaaacgtttgccacttcgtcgggcctcaaacaacacaagcacatccacagcagtgtgaagccctttatctgtgaggtctgccataaatcctatactcagttttcaaacctttgccgtcataagcgcatgcatgctgattgcagaacccaaatcaagtgcaaagactgtggacaaatgttcagcactacgtcttccttaaataaacacaggaggttttgtgagggcaagaaccattttgcggcaggtggattttttggccaaggcatttcacttcctggaaccccagctatggataaaacgtccatggttaatatgagtcatgccaacccgggccttgctgactattttggcgccaataggcatcctgctggtcttacctttccaacagctcctggattttcttttagcttccctggtctgtttccttccggcttgtaccacaggcctcctttgatacctgctagttctcctgttaaaggactatcaagtactgaacagacaaacaaaagtcaaagtcccctcatgacacatcctcagatactgccagctacacaggatattttgaaggcactatctaaacacccatctgtaggggacaataagccagtggagctccagcccgagaggtcctctgaagagaggccctttgagaaaatcagtgaccagtcagagagtagtgaccttgatgatgtcagtacaccaagtggcagtgacctggaaacaacctcgggctctgatctggaaagtgacattgaaagtgataaagagaaatttaaagaaaatggtaaaatgttcaaagacaaagtaagccctcttcagaatctggcttcaataaataataagaaagaatacagcaatcattccattttctcaccatctttagaggagcagactgcggtgtcaggagctgtgaatgattctataaaggctattgcttctattgctgaaaaatactttggttcaacaggactggtggggctgcaagacaaaaaagttggagctttaccttacccttccatgtttcccctcccattttttccagcattctctcaatcaatgtacccatttcctgatagagacttgagatcgttacctttgaaaatggaaccccaatcaccaggtgaagtaaagaaactgcagaagggcagctctgagtccccctttgatctcaccactaagcgaaaggatgagaagcccttgactccagtcccctccaagcctccagtgacacctgccacaagccaagaccagcccctggatctaagtatgggcagtaggagtagagccagtgggacaaagctgactgagcctcgaaaaaaccacgtgtttgggggaaaaaaaggaagcaacgtcgaatcaagacctgcttcagatggttccttgcagcatgcaagacccactcctttctttatggaccctatttacagagtagagaaaagaaaactaactgacccacttgaagctttaaaagagaaatacttgaggccttctccaggattcttgtttcacccacaattccaactgcctgatcagagaacttggatgtcagctattgaaaacatggcagaaaagctagagagcttcagtgccctgaaacctgaggccagtgagctcttacagtcagtgccctctatgttcaacttcagggcgcctcccaatgccctgccagagaaccttctgcggaagggaaaggagcgctatacctgcagatactgtggcaagatttttccaaggtctgcaaacctaacacggcacttgagaacccacacaggagagcagccttacagatgcaaatactgtgacagatcatttagcatatcttctaacttgcaaaggcatgttcgcaacatccacaataaagagaagccatttaagtgtcacttatgtgataggtgttttggtcaacaaaccaatttagacagacacctaaagaaacatgagaatgggaacatgtccggtacagcaacatcgtcgcctcattctgaactggaaagtacaggtgcgattctggatgacaaagaagatgcttacttcacagaaattcgaaatttcattgggaacagcaaccatggcagccaatctcccaggaatgtggaggagagaatgaatggcagtcattttaaagatgaaaaggctttggtgaccagtcaaaattcagacttgctggatgatgaagaagttgaagatgaggtgttgttagatgaggaggatgaagacaatgatattactggaaaaacaggaaaggaaccagtgacaagtaatttacatgaaggaaaccctgaggatgactatgaagaaaccagtgccctggagatgagttgcaagacatccccagtgaggtataaagaggaagaatataaaagtggactttctgctctagatcatataaggcacttcacagatagcctcaaaatgaggaaaatggaagataatcaatattctgaagctgagctgtcttcttttagtacttcccatgtgccagaggaacttaagcagccgttacacagaaagtccaaatcgcaggcatatgctatgatgctgtcactgtctgacaaggagtccctccattctacatcccacagttcttccaacgtgtggcacagtatggccagggctgcggcggaatccagtgctatccagtccataagccacgtatagtaatgaactagtccgtaacttgaaagtatttcgatttcttggctttatatatcttgtggaaaggacgattcacaggttcagaggcgcatgct

SEQ ID NO: 429 - DNA, 3230 bp, Homo sapiens
  source 1..3230: mol_type = genomic DNA
accgccaccatgaagagcgaagactatccccatgaaactatggcgccggatatccacgaagaacggcaatatcgctgcgaagactgtgaccagctctttgaatctaaggctgaactagcagatcaccaaaagtttccatgcagtactcctcactcagcattttcaatggttgaagaggactttcagcaaaaactcgaaagcgagaatgatctccaagagatacacacgatccaggagtgtaaggaatgtgaccaagtttttcctgatttgcaaagcctggagaaacacatgctgtcacatactgaagagagggaatacaagtgtgatcagtgtcccaaggcatttaactggaagtccaatttaattcgccaccagatgtcacatgacagtggaaagcactatgaatgtgaaaactgtgccaaggttttcacggaccctagcaaccttcagcggcacattcgctctcagcatgtcggtgcccgggcccatgcatgcccggagtgtggcaaaacgtttgccacttcgtcgggcctcaaacaacacaagcacatccacagcagtgtgaagccctttatctgtgaggtctgccataaatcctatactcagttttcaaacctttgccgtcataagcgcatgcatgctgattgcagaacccaaatcaagtgcaaagactgtggacaaatgttcagcactacgtcttccttaaataaacacaggaggttttgtgagggcaagaaccattttgcggcaggtggattttttggccaaggcatttcacttcctggaaccccagctatggataaaacgtccatggttaatatgagtcatgccaacccgggccttgctgactattttggcgccaataggcatcctgctggtcttacctttccaacagctcctggattttcttttagcttccctggtctgtttccttccggcttgtaccacaggcctcctttgatacctgctagttctcctgttaaaggactatcaagtactgaacagacaaacaaaagtcaaagtcccctcatgacacatcctcagatactgccagctacacaggatattttgaaggcactatctaaacacccatctgtaggggacaataagccagtggagctccagcccgagaggtcctctgaagagaggccctttgagaaaatcagtgaccagtcagagagtagtgaccttgatgatgtcagtacaccaagtggcagtgacctggaaacaacctcgggctctgatctggaaagtgacattgaaagtgataaagagaaatttaaagaaaatggtaaaatgttcaaagacaaagtaagccctcttcagaatctggcttcaataaataataagaaagaatacagcaatcattccattttctcaccatctttagaggagcagactgcggtgtcaggagctgtgaatgattctataaaggctattgcttctattgctgaaaaatactttggttcaacaggactggtggggctgcaagacaaaaaagttggagctttaccttacccttccatgtttcccctcccattttttccagcattctctcaatcaatgtacccatttcctgatagagacttgagatcgttacctttgaaaatggaaccccaatcaccaggtgaagtaaagaaactgcagaagggcagctctgagtccccctttgatctcaccactaagcgaaaggatgagaagcccttgactccagtcccctccaagcctccagtgacacctgccacaagccaagaccagcccctggatctaagtatgggcagtaggagtagagccagtgggacaaagctgactgagcctcgaaaaaaccacgtgtttgggggaaaaaaaggaagcaacgtcgaatcaagacctgcttcagatggttccttgcagcatgcaagacccactcctttctttatggaccctatttacagagtagagaaaagaaaactaactgacccacttgaagctttaaaagagaaatacttgaggccttctccaggattcttgtttcacccacaaatgtcagctattgaaaacatggcagaaaagctagagagcttcagtgccctgaaacctgaggccagtgagctcttacagtcagtgccctctatgttcaacttcagggcgcctcccaatgccctgccagagaaccttctgcggaagggaaaggagcgctatacctgcagatactgtggcaagatttttccaaggtctgcaaacctaacacggcacttgagaacccacacaggagagcagccttacagatgcaaatactgtgacagatcatttagcatatcttctaacttgcaaaggcatgttcgcaacatccacaataaagagaagccatttaagtgtcacttatgtgataggtgttttggtcaacaaaccaatttagacagacacctaaagaaacatgagaatgggaacatgtccggtacagcaacatcgtcgcctcattctgaactggaaagtacaggtgcgattctggatgacaaagaagatgcttacttcacagaaattcgaaatttcattgggaacagcaaccatggcagccaatctcccaggaatgtggaggagagaatgaatggcagtcattttaaagatgaaaaggctttggtgaccagtcaaaattcagacttgctggatgatgaagaagttgaagatgaggtgttgttagatgaggaggatgaagacaatgatattactggaaaaacaggaaaggaaccagtgacaagtaatttacatgaaggaaaccctgaggatgactatgaagaaaccagtgccctggagatgagttgcaagacatccccagtgaggtataaagaggaagaatataaaagtggactttctgctctagatcatataaggcacttcacagatagcctcaaaatgaggaaaatggaagataatcaatattctgaagctgagctgtcttcttttagtacttcccatgtgccagaggaacttaagcagccgttacacagaaagtccaaatcgcaggcatatgctatgatgctgtcactgtctgacaaggagtccctccattctacatcccacagttcttccaacgtgtggcacagtatggccagggctgcggcggaatccagtgctatccagtccataagccacgtatagtaatgaactagtccgtaacttgaaagtatttcgatttcttggctttatatatcttgtggaaaggacgactacgataagtcttgcgttagcca

SEQ ID NO: 430 - DNA, 3260 bp, Homo sapiens
  source 1..3260: mol_type = genomic DNA
accgccaccatgaagagcgaagactatccccatgaaactatggcgccggatatccacgaagaacggcaatatcgctgcgaagactgtgaccagctctttgaatctaaggctgaactagcagatcaccaaaagtttccatgcagtactcctcactcagcattttcaatggttgaagaggactttcagcaaaaactcgaaagcgagaatgatctccaagagatacacacgatccaggagtgtaaggaatgtgaccaagtttttcctgatttgcaaagcctggagaaacacatgctgtcacatactgaagagagggaatacaagtgtgatcagtgtcccaaggcatttaactggaagtccaatttaattcgccaccagatgtcacatgacagtggaaagcactatgaatgtgaaaactgtgccaagcaggttttcacggaccctagcaaccttcagcggcacattcgctctcagcatgtcggtgcccgggcccatgcatgcccggagtgtggcaaaacgtttgccacttcgtcgggcctcaaacaacacaagcacatccacagcagtgtgaagccctttatctgtgaggtctgccataaatcctatactcagttttcaaacctttgccgtcataagcgcatgcatgctgattgcagaacccaaatcaagtgcaaagactgtggacaaatgttcagcactacgtcttccttaaataaacacaggaggttttgtgagggcaagaaccattttgcggcaggtggattttttggccaaggcatttcacttcctggaaccccagctatggataaaacgtccatggttaatatgagtcatgccaacccgggccttgctgactattttggcgccaataggcatcctgctggtcttacctttccaacagctcctggattttcttttagcttccctggtctgtttccttccggcttgtaccacaggcctcctttgatacctgctagttctcctgttaaaggactatcaagtactgaacagacaaacaaaagtcaaagtcccctcatgacacatcctcagatactgccagctacacaggatattttgaaggcactatctaaacacccatctgtaggggacaataagccagtggagctccagcccgagaggtcctctgaagagaggccctttgagaaaatcagtgaccagtcagagagtagtgaccttgatgatgtcagtacaccaagtggcagtgacctggaaacaacctcgggctctgatctggaaagtgacattgaaagtgataaagagaaatttaaagaaaatggtaaaatgttcaaagacaaagtaagccctcttcagaatctggcttcaataaataataagaaagaatacagcaatcattccattttctcaccatctttagaggagcagactgcggtgtcaggagctgtgaatgattctataaaggctattgcttctattgctgaaaaatactttggttcaacaggactggtggggctgcaagacaaaaaagttggagctttaccttacccttccatgtttcccctcccattttttccagcattctctcaatcaatgtacccatttcctgatagagacttgagatcgttacctttgaaaatggaaccccaatcaccaggtgaagtaaagaaactgcagaagggcagctctgagtccccctttgatctcaccactaagcgaaaggatgagaagcccttgactccagtcccctccaagcctccagtgacacctgccacaagccaagaccagcccctggatctaagtatgggcagtaggagtagagccagtgggacaaagctgactgagcctcgaaaaaaccacgtgtttgggggaaaaaaaggaagcaacgtcgaatcaagacctgcttcagatggttccttgcagcatgcaagacccactcctttctttatggaccctatttacagagtagagaaaagaaaactaactgacccacttgaagctttaaaagagaaatacttgaggccttctccaggattcttgtttcacccacaattccaactgcctgatcagagaacttggatgtcagctattgaaaacatggcagaaaagctagagagcttcagtgccctgaaacctgaggccagtgagctcttacagtcagtgccctctatgttcaacttcagggcgcctcccaatgccctgccagagaaccttctgcggaagggaaaggagcgctatacctgcagatactgtggcaagatttttccaaggtctgcaaacctaacacggcacttgagaacccacacaggagagcagccttacagatgcaaatactgtgacagatcatttagcatatcttctaacttgcaaaggcatgttcgcaacatccacaataaagagaagccatttaagtgtcacttatgtgataggtgttttggtcaacaaaccaatttagacagacacctaaagaaacatgagaatgggaacatgtccggtacagcaacatcgtcgcctcattctgaactggaaagtacaggtgcgattctggatgacaaagaagatgcttacttcacagaaattcgaaatttcattgggaacagcaaccatggcagccaatctcccaggaatgtggaggagagaatgaatggcagtcattttaaagatgaaaaggctttggtgaccagtcaaaattcagacttgctggatgatgaagaagttgaagatgaggtgttgttagatgaggaggatgaagacaatgatattactggaaaaacaggaaaggaaccagtgacaagtaatttacatgaaggaaaccctgaggatgactatgaagaaaccagtgccctggagatgagttgcaagacatccccagtgaggtataaagaggaagaatataaaagtggactttctgctctagatcatataaggcacttcacagatagcctcaaaatgaggaaaatggaagataatcaatattctgaagctgagctgtcttcttttagtacttcccatgtgccagaggaacttaagcagccgttacacagaaagtccaaatcgcaggcatatgctatgatgctgtcactgtctgacaaggagtccctccattctacatcccacagttcttccaacgtgtggcacagtatggccagggctgcggcggaatccagtgctatccagtccataagccacgtatagtaatgaactagtccgtaacttgaaagtatttcgatttcttggctttatatatcttgtggaaaggacgatcctagtataagacgccactcacc

SEQ ID NO: 431 - DNA, 3794 bp, Homo sapiens
  source 1..3794: mol_type = genomic DNA
accgccaccatgagatccaaaggcagggcaaggaaactggccacaaataatgagtgtgtatatggcaactaccctgaaatacctttggaagaaatgccagatgcagatggagtagccagcactccctccctcaatattcaagagccatgctctcctgccacatccagtgaagcattcactccaaaggagggttctccttacaaagcccccatctacatccctgatgatatccccattcctgctgagtttgaacttcgagagtcaaatatgcctggggcaggactaggaatatggaccaaaaggaagatcgaagtaggtgaaaagtttgggccttatgtgggagagcagaggtcaaacctgaaagaccccagttatggatgggagatcttagacgaattttacaatgtgaagttctgcatagatgccagtcaaccagatgttggaagctggctcaagtacattagattcgctggctgttatgatcagcacaaccttgttgcatgccagataaatgatcagatattctatagagtagttgcagacattgcgccgggagaggagcttctgctgttcatgaagagcgaagactatccccatgaaactatggcgccggatatccacgaagaacggcaatatcgctgcgaagactgtgaccagctctttgaatctaaggctgaactagcagatcaccaaaagtttccatgcagtactcctcactcagcattttcaatggttgaagaggactttcagcaaaaactcgaaagcgagaatgatctccaagagatacacacgatccaggagtgtaaggaatgtgaccaagtttttcctgatttgcaaagcctggagaaacacatgctgtcacatactgaagagagggaatacaagtgtgatcagtgtcccaaggcatttaactggaagtccaatttaattcgccaccagatgtcacatgacagtggaaagcactatgaatgtgaaaactgtgccaaggttttcacggaccctagcaaccttcagcggcacattcgctctcagcatgtcggtgcccgggcccatgcatgcccggagtgtggcaaaacgtttgccacttcgtcgggcctcaaacaacacaagcacatccacagcagtgtgaagccctttatctgtgaggtctgccataaatcctatactcagttttcaaacctttgccgtcataagcgcatgcatgctgattgcagaacccaaatcaagtgcaaagactgtggacaaatgttcagcactacgtcttccttaaataaacacaggaggttttgtgagggcaagaaccattttgcggcaggtggattttttggccaaggcatttcacttcctggaaccccagctatggataaaacgtccatggttaatatgagtcatgccaacccgggccttgctgactattttggcgccaataggcatcctgctggtcttacctttccaacagctcctggattttcttttagcttccctggtctgtttccttccggcttgtaccacaggcctcctttgatacctgctagttctcctgttaaaggactatcaagtactgaacagacaaacaaaagtcaaagtcccctcatgacacatcctcagatactgccagctacacaggatattttgaaggcactatctaaacacccatctgtaggggacaataagccagtggagctccagcccgagaggtcctctgaagagaggccctttgagaaaatcagtgaccagtcagagagtagtgaccttgatgatgtcagtacaccaagtggcagtgacctggaaacaacctcgggctctgatctggaaagtgacattgaaagtgataaagagaaatttaaagaaaatggtaaaatgttcaaagacaaagtaagccctcttcagaatctggcttcaataaataataagaaagaatacagcaatcattccattttctcaccatctttagaggagcagactgcggtgtcaggagctgtgaatgattctataaaggctattgcttctattgctgaaaaatactttggttcaacaggactggtggggctgcaagacaaaaaagttggagctttaccttacccttccatgtttcccctcccattttttccagcattctctcaatcaatgtacccatttcctgatagagacttgagatcgttacctttgaaaatggaaccccaatcaccaggtgaagtaaagaaactgcagaagggcagctctgagtccccctttgatctcaccactaagcgaaaggatgagaagcccttgactccagtcccctccaagcctccagtgacacctgccacaagccaagaccagcccctggatctaagtatgggcagtaggagtagagccagtgggacaaagctgactgagcctcgaaaaaaccacgtgtttgggggaaaaaaaggaagcaacgtcgaatcaagacctgcttcagatggttccttgcagcatgcaagacccactcctttctttatggaccctatttacagagtagagaaaagaaaactaactgacccacttgaagctttaaaagagaaatacttgaggccttctccaggattcttgtttcacccacaaatgtcagctattgaaaacatggcagaaaagctagagagcttcagtgccctgaaacctgaggccagtgagctcttacagtcagtgccctctatgttcaacttcagggcgcctcccaatgccctgccagagaaccttctgcggaagggaaaggagcgctatacctgcagatactgtggcaagatttttccaaggtctgcaaacctaacacggcacttgagaacccacacaggagagcagccttacagatgcaaatactgtgacagatcatttagcatatcttctaacttgcaaaggcatgttcgcaacatccacaataaagagaagccatttaagtgtcacttatgtgataggtgttttggtcaacaaaccaatttagacagacacctaaagaaacatgagaatgggaacatgtccggtacagcaacatcgtcgcctcattctgaactggaaagtacaggtgcgattctggatgacaaagaagatgcttacttcacagaaattcgaaatttcattgggaacagcaaccatggcagccaatctcccaggaatgtggaggagagaatgaatggcagtcattttaaagatgaaaaggctttggtgaccagtcaaaattcagacttgctggatgatgaagaagttgaagatgaggtgttgttagatgaggaggatgaagacaatgatattactggaaaaacaggaaaggaaccagtgacaagtaatttacatgaaggaaaccctgaggatgactatgaagaaaccagtgccctggagatgagttgcaagacatccccagtgaggtataaagaggaagaatataaaagtggactttctgctctagatcatataaggcacttcacagatagcctcaaaatgaggaaaatggaagataatcaatattctgaagctgagctgtcttcttttagtacttcccatgtgccagaggaacttaagcagccgttacacagaaagtccaaatcgcaggcatatgctatgatgctgtcactgtctgacaaggagtccctccattctacatcccacagttcttccaacgtgtggcacagtatggccagggctgcggcggaatccagtgctatccagtccataagccacgtatagtaatgaactagtccgtaacttgaaagtatttcgatttcttggctttatatatcttgtggaaaggacgagcccgggctctcaatgtacgtcaa

SEQ ID NO: 432 - DNA, 1316 bp, Homo sapiens
  source 1..1316: mol_type = genomic DNA
accgccaccatgatatcattgatcattcctcccaaagaccagatttcacgagtggcaaaaatgttagcggatgagtttggaactgcatctaacattaagtcacgagtaaaccgcctttcagtcctgggagccattacatctgtacaacaaagactcaaactttataacaaagtacctccaaatggtctggttgtatactgtggaacaattgtaacagaagaaggaaaggaaaagaaagtcaacattgactttgaacctttcaaaccaattaatacgtcattgtatttgtgtgacaacaaattccatacagaggctcttacagcactactttcagatgatagcaagtttggattcattgtaatagatggtagtggtgcactttttggcacactccaaggaaacacaagagaagtcctgcacaaattcactgtggatctcccaaagaaacacggtagaggaggtcagtcagccttgcgttttgcccgtttaagaatggaaaagcgacataactatgttcggaaagtagcagagactgctgtgcagctgtttatttctggggacaaagtgaatgtggctggtctagttttagctggatccgctgactttaaaactgaactaagtcaatctgatatgtttgatcagaggttacaatcaaaagttttaaaattagttgatatatcctatggtggtgaaaatggattcaaccaagctattgagttatctactgaagtcctctccaacgtgaaattcattcaagagaagaaattaataggacgatactttgatgaaatcagccaggacacgggcaagtactgttttggcgttgaagatacactaaaggctttggaaatgggagctgtagaaattctaatagtctatgaaaatctggatataatgagatatgttcttcattgccaaggcacagaagaggagaaaattctctatctaactccagagcaagaaaaggataaatctcatttcacagacaaagagaccggacaggaacatgagcttatcgagagcatgcccctgttggaatggtttgctaacaactataaaaaatttggagctacgttggaaattgtcacagataaatcacaagaagggtctcagtttgtgaaaggatttggtggaattggaggtatcttgcggtaccgagtagatttccagggaatggaataccaaggaggagacgatgaattttttgaccttgatgactactagtaatgaactagtccgtaacttgaaagtatttcgatttcttggctttatatatcttgtggaaaggacgatgtggcgctacgtcttgtcgatct

SEQ ID NO: 433 - DNA, 1415 bp, Homo sapiens
  source 1..1415: mol_type = genomic DNA
accgccaccatggcggacgaccccagtgctgccgacaggaacgtggagatctggaagatcaagaagctcattaagagcttggaggcggcccgcggcaatggcaccagcatgatatcattgatcattcctcccaaagaccagatttcacgagtggcaaaaatgttagcggatgagtttggaactgcatctaacattaagtcacgagtaaaccgcctttcagtcctgggagccattacatctgtacaacaaagactcaaactttataacaaagtacctccaaatggtctggttgtatactgtggaacaattgtaacagaagaaggaaaggaaaagaaagtcaacattgactttgaacctttcaaaccaattaatacgtcattgtatttgtgtgacaacaaattccatacagaggctcttacagcactactttcagatgatagcaagtttggattcattgtaatagatggtagtggtgcactttttggcacactccaaggaaacacaagagaagtcctgcacaaattcactgtggatctcccaaagaaacacggtagaggaggtcagtcagccttgcgttttgcccgtttaagaatggaaaagcgacataactatgttcggaaagtagcagagactgctgtgcagctgtttatttctggggacaaagtgaatgtggctggtctagttttagctggatccgctgactttaaaactgaactaagtcaatctgatatgtttgatcagaggttacaatcaaaagttttaaaattagttgatatatcctatggtggtgaaaatggattcaaccaagctattgagttatctactgaagtcctctccaacgtgaaattcattcaagagaagaaattaataggacgatactttgatgaaatcagccaggacacgggcaagtactgttttggcgttgaagatacactaaaggctttggaaatgggagctgtagaaattctaatagtctatgaaaatctggatataatgagatatgttcttcattgccaaggcacagaagaggagaaaattctctatctaactccagagcaagaaaaggataaatctcatttcacagacaaagagaccggacaggaacatgagcttatcgagagcatgcccctgttggaatggtttgctaacaactataaaaaatttggagctacgttggaaattgtcacagataaatcacaagaagggtctcagtttgtgaaaggatttggtggaattggaggtatcttgcggtaccgagtagatttccagggaatggaataccaaggaggagacgatgaattttttgaccttgatgactactagtaatgaactagtccgtaacttgaaagtatttcgatttcttggctttatatatcttgtggaaaggacgactatcgtaaatcaggattctgcac

SEQ ID NO: 434 - DNA, 1373 bp, Homo sapiens
  source 1..1373: mol_type = genomic DNA
accgccaccatgaaacaggatgtgcttaattgtactgaaggcccaattcacagcaatggcaccagcatgatatcattgatcattcctcccaaagaccagatttcacgagtggcaaaaatgttagcggatgagtttggaactgcatctaacattaagtcacgagtaaaccgcctttcagtcctgggagccattacatctgtacaacaaagactcaaactttataacaaagtacctccaaatggtctggttgtatactgtggaacaattgtaacagaagaaggaaaggaaaagaaagtcaacattgactttgaacctttcaaaccaattaatacgtcattgtatttgtgtgacaacaaattccatacagaggctcttacagcactactttcagatgatagcaagtttggattcattgtaatagatggtagtggtgcactttttggcacactccaaggaaacacaagagaagtcctgcacaaattcactgtggatctcccaaagaaacacggtagaggaggtcagtcagccttgcgttttgcccgtttaagaatggaaaagcgacataactatgttcggaaagtagcagagactgctgtgcagctgtttatttctggggacaaagtgaatgtggctggtctagttttagctggatccgctgactttaaaactgaactaagtcaatctgatatgtttgatcagaggttacaatcaaaagttttaaaattagttgatatatcctatggtggtgaaaatggattcaaccaagctattgagttatctactgaagtcctctccaacgtgaaattcattcaagagaagaaattaataggacgatactttgatgaaatcagccaggacacgggcaagtactgttttggcgttgaagatacactaaaggctttggaaatgggagctgtagaaattctaatagtctatgaaaatctggatataatgagatatgttcttcattgccaaggcacagaagaggagaaaattctctatctaactccagagcaagaaaaggataaatctcatttcacagacaaagagaccggacaggaacatgagcttatcgagagcatgcccctgttggaatggtttgctaacaactataaaaaatttggagctacgttggaaattgtcacagataaatcacaagaagggtctcagtttgtgaaaggatttggtggaattggaggtatcttgcggtaccgagtagatttccagggaatggaataccaaggaggagacgatgaattttttgaccttgatgactactagtaatgaactagtccgtaacttgaaagtatttcgatttcttggctttatatatcttgtggaaaggacgacttgactactctgataagatgata

SEQ ID NO: 435 - DNA, 3656 bp, Homo sapiens
  source 1..3656: mol_type = genomic DNA
accgccaccatggaggtggacaccgaggagaagcggcatcgcacgcggtccaaaggggttcgagttcccgtggaaccagccatacaagagctgttcagctgtcccacccctggctgtgacggcagtggtcatgtcagtggcaaatatgcaagacacagaagtgtatatggttgtcccttggcgaaaaaaagaaaaacacaagataaacagccccaggaacctgctcctaaacgaaagccatttgccgtgaaagcagacagctcctcagtggatgagtgtgacgacagtgatgggactgaggacatggatgagaaggaggaggatgagggggaggagtactccgaggacaatgatgagccaggggatgaggacgaggaggacgaggagggggaccgggaggaggaggaggagatcgaggaggaggatgaggacgatgacgaggatggagaagatgtggaggatgaagaagaggaagaggaggaggaggaggaggaggaagaggaagaagaaaacgaagaccatcaaatgaattgtcacaatactcgaataatgcaagacacagaaaaggatgataacaataatgacgaatatgacaattacgatgaactggtggccaagtcattgttaaacctcggcaaaatcgctgaggatgcagcctaccgggccaggactgagtcagaaatgaacagcaatacctccaatagtctggaagacgatagtgacaaaaacgaaaacctgggtcggaaaagtgagttgagtttagacttagacagtgatgttgttagagaaacagtggactcccttaaactattagcccaaggacacggtgttgtgctctcagaaaacatgaatgacagaaattatgcagacagcatgtcgcagcaagacagtagaaatatgaattacgtcatgttggggaagcccatgaacaacggactcatggaaaagatggtggaggagagcgatgaggaggtgtgtctgagcagtctggagtgtttgaggaatcagtgcttcgacctggccaggaagctcagtgagaccaacccgcaggagaggaatccgcagcagaacatgaacatccgtcagcatgtccggccagaagaggacttccccggaaggacgccggacagaaactactcggacatgctgaacctcatgcggctggaggagcagttgagcccccggtcgagagtgtttgccagctgtgcgaaggaggatgggtgtcatgagcgggacgacgataccacctctgtgaactcggacaggtctgaagaggtgttcgacatgaccaaggggaacctgaccctgctggagaaagccatcgctttggaaacggaaagagcaaaggccatgagggagaagatggccatggaagctgggaggagggacaatatgaggtcatatgaggaccagtctccgagacaacttcccggggaggacagaaagcctaaatccagtgacagccatgtcaaaaagccatactatgatccctcaagaacagaaaagaaagagagcaagtgtccaacccccgggtgtgatggaaccggccacgtaactgggctgtacccacatcaccgcagcctgtccggatgcccgcacaaagatagggtccctccagaaatccttgccatgcatgaaagtgtcctcaagtgccccactccgggctgcacggggcgcgggcatgtcaacagcaacaggaactcccaccgaagcctctccggatgcccgatcgctgcagcagagaaactggccaaggcacaggaaaagcaccagagctgcgacgtgtccaagtccagccaggcctcggaccgcgtgctcaggccaatgtgctttgtgaagcagctggagattcctcagtatggctacagaaacaatgtccccacaactacgccgcgttccaacctggccaaggagctcgagaaatattccaagacctcgtttgaatacaacagttacgacaaccatacttatggcaagcgagccatagctcccaaggtgcaaaccagggatatatcccccaaaggatatgatgatgcgaagcggtactgcaaggaccccagccccagcagcagcagcaccagcagctacgcgcccagcagcagcagcaacctgagctgcggcgggggcagcagcgccagcagcacgtgcagcaagagcagcttcgactacacgcacgacatggaggcggcccacatggcggccaccgccatcctcaacctgtccacgcgctgccgcgagatgccgcagaacctgagcaccaagccgcaggacctgtgcgccacgcggaaccctgacatggaggtggatgagaacgggaccctggacctcagcatgaacaagcagaggccgcgggacagctgctgccccatcctgacccctctggagcccatgtccccccagcagcaggcagtgatgaacaaccggtgtttccagctgggcgagggcgactgctgggacttgcccgtagactacaccaaaatgaaaccccggaggatagacgaggacgagtccaaagacattactccagaagacttggacccattccaggaggctctagaagaaagacggtatcccggggaggtgaccatcccaagtcccaaacccaagtaccctcagtgcaaggagagcaaaaaggacttaataactctgtctggctgccccctggcggacaaaagcattcgaagtatgctggccaccagctcccaagaactcaagtgccccacgcctggctgtgatggttctggacatatcaccggcaattatgcttctcatcggagcctttcaggttgcccaagagcaaagaaaagtggtatcaggatagcacagagcaaagaagataaagaagatcaagaacccatcaggtgtccggtccccgggtgcgacggccagggccacatcactgggaagtacgcgtcccatcgcagcgcctccgggtgccccttggcggccaagaggcagaaagacgggtacctgaatggctcccagttctcctggaagtcggtcaagacggaaggcatgtcctgccccacgccaggatgcgacggctcaggccacgtcagcggcagcttcctcacacaccgcagcttgtcaggatgcccgagagccacgtcagcgatgaagaaggcaaagctttctggagagcagatgctgaccatcaaacagcgggccagcaacggtatagaaaatgatgaagaaatcaaacagttagatgaagaaatcaaggagctaaatgaatccaattcccagatggaagccgatatgattaaactcagaactcagattaccacgatggagagcaacctgaagaccatcgaagaggagaacaaagtgattgagcagcagaacgagtctctcctccacgagctggcgaacctgagccagtctctgatccacagcctggctaacatccagctgccgcacatggatccaatcaatgaacaaaattttgatgcttacgtgactactttgacggaaatgtatacaaatcaagatcgttatcagagtccagaaaataaagccctactggaaaatataaagcaggctgtgagaggaattcaggtctagtaatgaactagtccgtaacttgaaagtatttcgatttcttggctttatatatcttgtggaaaggacgatgctctgcttgtacctagtgcgtt

SEQ ID NO: 436 - DNA, 3662 bp, Homo sapiens
  source 1..3662: mol_type = genomic DNA
accgccaccatggaggtggacaccgaggagaagcggcatcgcacgcggtccaaaggggttcgagttcccgtggaaccagccatacaagagctgttcagctgtcccacccctggctgtgacggcagtggtcatgtcagtggcaaatatgcaagacacagaagtgtatatggttgtcccttggcgaaaaaaagaaaaacacaagataaacagccccaggaacctgctcctaaacgaaagccatttgccgtgaaagcagacagctcctcagtggatgagtgtgacgacagtgatgggactgaggacatggatgagaaggaggaggatgagggggaggagtactccgaggacaatgatgagccaggggatgaggacgaggaggacgaggagggggaccgggaggaggaggaggagatcgaggaggaggatgaggacgatgacgaggatggagaagatgtggaggatgaagaagaggaagaggaggaggaggaggaggaggaagaggaagaagaaaacgaagaccatcaaatgaattgtcacaatactcgaataatgcaagacacagaaaaggatgataacaataatgacgaatatgacaattacgatgaactggtggccaagtcattgttaaacctcggcaaaatcgctgaggatgcagcctaccgggccaggactgagtcagaaatgaacagcaatacctccaatagtctggaagacgatagtgacaaaaacgaaaacctgggtcggaaaagtgagttgagtttagacttagacagtgatgttgttagagaaacagtggactcccttaaactattagcccaaggacacggtgttgtgctctcagaaaacatgaatgacagaaattatgcagacagcatgtcgcagcaagacagtagaaatatgaattacgtcatgttggggaagcccatgaacaacggactcatggaaaagatggtggaggagagcgatgaggaggtgtgtctgagcagtctggagtgtttgaggaatcagtgcttcgacctggccaggaagctcagtgagaccaacccgcaggagaggaatccgcagcagaacatgaacatccgtcagcatgtccggccagaagaggacttccccggaaggacgccggacagaaactactcggacatgctgaacctcatgcggctggaggagcagttgagcccccggtcgagagtgtttgccagctgtgcgaaggaggatgggtgtcatgagcgggacgacgataccacctctgtgaactcggacaggtctgaagaggtgttcgacatgaccaaggggaacctgaccctgctggagaaagccatcgctttggaaacggaaagagcaaaggccatgagggagaagatggccatggaagctgggaggagggacaatatgaggtcatatgaggaccagtctccgagacaacttcccggggaggacagaaagcctaaatccagtgacagccatgtcaaaaagccatactatggtaaagatccctcaagaacagaaaagaaagagagcaagtgtccaacccccgggtgtgatggaaccggccacgtaactgggctgtacccacatcaccgcagcctgtccggatgcccgcacaaagatagggtccctccagaaatccttgccatgcatgaaagtgtcctcaagtgccccactccgggctgcacggggcgcgggcatgtcaacagcaacaggaactcccaccgaagcctctccggatgcccgatcgctgcagcagagaaactggccaaggcacaggaaaagcaccagagctgcgacgtgtccaagtccagccaggcctcggaccgcgtgctcaggccaatgtgctttgtgaagcagctggagattcctcagtatggctacagaaacaatgtccccacaactacgccgcgttccaacctggccaaggagctcgagaaatattccaagacctcgtttgaatacaacagttacgacaaccatacttatggcaagcgagccatagctcccaaggtgcaaaccagggatatatcccccaaaggatatgatgatgcgaagcggtactgcaaggaccccagccccagcagcagcagcaccagcagctacgcgcccagcagcagcagcaacctgagctgcggcgggggcagcagcgccagcagcacgtgcagcaagagcagcttcgactacacgcacgacatggaggcggcccacatggcggccaccgccatcctcaacctgtccacgcgctgccgcgagatgccgcagaacctgagcaccaagccgcaggacctgtgcgccacgcggaaccctgacatggaggtggatgagaacgggaccctggacctcagcatgaacaagcagaggccgcgggacagctgctgccccatcctgacccctctggagcccatgtccccccagcagcaggcagtgatgaacaaccggtgtttccagctgggcgagggcgactgctgggacttgcccgtagactacaccaaaatgaaaccccggaggatagacgaggacgagtccaaagacattactccagaagacttggacccattccaggaggctctagaagaaagacggtatcccggggaggtgaccatcccaagtcccaaacccaagtaccctcagtgcaaggagagcaaaaaggacttaataactctgtctggctgccccctggcggacaaaagcattcgaagtatgctggccaccagctcccaagaactcaagtgccccacgcctggctgtgatggttctggacatatcaccggcaattatgcttctcatcggagcctttcaggttgcccaagagcaaagaaaagtggtatcaggatagcacagagcaaagaagataaagaagatcaagaacccatcaggtgtccggtccccgggtgcgacggccagggccacatcactgggaagtacgcgtcccatcgcagcgcctccgggtgccccttggcggccaagaggcagaaagacgggtacctgaatggctcccagttctcctggaagtcggtcaagacggaaggcatgtcctgccccacgccaggatgcgacggctcaggccacgtcagcggcagcttcctcacacaccgcagcttgtcaggatgcccgagagccacgtcagcgatgaagaaggcaaagctttctggagagcagatgctgaccatcaaacagcgggccagcaacggtatagaaaatgatgaagaaatcaaacagttagatgaagaaatcaaggagctaaatgaatccaattcccagatggaagccgatatgattaaactcagaactcagattaccacgatggagagcaacctgaagaccatcgaagaggagaacaaagtgattgagcagcagaacgagtctctcctccacgagctggcgaacctgagccagtctctgatccacagcctggctaacatccagctgccgcacatggatccaatcaatgaacaaaattttgatgcttacgtgactactttgacggaaatgtatacaaatcaagatcgttatcagagtccagaaaataaagccctactggaaaatataaagcaggctgtgagaggaattcaggtctagtaatgaactagtccgtaacttgaaagtatttcgatttcttggctttatatatcttgtggaaaggacgaagatactgtagtgaacaacgtcga

SEQ ID NO: 437 - DNA, 1079 bp, Homo sapiens
  source 1..1079: mol_type = genomic DNA
accgccaccatgcctcggcccggccgcaacacgtacagcgaccagaagccgccctactcgtacatctcgctgaccgctatggccatccagagctctcccgagaagatgctgccgctgagcgagatctacaagttcatcatggaccgcttcccctactacagggagaacacgcagcgctggcagaacagtctgcgccacaacctctccttcaacgactgcttcatcaagatcccgcggcggccggaccagccaggcaagggcagcttctgggcgctgcacccaagctgcggggacatgttcgagaacggcagcttcctgcggcgccgcaagcgcttcaaggtgcttaagtccgaccacctggcgcccagcaagccagccgacgcggcgcagtacctgcagcagcaggccaagctgcggctcagcgcgctggcggcctcgggcacgcacctgccacagatgcccgccgccgcctacaacttgggcggcgtggcgcagccctcgggcttcaagcaccccttcgccatcgagaacatcatcgcgcgggaatacaagatgcctggggggctggccttctccgccatgcagccggtgcccgctgcctacccgctccccaaccagttgactaccatgggcagctcgctgggcaccggctggccacacgtgtatggctccgccggcatgatcgactcggccacccccatctccatggcgagtggcgactacagcgcctacggcgtgccgttgaagccgctgtgccacgcggcgggccaaacgctgcccgccatccccgtgcccattaagcccacgccggccgccgtgcccgcgctgcctgcgctgccagcgcccatccccaccttgctctcgaactcgccgccctcgctcagccccacgtcctcgcaaacagccaccagccaaagcagccccgccacccccagcgaaacgctcaccagcccggcctccgccttgcactcggtggcggtgcactagtaatgaactagtccgtaacttgaaagtatttcgatttcttggctttatatatcttgtggaaaggacgaattccataccgtctgggaattgaa

SEQ ID NO: 438 - DNA, 1400 bp, Homo sapiens
  source 1..1400: mol_type = genomic DNA
accgccaccatgccgcggccggggaagagctcgtacagcgaccaaaaaccgccctactcttacatctcgctgaccgccatggcaatccagcactcggccgagaagatgctgccgctgagcgacatctacaagttcatcatggagcgcttcccctactaccgcgagcacacacagcgctggcagaacagcctgcgccacaacctctccttcaacgactgcttcatcaagattccgcggaggcccgaccagcctggcaagggtagcttctgggcgctgcaccccgactgcggggacatgttcgagaacggcagcttcctgcggcgtcgcaagcgcttcaaggtgctgcgcgccgaccatactcacttgcacgcgggaagcaccaagagcgcgccgggcgccggtccgggagggcaccttcacccccatcaccaccaccacccccaccaccaccatcatcaccacgctgccgcacaccaccaccatcaccaccacccaccccagccgccgccgccgccgcccccgccgccgccgcacatggtacactatttccatcagcaaccgcctactgctccgcagccgcctccgcacctcccgtcacagcccccgcagcaaccgccccagcagtcgcagcctcagcagccgtctcaccccggcaagatgcaggaggcggcggccgtggcggcggcggcggcggcggccgcggcagccgcggtgggcagcgtgggacgcctgtctcagttcccaccctacgggctgggctcggccgccgccgctgccgccgcggccgcggcgtccacgtcaggcttcaagcacccctttgccattgagaacattattggccgggactacaagggcgtgctgcaggctggagggctgcccttggcgtccgtcatgcaccacctgggctaccccgtgcccggccagcttggcaacgtcgtcagctccgtgtggccgcacgttggcgtcatggattcggtggccgccgccgcggccgccgcagccgcagccggagtccctgtaggcccggagtatggggccttcggggtcccggtcaagtccctgtgccactcggcaagccagagcctgcctgccatgccggtgcccatcaagcccacgcctgcgctgccgcccgtgtccgcgctgcagccggggctcactgtccccgcggcttcgcagcagcctccggcgccatccaccgtgtgctccgcggccgcggcctcgcccgttgcctctctgctggagcccacagcccctacctcggccgaaagcaagggcggctccttgcactcggtgctagtgcactcctagtaatgaactagtccgtaacttgaaagtatttcgatttcttggctttatatatcttgtggaaaggacgaggcgcggtcccggaatgctacctc

SEQ ID NO: 439 - DNA, 1589 bp, Homo sapiens
  source 1..1589: mol_type = genomic DNA
accgccaccatgtcagatctggtgaaacaccagcggacccacacaggggagaaaccctacaagtgtggggtctgtggcaagggctttggggatagctctgcccggatcaaacaccagcggactcatagtggggagaagccctatagagcccggccaccagcccagggtcccccaaagattcctcggtcccggatccctgctggtgagcgccccactatctgtggtgaatgtggcaagagcttccggcagagttctgacctggtgaaacaccagcggacacacactggtgagaagccctacaagtgtggcatatgtggcaagggctttggcgacagttccgcccgcatcaagcaccagcggacacaccggggggagcagcccccccgaccagtggtgccccgacggcagccatctcgggcagccacggcagctacccagggaccgaaggcccaggacaagccatatatctgcactgattgcggcaagaggtttgtgctcagctgcagcctcctgagtcaccagcgtagtcacttggggcccaagccctttggctgtgatgtgtgtggaaaggagtttgcccggggatccgacctggtgaagcacctgcgggtgcacacgggtgagaagccctacctctgcccagagtgcggcaaaggtttcgcggacagctccgcccgagtcaaacacctccgcacccacagtggcgagaggccccatgcctgcccggaatgcgaccgtaccttcagcctcagctccacccttcttcgccaccgcctcactcacatggagccccaggacttcagcttcccaggctatcccctacccgctctgatccccagcccacccccacctcctctgggcaccagccccccgctgacacctcgaagtccctcacactcgggtgagccttttggcctgcctggcttggagccagagcctgggggcccacaggctggggagccacccccaccactggcgggcgacaagccccacaagtgccctgagtgtggcaagggcttccgccgaagctctgacctggtgaaacaccatcgtgtgcacacaggggagaaaccctacctctgtcctgaatgcggcaagggttttgctgacagctcagcccgagtcaagcacctccgcacccaccgtggtgaacgggcccggccaccaccaccatccactctgctgcggccacataacccacctggcccagtacccatggcccctcgaccccgagttcgggcccagccttctggacccagccagccccacgtgtgtggcttctgtgggaaggagttcccccggagctcagatctggtcaaacacaggcgtacacacacgggggagaagccatacaagtgtgcagagtgtggcaagggttttggtgacagttctgcccgcatcaagcaccagcgtgggcacctggtcctgacgccctttgggataggggatggtagggcaaggcccctcaagcaggaggcagcaacaggactggaatagtaatgaactagtccgtaacttgaaagtatttcgatttcttggctttatatatcttgtggaaaggacgattcctactaacacacgatacacac

SEQ ID NO: 440 - DNA, 1958 bp, Homo sapiens
  source 1..1958: mol_type = genomic DNA
accgccaccatggagcgcgcggtagagccttggggcccagatctccaccgcccggaggagagggagccacagagaggcgcccgcacaggtctagggagtgagaacgtgatttctcagccgaatgagtttgaacataccccacaggaagatgacttggggttcaaggaagaagatttggctccagatcatgaagtaggaaatgcctctctcaaacctgaaggcatccagaactgggatgacttatgggtccagagagagggtctaggaaagcctcagcctcgggacagaggcccccggctcctgggtgaaccacgctggggccaggctagtagtgatcgggccgctgtgtgtggtgagtgtggcaaaagcttcaggcagatgtcagatctggtgaaacaccagcggacccacacaggggagaaaccctacaagtgtggggtctgtggcaagggctttggggatagctctgcccggatcaaacaccagcggactcatagtggggagaagccctatagagcccggccaccagcccagggtcccccaaagattcctcggtcccggatccctgctggtgagcgccccactatctgtggtgaatgtggcaagagcttccggcagagttctgacctggtgaaacaccagcggacacacactggtgagaagccctacaagtgtggcatatgtggcaagggctttggcgacagttccgcccgcatcaagcaccagcggacacaccggggggagcagcccccccgaccagtggtgccccgacggcagccatctcgggcagccacggcagctacccagggaccgaaggcccaggacaagccatatatctgcactgattgcggcaagaggtttgtgctcagctgcagcctcctgagtcaccagcgtagtcacttggggcccaagccctttggctgtgatgtgtgtggaaaggagtttgcccggggatccgacctggtgaagcacctgcgggtgcacacgggtgagaagccctacctctgcccagagtgcggcaaaggtttcgcggacagctccgcccgagtcaaacacctccgcacccacagtggcgagaggccccatgcctgcccggaatgcgaccgtaccttcagcctcagctccacccttcttcgccaccgcctcactcacatggagccccaggacttcagcttcccaggctatcccctacccgctctgatccccagcccacccccacctcctctgggcaccagccccccgctgacacctcgaagtccctcacactcgggtgagccttttggcctgcctggcttggagccagagcctgggggcccacaggctggggagccacccccaccactggcgggcgacaagccccacaagtgccctgagtgtggcaagggcttccgccgaagctctgacctggtgaaacaccatcgtgtgcacacaggggagaaaccctacctctgtcctgaatgcggcaagggttttgctgacagctcagcccgagtcaagcacctccgcacccaccgtggtgaacgggcccggccaccaccaccatccactctgctgcggccacataacccacctggcccagtacccatggcccctcgaccccgagttcgggcccagccttctggacccagccagccccacgtgtgtggcttctgtgggaaggagttcccccggagctcagatctggtcaaacacaggcgtacacacacgggggagaagccatacaagtgtgcagagtgtggcaagggttttggtgacagttctgcccgcatcaagcaccagcgtgggcacctggtcctgacgccctttgggataggggatggtagggcaaggcccctcaagcaggaggcagcaacaggactggaatagtaatgaactagtccgtaacttgaaagtatttcgatttcttggctttatatatcttgtggaaaggacgagccatcgttcgcgattgcgataag

SEQ ID NO: 441 - DNA, 1232 bp, Homo sapiens
  source 1..1232: mol_type = genomic DNA
accgccaccatgatggccagctaccccgagcccgaggacgcggcgggggccctgctggccccagagaccggtcgcacagtcaaggagccagaagggccgccgccgagcccaggcaagggcggtgggggtggcggcgggacagccccggagaagccggacccggcgcagaagcccccgtactcgtacgtggcgctcatcgccatggcgatccgcgagagcgcggagaagaggctcacgctgtccggcatctaccagtacatcatcgcgaagttcccgttctacgagaagaataagaagggctggcaaaatagcatccgccacaacctcagcctcaacgagtgcttcatcaaggtgccgcgcgagggcggcggcgagcgcaagggcaactactggacgctggacccggcctgcgaagacatgttcgagaagggcaactaccggcgccgccgccgcatgaagaggcccttccggccgccgcccgcgcacttccagcccggcaaggggctcttcggggccggaggcgccgcaggcgggtgcggcgtggcgggcgccggggccgacggctacggctacctggcgccccccaagtacctgcagtctggcttcctcaacaactcgtggccgctaccgcagcctccctcacccatgccctatgcctcctgccagatggcggcagccgcagcggctgcagcagctgcggctgcagccgcgggccccggtagccctggcgcggccgctgtggtcaaggggctggcgggcccggccgcctcgtacgggccgtacacacgcgtgcagagcatggcgctgccccccggcgtagtgaactcgtacaatggcctgggaggcccgccggccgcacccccgcctccgccgcacccccacccgcatccgcacgcacaccatctgcacgcggccgccgcaccgccgcctgccccaccgcaccacggggccgccgcgccgccgccgggccagctcagccctgccagcccagccaccgccgcgcccccggcgcccgcgcccaccagtgcgccgggcctgcagttcgcttgtgcccggcagcccgagctcgccatgatgcattgctcttactgggaccacgacagcaagaccggcgcgctgcattcgcgcctcgatctctagtaatgaactagtccgtaacttgaaagtatttcgatttcttggctttatatatcttgtggaaaggacgactcgcttcgtagcgcaggtcagtg

SEQ ID NO: 442 - DNA, 1139 bp, Homo sapiens
  source 1..1139: mol_type = genomic DNA
accgccaccatgagtcacctcttcgatccccggctgcctgccctggccgcctcgcccatgctgtatctgtacggtcccgagagacccggcctccctctggccttcgcccccgcggctgctctagctgcctcgggccgggccgagaccccgcagaagcctccctacagctacatcgcgctcatcgccatggcgatccaggacgcgcccgagcagagggtcacgctcaacggcatctaccagttcatcatggaccgcttccccttctaccacgacaaccggcagggctggcagaacagcatccgccacaacctctcgctcaacgactgcttcgtcaaggtgccccgcgagaaagggcggccgggcaagggcagctactggacgctggacccccgctgcctggacatgtttgagaacggcaactaccggcgccggaagaggaagcccaagccgggccccggggccccggaggccaagaggccccgcgccgagacgcaccagcgcagcgcggaggcgcagccggaggcggggagcggggcagggggctcgggccccgcaatctcccgcctgcaggcagcgcccgcgggcccctcgcccctcctggacggcccctctccgccggcgcccctccactggccggggaccgcgtccccgaacgaggacgctggtgacgctgcccagggcgcagcggccgtggcggtcggccaggcagcgcgcacaggggacggcccggggtcccctctgcgccccgcctcccgcagctctccgaagagctccgacaagtccaagagcttcagcatagacagcatcctggcgggaaagcagggccagaagccgccttcaggggacgaactcctagggggtgccaagcctgggcccggcggccgtctgggtgcctcgctcctggccgcctcctccagcctccgtccgcctttcaacgcttccctgatgctcgacccgcatgtccagggcggcttttaccagctcgggatccccttcctctcttatttccccctgcaggttcccgacacggtactccacttccagtagtaatgaactagtccgtaacttgaaagtatttcgatttcttggctttatatatcttgtggaaaggacgacctcacccacatatccgggcactt

SEQ ID NO: 443 - DNA, 2438 bp, Homo sapiens
  source 1..2438: mol_type = genomic DNA
accgccaccatgaacaaggtagatcagaagttccaggggtcagtatcatttaaagatgtgactgtgggcttcacccaggaggagtggcagcacctggaccctagtcagagggctctgtatagagatgtgatgctggagaactacagcaaccttgtctcagtggggtattgtgctcacaaaccagaggtgatcttcaggctggaacaaggagaagaaccatggagactggaggaagaattcccaagccagagctttccagaagtctggacagctgatcacctgaaagagaggagccaagaaaatcaatctaaacatttgtgggaagttgtattcatcaataatgaaatgctgactaaggaacaaggtaatgtaataggaataccatttaacatggacgtaagttcttttccttccagaaaaatgttctgtcagtatgactcacgtggaatgagtttcaacactgtttcagaattggttatcagtaagataaactatttaggaaaaaagtctgacgaatttaatgcatgtgggaaattgttactcaatattaagcatgatgaaactcatactcgagagaaaaatgaagttttgaaaaataggaacactctgagtcatcgtgagaacactttgcagcatgagaagattcaaactttagaccacaattttgaatacagtatatgtcaggaaaccctccttgaaaaggcagtattcaatacacggaagagagagaatgcagaagagaataactgtgactataatgaatttgggagaactttctgtgatagttcatccctcttgttccatcagatacctccatcaaaggacagtcactatgaatttagtgattgtgagaagttcttatgtgtgaagtccaccctttctaaacatgatggggtacctgtgaaacactatgattgtggtgaaagtgggaataatttcaggaggaaattgtgtctgtcacagcttcagaaaggtgataaaggagagaaacactttgaatgtaatgaatgtgggaaagctttctgggagaagtcacatctcactcgacatcagagggtgcacacaggagagaaacactttcaatgtaatcaatgtggaaaaactttctgggagaagtcaaacctcactaaacatcagagatcacacacaggggagaaaccttttgaatgcaatgaatgtgggaaagcctttagccataagtcagccctcacattacaccagagaacacatacaggggagaaaccctatcagtgtaatgcatgtgggaaaactttttaccagaaatctgacctcactaaacatcagagaacacacacagggcagaaaccctatgaatgttatgaatgtggaaaatccttctgtatgaattcacaccttacagtacaccagagaactcacacaggtgagaaaccttttgaatgtcttgagtgtgggaaatccttttgtcaaaagtcacatcttacacagcatcagagaactcacataggagataaaccttatgaatgtaatgcatgtgggaaaactttctaccacaagtcagtactcaccaggcatcagataattcatacagggttgaaaccttatgaatgttatgaatgtgggaaaaccttctgcttgaagtcagacctcacaatacatcagagaacgcacacaggggagaaaccctttgcatgtcctgaatgtgggaaattctttagccataagtcaaccctctctcaacattatagaacacacacgggggagaaaccctatgaatgtcatgaatgtggaaaaatcttttacaataaatcatacctaacaaaacataatagaacacatacaggggagaaaccctatgaatgtaatgaatgtggaaaaaccttctgccagaagtcacaactcactcagcatcagagaattcacataggggagaaaccctatgaatgtaatgagtgtggaaaagctttctgccataagtcagctctaattgtacatcagagaacccatacacaagaaaagccttataaatgtaacgaatgtggaaaatctttctgtgtgaagtcaggacttattttacatgagagaaagcacacgggggagaaaccctatgaatgcaatgaatgtgggaaatccttcagtcacaaatcatcactcacagtacatcacagggctcacacaggagagaaatcttgtcagtgtaatgaatgtggaaaaatcttttaccgtaaatcagaccttgctaaacatcagagatcacatacaggggaaaagccctatgaatgtaacacatgcaggaaaaccttctctcaaaagtcaaatctcattgtacatcagagaacacacataggagaaaaaccttatgaatagtaatgaactagtccgtaacttgaaagtatttcgatttcttggctttatatatcttgtggaaaggacgagttctggtttggcgtgagaacagc

SEQ ID NO: 444 - DNA, 2555 bp, Homo sapiens
  source 1..2555: mol_type = genomic DNA
accgccaccatggcgaatgcaacccgacgagggagtggggtagaacagaagtcccaggagtcagtatcatttaaagatgtgactgtgggcttcacccaggaggagtggcagcacctggaccctagtcagagggctctgtatagagatgtgatgctggagaactacagcaaccttgtctcagtggggtattgtgttcacaaaccagaggtgatcttcaggctgcaacaaggagaagagccatggaaacaggaggaagaattcccaagccaaagctttccagtctggacagctgatcacctgaaagagaggagccaagaaaaccaatctaaacatttgtgggaagttgtattcatcaataatgaaatgctgactaaggaacaaggtgatgtaataggaataccatttaatgtggatgtaagttcttttccttccagaaaaatgttctgtcagtgtgattcatgtggaatgagtttcaacactgtttcagaattggttatcagtaagataaactatttaggaaaaaagtctgatgaatttaatgcctgtgggaaattgttactcaatattaagcatgatgaaactcatactcaagagaaaaatgaagttttgaaaaataggaacacactgagtcatcatgaggagactttgcagcatgagaagattcaaactttagagcacaattttgaatacagtatatgtcaggaaaccctccttgaaaaggcagtattcaatacacagaagagagagaacgcagaagagaataactgtgattataatgaatttgggagaactttgtgtgatagttcatccctcttgttccatcagatatctccgtcaagggacaatcactatgaatttagtgattgtgagaagttcttatgtgtgaagtccaccctttctaaacctcatggggtatctatgaaacactatgattgtggtgaaagtgggaataatttcaggaggaaattgtgtctgtcacaccttcagaaaggtgataaaggagagaaacactttgaatgtaatgaatgtgggaaagctttctgggagaagtcacatctcactcgacatcagagggtgcacacaggacagaaaccctttcaatgtaatgaatgtgaaaaagctttctgggataagtcaaacctcactaaacatcaaagatcacacacaggggagaaaccttttgaatgcaatgaatgtgggaaagcctttagccataagtcagccctcacattacaccagagaacacatacaggggagaaaccctatcaatgtaatgcgtgtgggaaaactttttgccagaaatctgacctcactaaacatcagagaacacacacagggctgaaaccctatgaatgttatgaatgtggaaaatccttccgtgtgacttcgcaccttaaagtacaccagagaactcacacaggtgagaaaccttttgaatgtcttgagtgtgggaaatcctttagtgaaaagtcaaatcttacacagcatcagagaattcacataggagataaatcttatgaatgtaatgcatgtgggaaaactttctaccacaagtcattactcaccaggcatcagataattcatacagggtggaaaccttatgaatgttatgaatgtgggaaaaccttctgcttgaagtcagacctcacagtacatcagagaacacacacagggcagaaaccctttgcatgtcccgaatgtgggaaattctttagccataagtcaaccctctctcaacattatagaacacacacaggggagaaaccctacgaatgtcatgaatgtggaaaaatcttttacaataaatcatacctaactaaacataatagaacacatacaggggagaaaccctatgaatgtaatgaatgtggaaaagccttctaccagaagtcacaactcactcagcatcagagaattcacataggggagaaaccctataaatgtaatgagtgtggaaaagctttctgccataagtcagctctaattgtacatcagagaacccatacacaagaaaagccctataaatgtaatgaatgtggaaaatctttctgtgtaaaatcaggacttattttccatgagagaaagcacacgggggagaaaccctatgaatgcaatgaatgtgggaaattcttcaggcacaaatcatcactcacagtacatcacagggctcacacaggagagaaatcttgtcaatgtaatgaatgtggaaaaatcttttaccgtaaatcggaacttgctcaacatcagagatcacatacaggggaaaagccctatgaatgtaacacatgcaggaaaactttctctcaaaagtcaaatctcattgtacatcagagaagacatataggagaaaaccttatgaatgaaatggatattagaaatttccagccacaagtcagcctccataatgcctcagagtattcacactgtggagaaagccctgatgacatcctgaatgttcagtagtaatgaactagtccgtaacttgaaagtatttcgatttcttggctttatatatcttgtggaaaggacgacatgaaggacgttagtaaatgcat

SEQ ID NO: 445 - DNA, 2537 bp, Homo sapiens
  source 1..2537: mol_type = genomic DNA
accgccaccatgaacaaggtagaacagaagtcccaggagtcagtatcatttaaagatgtgactgtgggcttcacccaggaggagtggcagcacctggaccctagtcagagggctctgtatagagatgtgatgctggagaactacagcaaccttgtctcagtggggtattgtgttcacaaaccagaggtgatcttcaggctgcaacaaggagaagagccatggaaacaggaggaagaattcccaagccaaagctttccagaagtctggacagctgatcacctgaaagagaggagccaagaaaaccaatctaaacatttgtgggaagttgtattcatcaataatgaaatgctgactaaggaacaaggtgatgtaataggaataccatttaatgtggatgtaagttcttttccttccagaaaaatgttctgtcagtgtgattcatgtggaatgagtttcaacactgtttcagaattggttatcagtaagataaactatttaggaaaaaagtctgatgaatttaatgcctgtgggaaattgttactcaatattaagcatgatgaaactcatactcaagagaaaaatgaagttttgaaaaataggaacacactgagtcatcatgaggagactttgcagcatgagaagattcaaactttagagcacaattttgaatacagtatatgtcaggaaaccctccttgaaaaggcagtattcaatacacagaagagagagaacgcagaagagaataactgtgattataatgaatttgggagaactttgtgtgatagttcatccctcttgttccatcagatatctccgtcaagggacaatcactatgaatttagtgattgtgagaagttcttatgtgtgaagtccaccctttctaaacctcatggggtatctatgaaacactatgattgtggtgaaagtgggaataatttcaggaggaaattgtgtctgtcacaccttcagaaaggtgataaaggagagaaacactttgaatgtaatgaatgtgggaaagctttctgggagaagtcacatctcactcgacatcagagggtgcacacaggacagaaaccctttcaatgtaatgaatgtgaaaaagctttctgggataagtcaaacctcactaaacatcaaagatcacacacaggggagaaaccttttgaatgcaatgaatgtgggaaagcctttagccataagtcagccctcacattacaccagagaacacatacaggggagaaaccctatcaatgtaatgcgtgtgggaaaactttttgccagaaatctgacctcactaaacatcagagaacacacacagggctgaaaccctatgaatgttatgaatgtggaaaatccttccgtgtgacttcgcaccttaaagtacaccagagaactcacacaggtgagaaaccttttgaatgtcttgagtgtgggaaatcctttagtgaaaagtcaaatcttacacagcatcagagaattcacataggagataaatcttatgaatgtaatgcatgtgggaaaactttctaccacaagtcattactcaccaggcatcagataattcatacagggtggaaaccttatgaatgttatgaatgtgggaaaaccttctgcttgaagtcagacctcacagtacatcagagaacacacacagggcagaaaccctttgcatgtcccgaatgtgggaaattctttagccataagtcaaccctctctcaacattatagaacacacacaggggagaaaccctacgaatgtcatgaatgtggaaaaatcttttacaataaatcatacctaactaaacataatagaacacatacaggggagaaaccctatgaatgtaatgaatgtggaaaagccttctaccagaagtcacaactcactcagcatcagagaattcacataggggagaaaccctataaatgtaatgagtgtggaaaagctttctgccataagtcagctctaattgtacatcagagaacccatacacaagaaaagccctataaatgtaatgaatgtggaaaatctttctgtgtaaaatcaggacttattttccatgagagaaagcacacgggggagaaaccctatgaatgcaatgaatgtgggaaattcttcaggcacaaatcatcactcacagtacatcacagggctcacacaggagagaaatcttgtcaatgtaatgaatgtggaaaaatcttttaccgtaaatcggaacttgctcaacatcagagatcacatacaggggaaaagccctatgaatgtaacacatgcaggaaaactttctctcaaaagtcaaatctcattgtacatcagagaagacatataggagaaaaccttatgaatgaaatggatattagaaatttccagccacaagtcagcctccataatgcctcagagtattcacactgtggagaaagccctgatgacatcctgaatgttcagtagtaatgaactagtccgtaacttgaaagtatttcgatttcttggctttatatatcttgtggaaaggacgaaaatatagccgtatcgcggcgtgt

SEQ ID NO: 446 - DNA, 2534 bp, Homo sapiens
  source 1..2534: mol_type = genomic DNA
accgccaccatgaacaaggtagaacagaagtcccaggagtcagtatcatttaaagatgtgactgtgggcttcacccaggaggagtggcagcacctggaccctagtcagagggctctgtatagagatgtgatgctggagaactacagcaaccttgtctcagtggggtattgtgttcacaaaccagaggtgatcttcaggctgcaacaaggagaagagccatggaaacaggaggaagaattcccaagccaaagctttccagtctggacagctgatcacctgaaagagaggagccaagaaaaccaatctaaacatttgtgggaagttgtattcatcaataatgaaatgctgactaaggaacaaggtgatgtaataggaataccatttaatgtggatgtaagttcttttccttccagaaaaatgttctgtcagtgtgattcatgtggaatgagtttcaacactgtttcagaattggttatcagtaagataaactatttaggaaaaaagtctgatgaatttaatgcctgtgggaaattgttactcaatattaagcatgatgaaactcatactcaagagaaaaatgaagttttgaaaaataggaacacactgagtcatcatgaggagactttgcagcatgagaagattcaaactttagagcacaattttgaatacagtatatgtcaggaaaccctccttgaaaaggcagtattcaatacacagaagagagagaacgcagaagagaataactgtgattataatgaatttgggagaactttgtgtgatagttcatccctcttgttccatcagatatctccgtcaagggacaatcactatgaatttagtgattgtgagaagttcttatgtgtgaagtccaccctttctaaacctcatggggtatctatgaaacactatgattgtggtgaaagtgggaataatttcaggaggaaattgtgtctgtcacaccttcagaaaggtgataaaggagagaaacactttgaatgtaatgaatgtgggaaagctttctgggagaagtcacatctcactcgacatcagagggtgcacacaggacagaaaccctttcaatgtaatgaatgtgaaaaagctttctgggataagtcaaacctcactaaacatcaaagatcacacacaggggagaaaccttttgaatgcaatgaatgtgggaaagcctttagccataagtcagccctcacattacaccagagaacacatacaggggagaaaccctatcaatgtaatgcgtgtgggaaaactttttgccagaaatctgacctcactaaacatcagagaacacacacagggctgaaaccctatgaatgttatgaatgtggaaaatccttccgtgtgacttcgcaccttaaagtacaccagagaactcacacaggtgagaaaccttttgaatgtcttgagtgtgggaaatcctttagtgaaaagtcaaatcttacacagcatcagagaattcacataggagataaatcttatgaatgtaatgcatgtgggaaaactttctaccacaagtcattactcaccaggcatcagataattcatacagggtggaaaccttatgaatgttatgaatgtgggaaaaccttctgcttgaagtcagacctcacagtacatcagagaacacacacagggcagaaaccctttgcatgtcccgaatgtgggaaattctttagccataagtcaaccctctctcaacattatagaacacacacaggggagaaaccctacgaatgtcatgaatgtggaaaaatcttttacaataaatcatacctaactaaacataatagaacacatacaggggagaaaccctatgaatgtaatgaatgtggaaaagccttctaccagaagtcacaactcactcagcatcagagaattcacataggggagaaaccctataaatgtaatgagtgtggaaaagctttctgccataagtcagctctaattgtacatcagagaacccatacacaagaaaagccctataaatgtaatgaatgtggaaaatctttctgtgtaaaatcaggacttattttccatgagagaaagcacacgggggagaaaccctatgaatgcaatgaatgtgggaaattcttcaggcacaaatcatcactcacagtacatcacagggctcacacaggagagaaatcttgtcaatgtaatgaatgtggaaaaatcttttaccgtaaatcggaacttgctcaacatcagagatcacatacaggggaaaagccctatgaatgtaacacatgcaggaaaactttctctcaaaagtcaaatctcattgtacatcagagaagacatataggagaaaaccttatgaatgaaatggatattagaaatttccagccacaagtcagcctccataatgcctcagagtattcacactgtggagaaagccctgatgacatcctgaatgttcagtagtaatgaactagtccgtaacttgaaagtatttcgatttcttggctttatatatcttgtggaaaggacgatcataattcaactttccagtaccg

SEQ ID NO: 447 - DNA, 2591 bp, Homo sapiens
  source 1..2591: mol_type = genomic DNA
accgccaccatgtgccctagaggatatccagaacaatccaattggatgtcttctccgctgtactccacagaggtagaacagaagtcccaggagtcagtatcatttaaagatgtgactgtgggcttcacccaggaggagtggcagcacctggaccctagtcagagggctctgtatagagatgtgatgctggagaactacagcaaccttgtctcagtggggtattgtgttcacaaaccagaggtgatcttcaggctgcaacaaggagaagagccatggaaacaggaggaagaattcccaagccaaagctttccagaagtctggacagctgatcacctgaaagagaggagccaagaaaaccaatctaaacatttgtgggaagttgtattcatcaataatgaaatgctgactaaggaacaaggtgatgtaataggaataccatttaatgtggatgtaagttcttttccttccagaaaaatgttctgtcagtgtgattcatgtggaatgagtttcaacactgtttcagaattggttatcagtaagataaactatttaggaaaaaagtctgatgaatttaatgcctgtgggaaattgttactcaatattaagcatgatgaaactcatactcaagagaaaaatgaagttttgaaaaataggaacacactgagtcatcatgaggagactttgcagcatgagaagattcaaactttagagcacaattttgaatacagtatatgtcaggaaaccctccttgaaaaggcagtattcaatacacagaagagagagaacgcagaagagaataactgtgattataatgaatttgggagaactttgtgtgatagttcatccctcttgttccatcagatatctccgtcaagggacaatcactatgaatttagtgattgtgagaagttcttatgtgtgaagtccaccctttctaaacctcatggggtatctatgaaacactatgattgtggtgaaagtgggaataatttcaggaggaaattgtgtctgtcacaccttcagaaaggtgataaaggagagaaacactttgaatgtaatgaatgtgggaaagctttctgggagaagtcacatctcactcgacatcagagggtgcacacaggacagaaaccctttcaatgtaatgaatgtgaaaaagctttctgggataagtcaaacctcactaaacatcaaagatcacacacaggggagaaaccttttgaatgcaatgaatgtgggaaagcctttagccataagtcagccctcacattacaccagagaacacatacaggggagaaaccctatcaatgtaatgcgtgtgggaaaactttttgccagaaatctgacctcactaaacatcagagaacacacacagggctgaaaccctatgaatgttatgaatgtggaaaatccttccgtgtgacttcgcaccttaaagtacaccagagaactcacacaggtgagaaaccttttgaatgtcttgagtgtgggaaatcctttagtgaaaagtcaaatcttacacagcatcagagaattcacataggagataaatcttatgaatgtaatgcatgtgggaaaactttctaccacaagtcattactcaccaggcatcagataattcatacagggtggaaaccttatgaatgttatgaatgtgggaaaaccttctgcttgaagtcagacctcacagtacatcagagaacacacacagggcagaaaccctttgcatgtcccgaatgtgggaaattctttagccataagtcaaccctctctcaacattatagaacacacacaggggagaaaccctacgaatgtcatgaatgtggaaaaatcttttacaataaatcatacctaactaaacataatagaacacatacaggggagaaaccctatgaatgtaatgaatgtggaaaagccttctaccagaagtcacaactcactcagcatcagagaattcacataggggagaaaccctataaatgtaatgagtgtggaaaagctttctgccataagtcagctctaattgtacatcagagaacccatacacaagaaaagccctataaatgtaatgaatgtggaaaatctttctgtgtaaaatcaggacttattttccatgagagaaagcacacgggggagaaaccctatgaatgcaatgaatgtgggaaattcttcaggcacaaatcatcactcacagtacatcacagggctcacacaggagagaaatcttgtcaatgtaatgaatgtggaaaaatcttttaccgtaaatcggaacttgctcaacatcagagatcacatacaggggaaaagccctatgaatgtaacacatgcaggaaaactttctctcaaaagtcaaatctcattgtacatcagagaagacatataggagaaaaccttatgaatgaaatggatattagaaatttccagccacaagtcagcctccataatgcctcagagtattcacactgtggagaaagccctgatgacatcctgaatgttcagtagtaatgaactagtccgtaacttgaaagtatttcgatttcttggctttatatatcttgtggaaaggacgaaggtagcctcggacagcgtggtct

SEQ ID NO: 448 - DNA, 2201 bp, Homo sapiens
  source 1..2201: mol_type = genomic DNA
accgccaccatgctgactaaggaacaaggtgatgtaataggaataccatttaatgtggatgtaagttcttttccttccagaaaaatgttctgtcagtgtgattcatgtggaatgagtttcaacactgtttcagaattggttatcagtaagataaactatttaggaaaaaagtctgatgaatttaatgcctgtgggaaattgttactcaatattaagcatgatgaaactcatactcaagagaaaaatgaagttttgaaaaataggaacacactgagtcatcatgaggagactttgcagcatgagaagattcaaactttagagcacaattttgaatacagtatatgtcaggaaaccctccttgaaaaggcagtattcaatacacagaagagagagaacgcagaagagaataactgtgattataatgaatttgggagaactttgtgtgatagttcatccctcttgttccatcagatatctccgtcaagggacaatcactatgaatttagtgattgtgagaagttcttatgtgtgaagtccaccctttctaaacctcatggggtatctatgaaacactatgattgtggtgaaagtgggaataatttcaggaggaaattgtgtctgtcacaccttcagaaaggtgataaaggagagaaacactttgaatgtaatgaatgtgggaaagctttctgggagaagtcacatctcactcgacatcagagggtgcacacaggacagaaaccctttcaatgtaatgaatgtgaaaaagctttctgggataagtcaaacctcactaaacatcaaagatcacacacaggggagaaaccttttgaatgcaatgaatgtgggaaagcctttagccataagtcagccctcacattacaccagagaacacatacaggggagaaaccctatcaatgtaatgcgtgtgggaaaactttttgccagaaatctgacctcactaaacatcagagaacacacacagggctgaaaccctatgaatgttatgaatgtggaaaatccttccgtgtgacttcgcaccttaaagtacaccagagaactcacacaggtgagaaaccttttgaatgtcttgagtgtgggaaatcctttagtgaaaagtcaaatcttacacagcatcagagaattcacataggagataaatcttatgaatgtaatgcatgtgggaaaactttctaccacaagtcattactcaccaggcatcagataattcatacagggtggaaaccttatgaatgttatgaatgtgggaaaaccttctgcttgaagtcagacctcacagtacatcagagaacacacacagggcagaaaccctttgcatgtcccgaatgtgggaaattctttagccataagtcaaccctctctcaacattatagaacacacacaggggagaaaccctacgaatgtcatgaatgtggaaaaatcttttacaataaatcatacctaactaaacataatagaacacatacaggggagaaaccctatgaatgtaatgaatgtggaaaagccttctaccagaagtcacaactcactcagcatcagagaattcacataggggagaaaccctataaatgtaatgagtgtggaaaagctttctgccataagtcagctctaattgtacatcagagaacccatacacaagaaaagccctataaatgtaatgaatgtggaaaatctttctgtgtaaaatcaggacttattttccatgagagaaagcacacgggggagaaaccctatgaatgcaatgaatgtgggaaattcttcaggcacaaatcatcactcacagtacatcacagggctcacacaggagagaaatcttgtcaatgtaatgaatgtggaaaaatcttttaccgtaaatcggaacttgctcaacatcagagatcacatacaggggaaaagccctatgaatgtaacacatgcaggaaaactttctctcaaaagtcaaatctcattgtacatcagagaagacatataggagaaaaccttatgaatgaaatggatattagaaatttccagccacaagtcagcctccataatgcctcagagtattcacactgtggagaaagccctgatgacatcctgaatgttcagtagtaatgaactagtccgtaacttgaaagtatttcgatttcttggctttatatatcttgtggaaaggacgaagtgcttcacacagcttcctactc

SEQ ID NO: 449 - DNA, 1787 bp, Homo sapiens
  source 1..1787: mol_type = genomic DNA
accgccaccatgggggccaggacacctttgccttctttctgggtttctttctttgccgagacagggattttgttcccaggaggcactccctggcccatgggatctcagcattcaaagcagcacaggaaacctgggcccctgaaacggggccaccgaagagatcggagaacaaccaggaggaagtactggaaggaaggaagggagatcgctcgtgtcttagatgatgagggcagaaacctgaggcagcagaagcttgatcggcagcgggccctgctggagcagaagcagaagaagaagcgccaggagcccctgatggtgcaggccaatgcagatgggcggccccggagccggcgggcccggcagtcagaggaacaagcccccctggtggagtcctacctcagcagcagtggcagcaccagctaccaagttcaagaggccgactcactcgccagtgtgcagctgggagccacgcgcccaacagcaccagcttcagccaagagaaccaaggcggcagctacagcagggggccagggtggcgccgctaggaaggagaagaagggaaagcacaaaggcaccagcgggccagcagcactggcagaagacaagtctgaggcccaaggcccagtgcagattctgactgtgggccagtcagaccacgcccaggacgcaggggagacggcagctggtgggggcgaacggcccagcgggcaggatctccgtgccacgatgcagaggaagggcatctccagcagcatgagctttgacgaggatgaggaggatgaggaggagaatagctccagctcctcccagctaaatagtaacacccgccccagctctgctactagcaggaagtccgtcagggaggcagcctcagcccctagcccaacagctccagagcaaccagtggacgttgaggtccaggatcttgaggagtttgcactgaggccggccccccagggtatcaccatcaaatgccgcatcactcgggacaagaaagggatggaccggggcatgtaccccacctactttctgcacctggaccgtgaggatgggaagaaggtgttcctcctggcgggaaggaagagaaagaagagtaaaacttccaattacctcatctctgtggacccaacagacttgtctcgaggaggggacagctatatcgggaaactgcggtccaacttgatgggcaccaagttcactgtttatgacaatggagtcaaccctcagaaggcctcatcctccactttggaaagtggaaccttacgtcaggagctggcagctgtgtgctacgagacaaacgtcttaggcttcaaggggcctcggaagatgagcgtgattgtcccaggcatgaacatggttcatgagagagtctctatccgcccccgcaacgagcatgagacactgctagcacgctggcagaataagaacacggagagtatcatcgagctgcaaaacaagacacctgtctggaatgatgacacacagtcctatgtactcaacttccatgggcgcgtcacacaggcctccgtgaagaacttccagatcatccatggcaatgacccggactacatcgtgatgcagtttggccgggtagcagaggatgtgttcaccatggattacaactacccgctgtgtgcactgcaggcctttgccattgccctgtccagcttcgacagcaagctggcgtgcgagtagtaatgaactagtccgtaacttgaaagtatttcgatttcttggctttatatatcttgtggaaaggacgaggctgcatctcgttggcttgacta

SEQ ID NO: 450 - DNA, 1622 bp, Homo sapiens
  source 1..1622: mol_type = genomic DNA
accgccaccatgacttccaagccgcattccgactggattccctacagtgtcttagatgatgagggcagaaacctgaggcagcagaagcttgatcggcagcgggccctgctggagcagaagcagaagaagaagcgccaggagcccctgatggtgcaggccaatgcagatgggcggccccggagccggcgggcccggcagtcagaggaacaagcccccctggtggagtcctacctcagcagcagtggcagcaccagctaccaagttcaagaggccgactcactcgccagtgtgcagctgggagccacgcgcccaacagcaccagcttcagccaagagaaccaaggcggcagctacagcagggggccagggtggcgccgctaggaaggagaagaagggaaagcacaaaggcaccagcgggccagcagcactggcagaagacaagtctgaggcccaaggcccagtgcagattctgactgtgggccagtcagaccacgcccaggacgcaggggagacggcagctggtgggggcgaacggcccagcgggcaggatctccgtgccacgatgcagaggaagggcatctccagcagcatgagctttgacgaggatgaggaggatgaggaggagaatagctccagctcctcccagctaaatagtaacacccgccccagctctgctactagcaggaagtccgtcagggaggcagcctcagcccctagcccaacagctccagagcaaccagtggacgttgaggtccaggatcttgaggagtttgcactgaggccggccccccagggtatcaccatcaaatgccgcatcactcgggacaagaaagggatggaccggggcatgtaccccacctactttctgcacctggaccgtgaggatgggaagaaggtgttcctcctggcgggaaggaagagaaagaagagtaaaacttccaattacctcatctctgtggacccaacagacttgtctcgaggaggggacagctatatcgggaaactgcggtccaacttgatgggcaccaagttcactgtttatgacaatggagtcaaccctcagaaggcctcatcctccactttggaaagtggaaccttacgtcaggagctggcagctgtgtgctacgagacaaacgtcttaggcttcaaggggcctcggaagatgagcgtgattgtcccaggcatgaacatggttcatgagagagtctctatccgcccccgcaacgagcatgagacactgctagcacgctggcagaataagaacacggagagtatcatcgagctgcaaaacaagacacctgtctggaatgatgacacacagtcctatgtactcaacttccatgggcgcgtcacacaggcctccgtgaagaacttccagatcatccatggcaatgacccggactacatcgtgatgcagtttggccgggtagcagaggatgtgttcaccatggattacaactacccgctgtgtgcactgcaggcctttgccattgccctgtccagcttcgacagcaagctggcgtgcgagtagtaatgaactagtccgtaacttgaaagtatttcgatttcttggctttatatatcttgtggaaaggacgatgatctctaccgccagacgggaat

SEQ ID NO: 451 - DNA, 2498 bp, Homo sapiens
  source 1..2498: mol_type = genomic DNA
accgccaccatgcacggagggcggagctgcggcccgaggacgcgacgcgagcccagttccggcgaggaggccgcgccagtgacagcgatggcggcggagtcggcgctccaagttgtggagaagctgcaggcgcgcctggccgcgaacccggaccctaagaagctattgaaatatttgaagaaactctccaccctgcctattacagtagacattcttgcggagactggggttgggaaaacagtaaatagcttgcgaaaacacgagcatgttggaagctttgccagggacctagtggcccagtggaagaagctggttcctgtggaacgaaatgctgagcctgatgaacaggactttgagaagagcaattcccgaaagcgccctcgggatgccctgcagaaggaggaggagatggagggggactaccaagaaacctggaaagccacggggagccgatcctatagccctgaccacaggcagaagaaacataggaaactctcggagctcgagagacctcacaaagtgtctcacggtcatgagaggagagatgagagaaagaggtgtcacagaatgtcaccaacttactcttcagaccctgagtcttctgattatggccatgttcaatcccctccatcttgtaccagtcctcatcagatgtacgtcgaccactacagatccctggaggaggaccaggagcccattgtttcacaccagaagcctgggaaaggccacagcaatgcctttcaggacagactcggggccagccaagaacgacacctgggtgaaccccatgggaaaggggttgtgagtcaaaacaaggagcacaaatcttcccacaaggacaaacgccccgtggatgccaagagtgatgagaaggcctctgtggtgagcagagagaaatcacacaaggccctctccaaagaggagaaccgaaggccaccctcaggggacaatgcaagggagaaaccgccctctagtggcgtaaagaaagagaaggacagagagggcagcagcctgaagaagaagtgtttgcctccctcagaggccgcttcagacaaccacctgaaaaagccaaagcacagagacccagagaaagccaaattggacaaaagcaagcaaggtctggacagctttgacacaggaaaaggagcaggagacctgttgcccaaggtaaaagagaagggttctaacaacctaaagactccagaagggaaagtcaaaactaatttggatagaaagtcactgggctccctccctaaagttgaggagacagatatggaggatgaattcgagcagccaaccatgtcttttgaatcctacctcagctatgaccagccccggaagaaaaagaaaaagattgtgaaaacttcagccacggcacttggagataaaggacttaaaaaaaatgactctaaaagcactggtaaaaacttggactcagttcagaaattacccaaggtgaacaaaaccaagtcagagaagccggctggagctgatttagccaagctgagaaaggtgcctgatgtgttgccagtgttgccagacctcccgttacccgcgatacaggccaattaccgtccactgccttccctcgagctgatatcctccttccagccaaagcgaaaagcgttctcttcaccccaggaagaagaagaagctggatttactgggcgcagaatgaattccaagatgcaggtgtattctggttccaagtgtgcctatctccctaaaatgatgaccttgcaccagcaatgcatccgagtacttaaaaacaacatcgattcaatctttgaagtgggaggagtcccatactctgttcttgaacccgttttggagaggtgtacacctgatcagctgtatcgcatagaggaatacaatcatgtattaattgaagaaacagatcaattatggaaagttcattgtcaccgagactttaaggaagaaagacccgaagagtatgagtcgtggcgagagatgtacctgcggcttcaggacgcccgagagcagcggctacgagtactaacaaagaatatccagttcgcacatgccaataagcccaaaggccgacaagcaaagatggcctttgtcaactctgtggccaagccacctcgtgacgtccggaggaggcaggaaaagtttggaacgggaggagcagctgtccctgagaaaatcaagatcaagccagccccgtaccccatgggaagcagccatgcttccgccagtagcatcagctttaaccccagccctgaggagccggcctatgatggcccaagcaccagcagtgcccacttggcaccagtggtcagcagcactgtttcctatgatcctaggaaacccactgtgaagaaaattgccccaatgatggccaagacaattaaagctttcaagaacagattctcccgacgatagtaatgaactagtccgtaacttgaaagtatttcgatttcttggctttatatatcttgtggaaaggacgaccgtcttcagtcatctggatccta

SEQ ID NO: 452 - DNA, 587 bp, Homo sapiens
  source 1..587: mol_type = genomic DNA
accgccaccatggacgtgttcctcatgatccggcgccacaagaccaccatcttcacggacgccaaggagtccagcacggtgttcgaactgaagcgcatcgtcgagggcatcctcaagcggcctcctgacgagcagcggctgtacaaggatgaccaactcttggatgatggcaagacactgggcgagtgtggcttcaccagtcaaacagcacggccacaggccccagccacagtggggctggccttccgggcagatgacacctttgaggccctgtgcatcgagccgttttccagcccgccagagctgcccgatgtgatgaagccccaggactcgggaagcagtgccaatgaacaagccgtgcacctgcatgtccactcccagacgatggccaagagcagaaacacaagctggagccagtgtcctggtttgacagcatgttcaacgagggaaccccaagacggacccacacaggtccacccacgctgggggctgtagtaatgaactagtccgtaacttgaaagtatttcgatttcttggctttatatatcttgtggaaaggacgagtgcacaatgtgacagcatcccta

SEQ ID NO: 453 - DNA, 458 bp, Homo sapiens
  source 1..458: mol_type = genomic DNA
accgccaccatggacgtgttcctcatgatccggcgccacaagaccaccatcttcacggacgccaaggagtccagcacggtgttcgaactgaagcgcatcgtcgagggcatcctcaagcggcctcctgacgagcagcggctgtacaaggatgaccaactcttggatgatggcaagacactgggcgagtgtggcttcaccagtcaaacagcacggccacaggccccagccacagtggggctggccttccgggcagatgacacctttgaggccctgtgcatcgagccgttttccagcccgccagagctgcccgatgtgatgaagccccaggactcgggaagcagtgccaatgaacaagccgtgcagtagtaatgaactagtccgtaacttgaaagtatttcgatttcttggctttatatatcttgtggaaaggacgagtccatggtccatacgtgacgcat

SEQ ID NO: 454 - DNA, 440 bp, Homo sapiens
  source 1..440: mol_type = genomic DNA
accgccaccatggatggagaggagaaaacctatggtggctgtgaaggacctgatgccatgtatgtcaaattgatatcatctgatggccatgaatttattgtaaaaagagaacatgcattaacatcaggcacgataaaagccatgttgagtggcccaggtcagtttgctgagaacgaaaccaatgaggtcaattttagagagataccttcacatgtgctatcgaaagtatgcatgtattttacgtacaaggttcgctacactaacagctccaccgagattcctgaattcccaattgcacctgaaattgcactggaactgctgatggctgcgaacttcttagattgttagtaatgaactagtccgtaacttgaaagtatttcgatttcttggctttatatatcttgtggaaaggacgagactaaccaatcaccattctccca

SEQ ID NO: 455 - DNA, 392 bp, Homo sapiens
  source 1..392: mol_type = genomic DNA
accgccaccatgtatgtcaaattgatatcatctgatggccatgaatttattgtaaaaagagaacatgcattaacatcaggcacgataaaagccatgttgagtggcccaggtcagtttgctgagaacgaaaccaatgaggtcaattttagagagataccttcacatgtgctatcgaaagtatgcatgtattttacgtacaaggttcgctacactaacagctccaccgagattcctgaattcccaattgcacctgaaattgcactggaactgctgatggctgcgaacttcttagattgttagtaatgaactagtccgtaacttgaaagtatttcgatttcttggctttatatatcttgtggaaaggacgaccgcagctgcattaactaacaata

SEQ ID NO: 456 - DNA, 1478 bp, Homo sapiens
  source 1..1478: mol_type = genomic DNA
accgccaccatgtccacagaaggaggatttggtggtactagcagcagtgatgcccagcaaagcctacagtcgttctggcctcgggtcatggaagaaatccggaatttaacagtgaaagacttccgagtgcaggaactcccactggctcgtattaagaagattatgaaactggatgaagatgtgaagatgatcagtgcagaagcgcctgtactctttgccaaggcagcccagatttttatcacagagttgactcttcgagcctggattcacacagaagataacaagcgccggactctacagagaaatgatatcgccatggcaattacaaaatttgatcagtttgattttctcatcgatattgttccaagagatgaactgaaacctccaaagcgtcaggaggaggtgcgccagtctgtaactcctgccgagccagtccagtactatttcacgctggctcagcaacccaccgctgtccaagtccagggccagcagcaaggccagcagaccaccagctccacgaccaccatccagcctgggcagatcatcatcgcacagcctcagcagggccagaccacacctgtgacaatgcaggttggagaaggtcagcaggtgcagattgtccaggctcagccacagggtcaagcccaacaggcccagagtggcactggacagaccatgcaggtgatgcagcagatcatcactaacacaggagagatccagcagatcccggtgcagctgaatgccggccagctgcagtatatccgcttagcccagcctgtatcaggcactcaagttgtgcagggacagatccagacacttgccaccaatgctcaacaggggcaaagaaatgcaagtcaggggaagcctcgaaggtgcctgaaagaaaccttacagattacacagacagaggtccagcaaggacagcagcagttcagccagttcacagatggacagaggaacagcgtgcagcaagctcgagtctctgagctaacgggagaggcagagcccagagaagtgaaagccacaggaaattcaactccctgcacctcttccctgcccaccacacaccccccctcacaccgggctggtgcctcctgtgtctgctgctcccaaccccagcagagctccacttcccctcctccttctgacgccttgcagtgggtggtggttgaggtatctgggacccccaaccagctcgagacccatagggagctgcatgcccctctcccagggatgacctcactctctcctctccacccctcgcagcagctctaccagatccagcaagtcaccatgcctgcgggccaggacctcgcccagcccatgttcatccagtcagccaaccagccctccgacgggcaggccccccaggtgaccggcgactagtaatgaactagtccgtaacttgaaagtatttcgatttcttggctttatatatcttgtggaaaggacgatcgcgtcatggtgggctagcatag

SEQ ID NO: 457 - DNA, 1421 bp, Homo sapiens
  source 1..1421: mol_type = genomic DNA
accgccaccatgtccacagaaggaggatttggtggtactagcagcagtgatgcccagcaaagcctacagtcgttctggcctcgggtcatggaagaaatccggaatttaacagtgaaagacttccgagtgcaggaactcccactggctcgtattaagaagattatgaaactggatgaagatgtgaagatgatcagtgcagaagcgcctgtactctttgccaaggcagcccagatttttatcacagagttgactcttcgagcctggattcacacagaagataacaagcgccggactctacagagaaatgatatcgccatggcaattacaaaatttgatcagtttgattttctcatcgatattgttccaagagatgaactgaaacctccaaagcgtcaggaggaggtgcgccagtctgtaactcctgccgagccagtccagtactatttcacgctggctcagcaacccaccgctgtccaagtccagggccagcagcaaggccagcagaccaccagctccacgaccaccatccagcctgggcagatcatcatcgcacagcctcagcagggccagaccacacctgtgacaatgcaggttggagaaggtcagcaggtgcagattgtccaggctcagccacagggtcaagcccaacaggcccagagtggcactggacagaccatgcaggtgatgcagcagatcatcactaacacaggagagatccagcagatcccggtgcagctgaatgccggccagctgcagtatatccgcttagcccagcctgtatcaggcactcaagttgtgcagggacagatccagacacttgccaccaatgctcaacagattacacagacagaggtccagcaaggacagcagcagttcagccagttcacagatggacagaggaacagcgtgcagcaagctcgagtctctgagctaacgggagaggcagagcccagagaagtgaaagccacaggaaattcaactccctgcacctcttccctgcccaccacacaccccccctcacaccgggctggtgcctcctgtgtctgctgctcccaaccccagcagagctccacttcccctcctccttctgacgccttgcagtgggtggtggttgaggtatctgggacccccaaccagctcgagacccatagggagctgcatgcccctctcccagggatgacctcactctctcctctccacccctcgcagcagctctaccagatccagcaagtcaccatgcctgcgggccaggacctcgcccagcccatgttcatccagtcagccaaccagccctccgacgggcaggccccccaggtgaccggcgactagtaatgaactagtccgtaacttgaaagtatttcgatttcttggctttatatatcttgtggaaaggacgatggcgattcatctcaatatcgttc

SEQ ID NO: 458 - DNA, 995 bp, Homo sapiens
  source 1..995: mol_type = genomic DNA
accgccaccatgtccacagaaggaggatttggtggtactagcagcagtgatgcccagcaaagcctacagtcgttctggcctcgggtcatggaagaaatccggaatttaacagtgaaagacttccgagtgcaggaactcccactggctcgtattaagaagattatgaaactggatgaagatgtgaagagaaatgatatcgccatggcaattacaaaatttgatcagtttgattttctcatcgatattgttccaagagatgaactgaaacctccaaagcgtcaggaggaggtgcgccagtctgtaactcctgccgagccagtccagtactatttcacgctggctcagcaacccaccgctgtccaagtccagggccagcagcaaggccagcagaccaccagctccacgaccaccatccagcctgggcagatcatcatcgcacagcctcagcagggccagaccacacctgtgacaatgcaggttggagaaggtcagcaggtgcagattgtccaggctcagccacagggtcaagcccaacaggcccagagtggcactggacagaccatgcaggtgatgcagcagatcatcactaacacaggagagatccagcagatcccggtgcagctgaatgccggccagctgcagtatatccgcttagcccagcctgtatcaggcactcaagttgtgcagggacagatccagacacttgccaccaatgctcaacagattacacagacagaggtccagcaaggacagcagcagttcagccagttcacagatggacagcagctctaccagatccagcaagtcaccatgcctgcgggccaggacctcgcccagcccatgttcatccagtcagccaaccagccctccgacgggcaggccccccaggtgaccggcgactagtaatgaactagtccgtaacttgaaagtatttcgatttcttggctttatatatcttgtggaaaggacgatggcgtacccaagtgctgatcgcg

SEQ ID NO: 459 - DNA, 1106 bp, Homo sapiens
  source 1..1106: mol_type = genomic DNA
accgccaccatgtccacagaaggaggatttggtggtactagcagcagtgatgcccagcaaagcctacagtcgttctggcctcgggtcatggaagaaatccggaatttaacagtgaaagacttccgagtgcaggaactcccactggctcgtattaagaagattatgaaactggatgaagatgtgaagatgatcagtgcagaagcgcctgtactctttgccaaggcagcccagatttttatcacagagttgactcttcgagcctggattcacacagaagataacaagcgccggactctacagagaaatgatatcgccatggcaattacaaaatttgatcagtttgattttctcatcgatattgttccaagagatgaactgaaacctccaaagcgtcaggaggaggtgcgccagtctgtaactcctgccgagccagtccagtactatttcacgctggctcagcaacccaccgctgtccaagtccagggccagcagcaaggccagcagaccaccagctccacgaccaccatccagcctgggcagatcatcatcgcacagcctcagcagggccagaccacacctgtgacaatgcaggttggagaaggtcagcaggtgcagattgtccaggctcagccacagggtcaagcccaacaggcccagagtggcactggacagaccatgcaggtgatgcagcagatcatcactaacacaggagagatccagcagatcccggtgcagctgaatgccggccagctgcagtatatccgcttagcccagcctgtatcaggcactcaagttgtgcagggacagatccagacacttgccaccaatgctcaacagattacacagacagaggtccagcaaggacagcagcagttcagccagttcacagatggacagctctaccagatccagcaagtcaccatgcctgcgggccaggacctcgcccagcccatgttcatccagtcagccaaccagccctccgacgggcaggccccccaggtgaccggcgactagtaatgaactagtccgtaacttgaaagtatttcgatttcttggctttatatatcttgtggaaaggacgattcactattgtaagtgattaacgg

SEQ ID NO: 460 - DNA, 1166 bp, Homo sapiens
  source 1..1166: mol_type = genomic DNA
accgccaccatgtccacagaaggaggatttggtggtactagcagcagtgatgcccagcaaagcctacagtcgttctggcctcgggtcatggaagaaatccggaatttaacagtgaaagacttccgagtgcaggaactcccactggctcgtattaagaagattatgaaactggatgaagatgtgaagatgatcagtgcagaagcgcctgtactctttgccaaggcagcccagatttttatcacagagttgactcttcgagcctggattcacacagaagataacaagcgccggactctacagagaaatgatatcgccatggcaattacaaaatttgatcagtttgattttctcatcgatattgttccaagagatgaactgaaacctccaaagcgtcaggaggaggtgcgccagtctgtaactcctgccgagccagtccagtactatttcacgctggctcagcaacccaccgctgtccaagtccagggccagcagcaaggccagcagaccaccagctccacgaccaccatccagcctgggcagatcatcatcgcacagcctcagcagggccagaccacacctgtgacaatgcaggttggagaaggtcagcaggtgcagattgtccaggctcagccacagggtcaagcccaacaggcccagagtggcactggacagaccatgcaggtgatgcagcagatcatcactaacacaggagagatccagcagatcccggtgcagctgaatgccggccagctgcagtatatccgcttagcccagcctgtatcaggcactcaagttgtgcagggacagatccagacacttgccaccaatgctcaacaggggcaaagaaatgcaagtcaggggaagcctcgaaggtgcctgaaagaaaccttacagattacacagacagaggtccagcaaggacagcagcagttcagccagttcacagatggacagcagctctaccagatccagcaagtcaccatgcctgcgggccaggacctcgcccagcccatgttcatccagtcagccaaccagccctccgacgggcaggccccccaggtgaccggcgactagtaatgaactagtccgtaacttgaaagtatttcgatttcttggctttatatatcttgtggaaaggacgagcccttggtcgaagacataaggtt

SEQ ID NO: 461 - DNA, 1007 bp, Homo sapiens
  source 1..1007: mol_type = genomic DNA
accgccaccatgtccacagaaggaggatttggtggtactagcagcagtgatgcccagcaaagcctacagtcgttctggcctcgggtcatggaagaaatccggaatttaacagtgaaagacttccgagtgcaggaactcccactggctcgtattaagaagattatgaaactggatgaagatgtgaagatgatcagtgcagaagcgcctgtactctttgccaaggcagcccagatttttatcacagagttgactcttcgagcctggattcacacagaagataacaagcgccggactctacagagaaatgatatcgccatggcaattacaaaatttgatcagtttgattttctcatcgatattgttccaagagatgaactgaaacctccaaagcgtcaggaggaggtgcgccagtctgtaactcctgccgagccagtccagtactatttcacgctggctcagcaacccaccgctgtccaagtccagggccagcagcaaggccagcagaccaccagctccacgaccaccatccagcctgggcagatcatcatcgcacagcctcagcagggccagaccatgcaggtgatgcagcagatcatcactaacacaggagagatccagcagatcccggtgcagctgaatgccggccagctgcagtatatccgcttagcccagcctgtatcaggcactcaagttgtgcagggacagatccagacacttgccaccaatgctcaacagattacacagacagaggtccagcaaggacagcagcagttcagccagttcacagatggacagcagctctaccagatccagcaagtcaccatgcctgcgggccaggacctcgcccagcccatgttcatccagtcagccaaccagccctccgacgggcaggccccccaggtgaccggcgactagtaatgaactagtccgtaacttgaaagtatttcgatttcttggctttatatatcttgtggaaaggacgaggtaatcacggctaaacttgccat

SEQ ID NO: 462 - DNA, 725 bp, Homo sapiens
  source 1..725: mol_type = genomic DNA
accgccaccatgacaatggatggtgacagttctacaacagatgcttctcaactaggaatctctgcagactatattggaggaagtcattatgttatacagcctcatgatgatactgaggacagcatgaatgatcatgaagacacaaatggttcaaaagaaagtttcagagaacaagatatatatcttccaatagcaaacgtggctaggataatgaaaaatgccatacctcaaacgggaaagattgcaaaagatgccaaagaatgtgttcaagaatgtgtaagtgagttcatcagttttataacatctgaagcaagtgaaaggtgccatcaagagaaacggaaaacaatcaatggagaagatattctctttgctatgtctactttaggctttgacagttatgtggaacctctgaaattataccttcagaaattcagagaggctatgaaaggagaaaagggaattggtggagcagtcacagctacagatggactaagtgaagagcttacagaggaggcatttactaaccagttaccagctggcttaataaccacagacggtcaacaacaaaatgttatggtttacacaacatcatatcaacagatttctggtgttcagcaaattcagttttcatagtaatgaactagtccgtaacttgaaagtatttcgatttcttggctttatatatcttgtggaaaggacgatggtatgatatggcattgtgttga

SEQ ID NO: 463 - DNA, 1145 bp, Homo sapiens
  source 1..1145: mol_type = genomic DNA
accgccaccatggagcagtatacagcaaacagcaatagttcgacagagcagattgttgtccaggcaggacagattcagcagcagcagcagggtggtgtcactgctgtgcagttgcagactgaggcccaggtggcatccgcctcaggccagcaagtccagaccctccaggtagtccaagggcagccattaatggtgcaggtcagtggaggccagctaatcacatcaactggccaacccatcatggtccaggctgtccctggtggacaaggtcaaaccatcatgcaagtacctgtttctggaacacagggtttgcagcaaatacagttggtcccacctggacagatccagatccagggtggacaggctgtgcaggtgcagggccagcagggccagacccagcagatcatcatccagcagccccagacggctgtcactgctggccagactcagacacagcagcagattgctgtccagggacagcaagtggcacagactgctgaagggcagaccatcgtctatcaaccagttaatgcagatggcaccattctccagcaagttacagtccctgtttcaggcatgatcactatcccagcagccagtttggcaggagcacagattgttcaaacaggagccaataccaacacaaccagcagtgggcaagggactgtcactgtgacactaccagtggcaggcaatgtggtcaattcaggagggatggtcatgatggttcctggggctggctctgtgcctgctatccaaagaatccctctacctggagcagagatgcttgaagaagagcctctctacgtgaatgccaaacaataccaccgtattcttaagaggaggcaagcccgagctaaactagaggcagaagggaaaattccaaaggagagaaggaaatacctgcatgagtctcggcaccgtcatgccatggcacggaagcgtggtgaaggtggacgatttttctctccaaaggaaaaggatagtccccatatgcaggatccaaaccaagccgatgaagaagcaatgacacagatcatccgagtgtcctagtaatgaactagtccgtaacttgaaagtatttcgatttcttggctttatatatcttgtggaaaggacgaagtactccatatctgtataatggg

SEQ ID NO: 464 - DNA, 1058 bp, Homo sapiens
  source 1..1058: mol_type = genomic DNA
accgccaccatggagcagtatacagcaaacagcaatagttcgacagagcagattgttgtccaggcaggacagattcagcagcaggtccaagggcagccattaatggtgcaggtcagtggaggccagctaatcacatcaactggccaacccatcatggtccaggctgtccctggtggacaaggtcaaaccatcatgcaagtacctgtttctggaacacagggtttgcagcaaatacagttggtcccacctggacagatccagatccagggtggacaggctgtgcaggtgcagggccagcagggccagacccagcagatcatcatccagcagccccagacggctgtcactgctggccagactcagacacagcagcagattgctgtccagggacagcaagtggcacagactgctgaagggcagaccatcgtctatcaaccagttaatgcagatggcaccattctccagcaagttacagtccctgtttcaggcatgatcactatcccagcagccagtttggcaggagcacagattgttcaaacaggagccaataccaacacaaccagcagtgggcaagggactgtcactgtgacactaccagtggcaggcaatgtggtcaattcaggagggatggtcatgatggttcctggggctggctctgtgcctgctatccaaagaatccctctacctggagcagagatgcttgaagaagagcctctctacgtgaatgccaaacaataccaccgtattcttaagaggaggcaagcccgagctaaactagaggcagaagggaaaattccaaaggagagaaggaaatacctgcatgagtctcggcaccgtcatgccatggcacggaagcgtggtgaaggtggacgatttttctctccaaaggaaaaggatagtccccatatgcaggatccaaaccaagccgatgaagaagcaatgacacagatcatccgagtgtcctagtaatgaactagtccgtaacttgaaagtatttcgatttcttggctttatatatcttgtggaaaggacgaactgctgatcaataactttgggtc

SEQ ID NO: 465 - DNA, 2360 bp, Homo sapiens
  source 1..2360: mol_type = genomic DNA
accgccaccatggcgaagaggtcgcgcagtgaggatgaggatgatgaccttcagtatgccgatcatgattatgaagtaccacaacaaaaaggactgaagaaactctggaacagagtaaaatggacaagggacgaggatgataaattaaagaagttggttgaacaacatggaactgatgattggactctaattgctagtcatcttcaaaatcgctctgattttcagtgccagcatcgatggcagaaagttttaaatcctgaattgataaagggtccttggactaaagaagaagatcagagggttattgaattagttcagaaatatgggccaaaaagatggtctttaattgcaaaacatttaaaaggaagaataggcaagcagtgtagagaaagatggcataatcatctgaatcctgaggtaaagaaatcttcctggacagaagaggaggacaggatcatctatgaagcacataagcggttgggaaatcgttgggcagaaattgccaaactacttccaggaaggactgataattctatcaaaaatcattggaattctactatgcgaagaaaagtggaacaggagggctatttacaagatggaataaaatcagaacgatcttcatctaaacttcaacacaaaccttgtgcagctatggatcatatgcaaacccagaatcagttttacatacctgttcagatccctgggtatcagtatgtgtcacctgaaggcaattgtatagaacatgttcagcctacttctgcctttattcagcaacccttcattgatgaagatcctgataaggaaaagaaaataaaggaacttgagatgcttcttatgtcagctgagaatgaagttagaagaaagcgaattccatcacagcctggaagtttttctagctggtctggtagtttcctcatggatgataacatgtctaatactctaaatagccttgacgagcacactagtgagttttacagtatggatgaaaatcagcctgtgtctgctcagcagaattcacccacaaagttcctggccgtggaggcaaacgctgtgttatcctctttgcagaccatcccagaatttgcagagactctagaacttattgaatctgatcctgtagcatggagtgacgttaccagttttgatatttctgatgctgctgcttctcctatcaaatccaccccagttaaattaatgagaattcagcacaatgaaggagccatggaatgccaatttaacgtcagtcttgtacttgaagggaaaaaaaacacttgtaatggtggcaacagtgaagctgttcctttaacatccccaaatatagccaagtttagcactccaccagccatcctcagaaagaagagaaaaatgcgagtgggtcattccccaggcagcgaacttagggatggctcattgaacgatggtggtaatatggcgctaaaacatacaccactgaaaacactaccattttctccttcacagtttttcaacacatgtcctggtaatgaacaacttaatatagaaaatccttcatttacatcaacccctatttgtgggcagaaagctctcattacaactcctcttcataaggaaacaactcccaaagatcaaaaggaaaatgtagggtttagaacacctactattagaagatctatactgggtaccacaccaagaactcctactccttttaagaatgcgcttgctgctcaggagaaaaaatatggacctcttaaaattgtgtcccagccacttgctttcttggaagaagatattcgggaagttttaaaagaagaaactggaacagacctattcctcaaagaggaagatgaacctgcttacaaaagctgcaaacaagagaataccgcttctgggaagaaagtcagaaaatcactagtcttagataattgggaaaaagaagaatcaggcactcaactgttgactgaagacatttcagacatgcagtcagaaaatagatttactacatccttattaatgataccattattggaaatacatgacaataggtgcaacttgattcctgaaaaacaagatataaattcaaccaacaaaacatatacacttactaaaaagaaaccaaaccctaacacttccaaagttgtcaaattggaaaagaatcttcagtcaaattgtgaatgggaaacagtggtttatgggaagacagaagaccaacttattatgactgaacaagcaagaagatatctgagtacttacacagctaccagtagtacttcaagagctctcatactgtagtaatgaactagtccgtaacttgaaagtatttcgatttcttggctttatatatcttgtggaaaggacgagcacagcgcctgggtacagaaagc

SEQ ID NO: 466 - DNA, 3278 bp, Homo sapiens
  source 1..3278: mol_type = genomic DNA
accgccaccatggagcaggacactgccgcagtggcagccaccgtggcagccgcggatgcgaccgccactatcgtggtcatagaggacgagcagcccgggccgtccacctctcaggaggagggagcggccgccgcggccaccgaagccaccgcggccacggagaagggcgagaagaagaaggagaaaaacgtttcttcatttcaactcaaacttgctgctaaagcgcctaaatctgaaaaggaaatggacccagaatatgaagagaaaatgaaagccgaccgagcaaagagatttgaatttttactgaagcagacagaactttttgcacatttcattcagccttcagcacagaaatctccaacatctccactgaacatgaaattgggacgtccccgaataaagaaagatgaaaagcagagcttaatttctgctggagactaccgccataggcgcacagagcaagaagaagatgaagagctactgtctgagagtcggaaaacatctaatgtgtgtattagatttgaggtgtcaccttcatatgtgaaaggggggccactgagagattatcagattcgaggactgaattggttgatctctttatatgaaaatggagtcaatggcattttggctgatgaaatgggccttgggaaaactttacaaacaattgctttgcttggttacctgaaacactaccgaaatattcctggacctcacatggttttagttccaaagtctactttacacaactggatgaatgaatttaaacgatgggtcccatctctccgtgtcatttgttttgtcggagacaaggatgccagagctgcttttattcgtgatgaaatgatgccaggagagtgggatgtttgcgttacttcttatgagatggtaattaaagaaaaatctgtattcaaaaagtttcactggcgatacctggtcattgatgaagctcacagaataaagaatgaaaaatctaagctttcagagattgttcgtgagttcaagtcgactaaccgcttgctcctaactggaacacctttgcagaataacctgcatgaactgtgggccttactcaactttttattgcctgatgtctttaattctgcagatgactttgattcttggtttgacactaaaaattgtcttggtgatcaaaaactcgtggaaagacttcatgcagttttaaaaccatttttgttacgccgtataaaaactgatgtagagaagagtctgccacctaaaaaggaaataaagatttacttggggctgagtaagatgcaacgagaatggtatacaaaaatcctgatgaaagatattgatgttttaaactcttctggcaagatggacaagatgcgactcttaaacattctgatgcagcttcgaaagtgttgtaatcatccatatctgtttgatggtgctgaacctggtccaccttataccactgatgagcatattgtcagcaacagtggtaaaatggtagttctggataaactattggccaaactcaaagaacagggttcaagggttctcattttcagccagatgactcgcttgctggatattttggaagattattgcatgtggcgtggttatgagtattgtcgactggatggacaaaccccgcatgaagaaagagaggaagcaatagaggcttttaatgctcctaatagtagcaaattcatctttatgctaagtaccagggctggaggtctcggaattaacctggcaagtgctgatgtggttatactatatgattcagactggaacccacaggttgatctacaagctatggatcgagcacatcgtattggtcagaagaaaccagtacgtgtattccgtctcatcactgacaacactgttgaagagaggattgtagaaagagctgagataaaactgagactcgattcaattgttatacaacaaggaagactcattgaccaacagtctaacaagctggcaaaagaggaaatgttacaaatgatacggcatggagccacccatgtttttgcttctaaagagagtgagttgacagatgaagacattacaactattctggaaagaggggaaaagaagactgcagagatgaatgaacgcctgcaaaaaatgggagagtcttctctaagaaattttagaatggacattgaacaaagtttatacaaatttgagggagaagattatagagaaaaacagaagcttggcatggtggaatggattgaacctcctaaacgagaacgcaaagcaaactacgcagtggatgcctactttagagaggctttgcgtgtcagcgagccaaagattccaaaggctccacggcctccaaaacagccaaatgttcaggattttcaatttttcccaccacgcttatttgagctcctggaaaaggaaattctttattatcggaagacaataggctataaggttccaaggaatcctgatatcccaaatccagctctggctcaaagagaagagcaaaaaaagattgatggagctgaacctcttacaccagaagagactgaagaaaaggaaaaacttctcacacaaggtttcacaaactggactaaacgagattttaaccagtttattaaagctaatgagaaatatggaagagatgacattgataacatagctcgagaggtagagggcaaatcccctgaggaggtcatggagtattcagctgtattttgggaacgttgcaatgaattacaggacattgagaaaattatggctcaaattgaacgtggagaagcaagaattcaacgaaggatcagtatcaagaaagccctggatgccaaaattgcaagatacaaggctccatttcatcagttgcgcattcagtatggaaccagcaaaggaaagaactatactgaggaagaagatagattcttgatttgtatgttacacaaaatgggctttgatagagaaaatgtatatgaagaattaagacagtgtgtacgaaatgctccccagtttagatttgactggtttatcaagtctaggactgccatggaattccagagacgctgtaacactctgatttcattgattgagaaagaaaatatggaaattgaggaaagagagagagcagaaaagaagaaacgggcaactaaaactccaatgtcacagaaaagaaaagcagagtcagctactgagagctctggaaagaaggatgtcaagaaggtgaaatcctagtaatgaactagtccgtaacttgaaagtatttcgatttcttggctttatatatcttgtggaaaggacgagcgatcaacgcgtcttgtaggcca

SEQ ID NO: 467 - DNA, 3314 bp, Homo sapiens
  source 1..3314: mol_type = genomic DNA
accgccaccatggagcaggacactgccgcagtggcagccaccgtggcagccgcggatgcgaccgccactatcgtggtcatagaggacgagcagcccgggccgtccacctctcaggaggagggagcggccgccgcggccaccgaagccaccgcggccacggagaagggcgagaagaagaaggagaaaaacgtttcttcatttcaactcaaacttgctgctaaagcgcctaaatctgaaaaggaaatggacccagaatatgaagagaaaatgaaagccgaccgagcaaagagatttgaatttttactgaagcagacagaactttttgcacatttcattcagccttcagcacagaaatctccaacatctccactgaacatgaaattgggacgtccccgaataaagaaagatgaaaagcagagcttaatttctgctggagactaccgccataggcgcacagagcaagaagaagatgaagagctactgtctgagagtcggaaaacatctaatgtgtgtattagatttgaggtgtcaccttcatatgtgaaaggggggccactgagagattatcagattcgaggactgaattggttgatctctttatatgaaaatggagtcaatggcattttggctgatgaaatgggccttgggaaaactttacaaacaattgctttgcttggttacctgaaacactaccgaaatattcctggacctcacatggttttagttccaaagtctactttacacaactggatgaatgaatttaaacgatgggtcccatctctccgtgtcatttgttttgtcggagacaaggatgccagagctgcttttattcgtgatgaaatgatgccaggagagtgggatgtttgcgttacttcttatgagatggtaattaaagaaaaatctgtattcaaaaagtttcactggcgatacctggtcattgatgaagctcacagaataaagaatgaaaaatctaagctttcagagattgttcgtgagttcaagtcgactaaccgcttgctcctaactggaacacctttgcagaataacctgcatgaactgtgggccttactcaactttttattgcctgatgtctttaattctgcagatgactttgattcttggtttgacactaaaaattgtcttggtgatcaaaaactcgtggaaagacttcatgcagttttaaaaccatttttgttacgccgtataaaaactgatgtagagaagagtctgccacctaaaaaggaaataaagatttacttggggctgagtaagatgcaacgagaatggtatacaaaaatcctgatgaaagatattgatgttttaaactcttctggcaagatggacaagatgcgactcttaaacattctgatgcagcttcgaaagtgttgtaatcatccatatctgtttgatggtgctgaacctggtccaccttataccactgatgagcatattgtcagcaacagtggtaaaatggtagttctggataaactattggccaaactcaaagaacagggttcaagggttctcattttcagccagatgactcgcttgctggatattttggaagattattgcatgtggcgtggttatgagtattgtcgactggatggacaaaccccgcatgaagaaagagaggataaattcctagaagtggaatttctgggtcaaagggaagcaatagaggcttttaatgctcctaatagtagcaaattcatctttatgctaagtaccagggctggaggtctcggaattaacctggcaagtgctgatgtggttatactatatgattcagactggaacccacaggttgatctacaagctatggatcgagcacatcgtattggtcagaagaaaccagtacgtgtattccgtctcatcactgacaacactgttgaagagaggattgtagaaagagctgagataaaactgagactcgattcaattgttatacaacaaggaagactcattgaccaacagtctaacaagctggcaaaagaggaaatgttacaaatgatacggcatggagccacccatgtttttgcttctaaagagagtgagttgacagatgaagacattacaactattctggaaagaggggaaaagaagactgcagagatgaatgaacgcctgcaaaaaatgggagagtcttctctaagaaattttagaatggacattgaacaaagtttatacaaatttgagggagaagattatagagaaaaacagaagcttggcatggtggaatggattgaacctcctaaacgagaacgcaaagcaaactacgcagtggatgcctactttagagaggctttgcgtgtcagcgagccaaagattccaaaggctccacggcctccaaaacagccaaatgttcaggattttcaatttttcccaccacgcttatttgagctcctggaaaaggaaattctttattatcggaagacaataggctataaggttccaaggaatcctgatatcccaaatccagctctggctcaaagagaagagcaaaaaaagattgatggagctgaacctcttacaccagaagagactgaagaaaaggaaaaacttctcacacaaggtttcacaaactggactaaacgagattttaaccagtttattaaagctaatgagaaatatggaagagatgacattgataacatagctcgagaggtagagggcaaatcccctgaggaggtcatggagtattcagctgtattttgggaacgttgcaatgaattacaggacattgagaaaattatggctcaaattgaacgtggagaagcaagaattcaacgaaggatcagtatcaagaaagccctggatgccaaaattgcaagatacaaggctccatttcatcagttgcgcattcagtatggaaccagcaaaggaaagaactatactgaggaagaagatagattcttgatttgtatgttacacaaaatgggctttgatagagaaaatgtatatgaagaattaagacagtgtgtacgaaatgctccccagtttagatttgactggtttatcaagtctaggactgccatggaattccagagacgctgtaacactctgatttcattgattgagaaagaaaatatggaaattgaggaaagagagagagcagaaaagaagaaacgggcaactaaaactccaatgtcacagaaaagaaaagcagagtcagctactgagagctctggaaagaaggatgtcaagaaggtgaaatcctagtaatgaactagtccgtaacttgaaagtatttcgatttcttggctttatatatcttgtggaaaggacgagtcgttgcgtttcccgaccctcta

SEQ ID NO: 468 - DNA, 3266 bp, Homo sapiens
  source 1..3266: mol_type = genomic DNA
accgccaccatggagcaggacactgccgcagtggcagccaccgtggcagccgcggatgcgaccgccactatcgtggtcatagaggacgagcagcccgggccgtccacctctcaggaggagggagcggccgccgcggccaccgaagccaccgcggccacggagaagggcgagaagaagaaggagaaaaacgtttcttcatttcaactcaaacttgctgctaaagcgcctaaatctgaaaaggaaatggacccagaatatgaagagaaaatgaaagccgaccgagcaaagagatttgaatttttactgaagcagacagaactttttgcacatttcattcagccttcagcacagaaatctccaacatctccactgaacatgaaattgggacgtccccgaataaagaaagatgaaaagcagagcttaatttctgctggagactaccgccataggcgcacagagcaagaagaagatgaagagctactgtctgagagtcggaaaacatctaatgtgtgtattagatttgaggtgtcaccttcatatgtgaaaggggggccactgagagattatcagattcgaggactgaattggttgatctctttatatgaaaatggagtcaatggcattttggctgatgaaatgggccttgggaaaactttacaaacaattgctttgcttggttacctgaaacactaccgaaatattcctggacctcacatggttttagttccaaagtctactttacacaactggatgaatgaatttaaacgatgggtcccatctctccgtgtcatttgttttgtcggagacaaggatgccagagctgcttttattcgtgatgaaatgatgccaggagagtgggatgtttgcgttacttcttatgagatggtaattaaagaaaaatctgtattcaaaaagtttcactggcgatacctggtcattgatgaagctcacagaataaagaatgaaaaatctaagctttcagagattgttcgtgagttcaagtcgactaaccgcttgctcctaactggaacacctttgcagaataacctgcatgaactgtgggccttactcaactttttattgcctgatgtctttaattctgcagatgactttgattcttggtttgacactaaaaattgtcttggtgatcaaaaactcgtggaaagacttcatgcagttttaaaaccatttttgttacgccgtataaaaactgatgtagagaagagtctgccacctaaaaaggaaataaagatttacttggggctgagtaagatgcaacgagaatggtatacaaaaatcctgatgaaagatattgatgttttaaactcttctggcaagatggacaagatgcgactcttaaacattctgatgcagcttcgaaagtgttgtaatcatccatatctgtttgatggtgctgaacctggtccaccttataccactgatgagcatattgtcagcaacagtggtaaaatggtagttctggataaactattggccaaactcaaagaacagggttcaagggttctcattttcagccagatgactcgcttgctggatattttggaagattattgcatgtggcgtggttatgagtattgtcgactggatggacaaaccccgcatgaagaaagagaggataaattcctagaagtggaatttctgggtcaaagggaagcaatagaggcttttaatgctcctaatagtagcaaattcatctttatgctaagtaccagggctggaggtctcggaattaacctggcaagtgctgatgtggttatactatatgattcagactggaacccacaggttgatctacaagctatggatcgagcacatcgtattggtcagaagaaaccagtacgtgtattccgtctcatcactgacaacactgttgaagagaggattgtagaaagagctgagataaaactgagactcgattcaattgttatacaacaaggaagactcattgaccaacagtctaacaagctggcaaaagaggaaatgttacaaatgatacggcatggagccacccatgtttttgcttctaaagagagtgagttgacagatgaagacattacaactattctggaaagaggggaaaagaagactgcagagatgaatgaacgcctgcaaaaaatgggagagtcttctctaagaaattttagaatggacattgaacaaagtttatacaaatttgagggagaagattatagagaaaaacagaagcttggcatggtggaatggattgaacctcctaaacgagaacgcaaagcaaactacgcagtggatgcctactttagagaggctttgcgtgtcagcgagccaaagattccaaaggctccacggcctccaaaacagccaaatgttcaggattttcaatttttcccaccacgcttatttgagctcctggaaaaggaaattctttattatcggaagacaataggctataaggttccaaggaatcctgatatcccaaatccagctctggctcaaagagaagagcaaaaaaagattgatggagctgaacctcttacaccagaagagactgaagaaaaggaaaaacttctcacacaaggtttcacaaactggactaaacgagattttaaccagtttattaaagctaatgagaaatatggaagagatgacattgataacatagctcgagaggtagagggcaaatcccctgaggaggtcatggagtattcagctgtattttgggaacgttgcaatgaattacaggacattgagaaaattatggctcaaattgaacgtggagaagcaagaattcaacgaaggatcagtatcaagaaagccctggatgccaaaattgcaagatacaaggctccatttcatcagttgcgcattcagtatggaaccagcaaaggaaagaactatactgaggaagaagatagattcttgatttgtatgttacacaaaatgggctttgatagagaaaatgtatatgaagaattaagacagtgtgtacgaaatgctccccagtttagatttgactggtttatcaagtctaggactgccatggaattccagagacgctgtaacactctgatttcattgattgagaaagaaaatatggaaattgaggaaagagagagagcagaaaagaagaaacgggcaactaaaactccaatggtaaaattttcagcattttcctagtaatgaactagtccgtaacttgaaagtatttcgatttcttggctttatatatcttgtggaaaggacgacggacttctccaataagatgacca

SEQ ID NO: 469 - DNA, 938 bp, Homo sapiens
  source 1..938: mol_type = genomic DNA
accgccaccatgctgatgaagagactagcagctcgctgctttgctggcttgttaattttatccccactaactgtgatttctgatagccggcctgctgatagtggtaaggccatcgaagacggcaatttggaggaaatggaagaggaagtacggcttaagaagcgaaaaagacgaagaaatgtggataaagatcctgcaaaagaagatgtggaaaaagctaagaagagaagaggccgccctcccgctgagaaactgtcaccaaatccccccaaactgacaaagcagatgaacgctatcatcgatactgtgataaactacaaagatagttcagggcgacagctcagtgaagtcttcattcagttaccttcaaggaaagaattaccagaatactatgaattaattaggaagccagtggatttcaaaaaaataaaggaaaggattcgtaatcataagtaccggagcctaggcgacctggagaaggatgtcatgcttctctgtcacaacgctcagacgttcaacctggagggatcccagatctatgaagactccatcgtcttacagtcagtgtttaagagtgcccggcagaaaattgccaaagaggaagagagtgaggatgaaagcaatgaagaggaggaagaggaagatgaagaagagtcagagtccgaggcaaaatcagtcaaggtgaaaattaagctcaataaaaaagatgacaaaggccgggacaaagggaaaggcaagaaaaggccaaatcgaggaaaagccaaacctgtagtgagcgattttgacagcgatgaggagcaggatgaacgtgaacagtcagaaggaagtgggacggatgatgagtagtaatgaactagtccgtaacttgaaagtatttcgatttcttggctttatatatcttgtggaaaggacgattgtttccattagtgtgcgcaata

SEQ ID NO: 470 - DNA, 932 bp, Homo sapiens
  source 1..932: mol_type = genomic DNA
accgccaccatgaagagactagcagctcgctgctttgctggcttgttaattttatccccactaactgtgatttctgatagccggcctgctgatagtggtaaggccatcgaagacggcaatttggaggaaatggaagaggaagtacggcttaagaagcgaaaaagacgaagaaatgtggataaagatcctgcaaaagaagatgtggaaaaagctaagaagagaagaggccgccctcccgctgagaaactgtcaccaaatccccccaaactgacaaagcagatgaacgctatcatcgatactgtgataaactacaaagatagttcagggcgacagctcagtgaagtcttcattcagttaccttcaaggaaagaattaccagaatactatgaattaattaggaagccagtggatttcaaaaaaataaaggaaaggattcgtaatcataagtaccggagcctaggcgacctggagaaggatgtcatgcttctctgtcacaacgctcagacgttcaacctggagggatcccagatctatgaagactccatcgtcttacagtcagtgtttaagagtgcccggcagaaaattgccaaagaggaagagagtgaggatgaaagcaatgaagaggaggaagaggaagatgaagaagagtcagagtccgaggcaaaatcagtcaaggtgaaaattaagctcaataaaaaagatgacaaaggccgggacaaagggaaaggcaagaaaaggccaaatcgaggaaaagccaaacctgtagtgagcgattttgacagcgatgaggagcaggatgaacgtgaacagtcagaaggaagtgggacggatgatgagtagtaatgaactagtccgtaacttgaaagtatttcgatttcttggctttatatatcttgtggaaaggacgaaatccacgagacgccctgccatcc

SEQ ID NO: 471 - DNA, 4820 bp, Homo sapiens
  source 1..4820: mol_type = genomic DNA
accgccaccatgtccacgcccacagaccctggtgcgatgccccacccagggccttcgccggggcctgggccttcccctgggccaattcttgggcctagtccaggaccaggaccatccccaggttccgtccacagcatgatggggccaagtcctggacctccaagtgtctcccatcctatgccgacgatggggtccacagacttcccacaggaaggcatgcatcaaatgcataagcccatcgatggtatacatgacaaggggattgtagaagacatccattgtggatccatgaagggcactggtatgcgaccacctcacccaggcatgggccctccccagagtccaatggatcaacacagccaaggttatatgtcaccacacccatctccattaggagccccagagcacgtctccagccctatgtctggaggaggcccaactccacctcagatgccaccaagccagccgggggccctcatcccaggtgatccgcaggccatgagccagcccaacagaggtccctcacctttcagtcctgtccagctgcatcagcttcgagctcagattttagcttataaaatgctggcccgaggccagcccctccccgaaacgctgcagcttgcagtccaggggaaaaggacgttgcctggcttgcagcaacaacagcagcagcaacagcagcagcagcagcagcagcagcagcagcagcagcagcaacagcagccgcagcagcagccgccgcaaccacagacgcagcaacaacagcagccggcccttgttaactacaacagaccatctggcccggggccggagctgagcggcccgagcaccccgcagaagctgccggtgcccgcgcccggcggccggccctcgcccgcgccccccgcagccgcgcagccgcccgcggccgcagtgcccgggccctcagtgccgcagccggccccggggcagccctcgcccgtcctccagctgcagcagaagcagagccgcatcagccccatccagaaaccgcaaggcctggaccccgtggaaattctgcaagagcgggaatacagacttcaggcccgcatagctcataggatacaagaactggaaaatctgcctggctctttgccaccagatttaagaaccaaagcaaccgtggaactaaaagcacttcggttactcaatttccagcgtcagctgagacaggaggtggtggcctgcatgcgcagggacacgaccctggagacggctctcaactccaaagcatacaaacggagcaagcgccagactctgagagaagctcgcatgaccgagaagctggagaagcagcagaagattgagcaggagaggaaacgccgtcagaaacaccaggaatacctgaacagtattttgcaacatgcaaaagattttaaggaatatcatcggtctgtggccggaaagatccagaagctctccaaagcagtggcaacttggcatgccaacactgaaagagagcagaagaaggagacagagcggattgaaaaggagagaatgcggcgactgatggctgaagatgaggagggttatagaaaactgattgatcaaaagaaagacaggcgtttagcttaccttttgcagcagaccgatgagtatgtagccaatctgaccaatctggtttgggagcacaagcaagcccaggcagccaaagagaagaagaagaggaggaggaggaagaagaaggctgaggagaatgcagagggtggggagtctgccctgggaccggatggagagcccatagatgagagcagccagatgagtgacctccctgtcaaagtgactcacacagaaaccggcaaggttctgttcggaccagaagcacccaaagcaagtcagctggacgcctggctggaaatgaatcctggttatgaagttgcccctagatctgacagtgaagagagtgattctgattatgaggaagaggatgaggaagaagagtccagtaggcaggaaaccgaagagaaaatactcctggatccaaatagcgaagaagtttctgagaaggatgctaagcagatcattgagacagctaagcaagacgtggatgatgaatacagcatgcagtacagtgccaggggctcccagtcctactacaccgtggctcatgccatctcggagagggtggagaaacagtctgccctcctaattaatgggaccctaaagcattaccagctccagggcctggaatggatggtttccctgtataataacaacttgaacggaatcttagccgatgaaatggggcttggaaagaccatacagaccattgcactcatcacttatctgatggagcacaaaagactcaatggcccctatctcatcattgttcccctttcgactctatctaactggacatatgaatttgacaaatgggctccttctgtggtgaagatttcttacaagggtactcctgccatgcgtcgctcccttgtcccccagctacggagtggcaaattcaatgtcctcttgactacttatgagtatattataaaagacaagcacattcttgcaaagattcggtggaaatacatgatagtggacgaaggccaccgaatgaagaatcaccactgcaagctgactcaggtcttgaacactcactatgtggcccccagaaggatcctcttgactgggaccccgctgcagaataagctccctgaactctgggccctcctcaacttcctcctcccaacaatttttaagagctgcagcacatttgaacaatggttcaatgctccatttgccatgactggtgaaagggtggacttaaatgaagaagaaactatattgatcatcaggcgtctacataaggtgttaagaccatttttactaaggagactgaagaaagaagttgaatcccagcttcccgaaaaagtggaatatgtgatcaagtgtgacatgtcagctctgcagaagattctgtatcgccatatgcaagccaaggggatccttctcacagatggttctgagaaagataagaaggggaaaggaggtgctaagacacttatgaacactattatgcagttgagaaaaatctgcaaccacccatatatgtttcagcacattgaggaatcctttgctgaacacctaggctattcaaatggggtcatcaatggggctgaactgtatcgggcctcagggaagtttgagctgcttgatcgtattctgccaaaattgagagcgactaatcaccgagtgctgcttttctgccagatgacatctctcatgaccatcatggaggattattttgcttttcggaacttcctttacctacgccttgatggcaccaccaagtctgaagatcgtgctgctttgctgaagaaattcaatgaacctggatcccagtatttcattttcttgctgagcacaagagctggtggcctgggcttaaatcttcaggcagctgatacagtggtcatctttgacagcgactggaatcctcatcaggatctgcaggcccaagaccgagctcaccgcatcgggcagcagaacgaggtccgggtactgaggctctgtaccgtgaacagcgtggaggaaaagatcctcgcggccgcaaaatacaagctgaacgtggatcagaaagtgatccaggcgggcatgtttgaccaaaagtcttcaagccacgagcggagggcattcctgcaggccatcttggagcatgaggaggaaaatgaggaagaagatgaagtaccggacgatgagactctgaaccaaatgattgctcgacgagaagaagaatttgacctttttatgcggatggacatggaccggcggagggaagatgcccggaacccgaaacggaagccccgtttaatggaggaggatgagctgccctcctggatcattaaggatgacgctgaagtagaaaggctcacctgtgaagaagaggaggagaaaatatttgggagggggtcccgccagcgccgtgacgtggactacagtgacgccctcacggagaagcagtggctaagggccatcgaagacggcaatttggaggaaatggaagaggaagtacggcttaagaagcgaaaaagacgaagaaatgtggataaagatcctgcaaaagaagatgtggaaaaagctaagaagagaagaggccgccctcccgctgagaaactgtcaccaaatccccccaaactgacaaagcagatgaacgctatcatcgatactgtgataaactacaaagatagttcagggcgacagctcagtgaagtcttcattcagttaccttcaaggaaagaattaccagaatactatgaattaattaggaagccagtggatttcaaaaaaataaaggaaaggattcgtaatcataagtaccggagcctaggcgacctggagaaggatgtcatgcttctctgtcacaacgctcagacgttcaacctggagggatcccagatctatgaagactccatcgtcttacagtcagtgtttaagagtgcccggcagaaaattgccaaagaggaagagagtgaggatgaaagcaatgaagaggaggaagaggaagatgaagaagagtcagagtccgaggcaaaatcagtcaaggtgaaaattaagctcaataaaaaagatgacaaaggccgggacaaagggaaaggcaagaaaaggccaaatcgaggaaaagccaaacctgtagtgagcgattttgacagcgatgaggagcaggatgaacgtgaacagtcagaaggaagtgggacggatgatgagtagtaatgaactagtccgtaacttgaaagtatttcgatttcttggctttatatatcttgtggaaaggacgacaacggcaaattacacgaaccctg

SEQ ID NO: 472 - DNA, 4646 bp, Homo sapiens
  source 1..4646: mol_type = genomic DNA
accgccaccatgtccacgcccacagaccctggtgcgatgccccacccagggccttcgccggggcctgggccttcccctgggccaattcttgggcctagtccaggaccaggaccatccccaggttccgtccacagcatgatggggccaagtcctggacctccaagtgtctcccatcctatgccgacgatggggtccacagacttcccacaggaaggcatgcatcaaatgcataagcccatcgatggtatacatgacaaggggattgtagaagacatccattgtggatccatgaagggcactggtatgcgaccacctcacccaggcatgggccctccccagagtccaatggatcaacacagccaaggttatatgtcaccacacccatctccattaggagccccagagcacgtctccagccctatgtctggaggaggcccaactccacctcagatgccaccaagccagccgggggccctcatcccaggtgatccgcaggccatgagccagcccaacagaggtccctcacctttcagtcctgtccagctgcatcagcttcgagctcagattttagcttataaaatgctggcccgaggccagcccctccccgaaacgctgcagcttgcagtccaggggaaaaggacgttgcctggcttgcagcaacaacagcagcagcaacagcagcagcagcagcagcagcagcagcagcagcagcagcaacagcagccgcagcagcagccgccgcaaccacagacgcagcaacaacagcagccggcccttgttaactacaacagaccatctggcccggggccggagctgagcggcccgagcaccccgcagaagctgccggtgcccgcgcccggcggccggccctcgcccgcgccccccgcagccgcgcagccgcccgcggccgcagtgcccgggccctcagtgccgcagccggccccggggcagccctcgcccgtcctccagctgcagcagaagcagagccgcatcagccccatccagaaaccgcaaggcctggaccccgtggaaattctgcaagagcgggaatacagacttcaggcccgcatagctcataggatacaagaactggaaaatctgcctggctctttgccaccagatttaagaaccaaagcaaccgtggaactaaaagcacttcggttactcaatttccagcgtcagctgagacaggaggtggtggcctgcatgcgcagggacacgaccctggagacggctctcaactccaaagcatacaaacggagcaagcgccagactctgagagaagctcgcatgaccgagaagctggagaagcagcagaagattgagcaggagaggaaacgccgtcagaaacaccaggaatacctgaacagtattttgcaacatgcaaaagattttaaggaatatcatcggtctgtggccggaaagatccagaagctctccaaagcagtggcaacttggcatgccaacactgaaagagagcagaagaaggagacagagcggattgaaaaggagagaatgcggcgactgatggctgaagatgaggagggttatagaaaactgattgatcaaaagaaagacaggcgtttagcttaccttttgcagcagaccgatgagtatgtagccaatctgaccaatctggtttgggagcacaagcaagcccaggcagccaaagagaagaagaagaggaggaggaggaagaagaaggctgaggagaatgcagagggtggggagtctgccctgggaccggatggagagcccatagatgagagcagccagatgagtgacctccctgtcaaagtgactcacacagaaaccggcaaggttctgttcggaccagaagcacccaaagcaagtcagctggacgcctggctggaaatgaatcctggttatgaagttgcccctagatctgacagtgaagagagtgattctgattatgaggaagaggatgaggaagaagagtccagtaggcaggaaaccgaagagaaaatactcctggatccaaatagcgaagaagtttctgagaaggatgctaagcagatcattgagacagctaagcaagacgtggatgatgaatacagcatgcagtacagtgccaggggctcccagtcctactacaccgtggctcatgccatctcggagagggtggagaaacagtctgccctcctaattaatgggaccctaaagcattaccagctccagggcctggaatggatggtttccctgtataataacaacttgaacggaatcttagccgatgaaatggggcttggaaagaccatacagaccattgcactcatcacttatctgatggagcacaaaagactcaatggcccctatctcatcattgttcccctttcgactctatctaactggacatatgaatttgacaaatgggctccttctgtggtgaagatttcttacaagggtactcctgccatgcgtcgctcccttgtcccccagctacggagtggcaaattcaatgtcctcttgactacttatgagtatattataaaagacaagcacattcttgcaaagattcggtggaaatacatgatagtggacgaaggccaccgaatgaagaatcaccactgcaagctgactcaggtggacttaaatgaagaagaaactatattgatcatcaggcgtctacataaggtgttaagaccatttttactaaggagactgaagaaagaagttgaatcccagcttcccgaaaaagtggaatatgtgatcaagtgtgacatgtcagctctgcagaagattctgtatcgccatatgcaagccaaggggatccttctcacagatggttctgagaaagataagaaggggaaaggaggtgctaagacacttatgaacactattatgcagttgagaaaaatctgcaaccacccatatatgtttcagcacattgaggaatcctttgctgaacacctaggctattcaaatggggtcatcaatggggctgaactgtatcgggcctcagggaagtttgagctgcttgatcgtattctgccaaaattgagagcgactaatcaccgagtgctgcttttctgccagatgacatctctcatgaccatcatggaggattattttgcttttcggaacttcctttacctacgccttgatggcaccaccaagtctgaagatcgtgctgctttgctgaagaaattcaatgaacctggatcccagtatttcattttcttgctgagcacaagagctggtggcctgggcttaaatcttcaggcagctgatacagtggtcatctttgacagcgactggaatcctcatcaggatctgcaggcccaagaccgagctcaccgcatcgggcagcagaacgaggtccgggtactgaggctctgtaccgtgaacagcgtggaggaaaagatcctcgcggccgcaaaatacaagctgaacgtggatcagaaagtgatccaggcgggcatgtttgaccaaaagtcttcaagccacgagcggagggcattcctgcaggccatcttggagcatgaggaggaaaatgaggaagaagatgaagtaccggacgatgagactctgaaccaaatgattgctcgacgagaagaagaatttgacctttttatgcggatggacatggaccggcggagggaagatgcccggaacccgaaacggaagccccgtttaatggaggaggatgagctgccctcctggatcattaaggatgacgctgaagtagaaaggctcacctgtgaagaagaggaggagaaaatatttgggagggggtcccgccagcgccgtgacgtggactacagtgacgccctcacggagaagcagtggctaagggccatcgaagacggcaatttggaggaaatggaagaggaagtacggcttaagaagcgaaaaagacgaagaaatgtggataaagatcctgcaaaagaagatgtggaaaaagctaagaagagaagaggccgccctcccgctgagaaactgtcaccaaatccccccaaactgacaaagcagatgaacgctatcatcgatactgtgataaactacaaagatagttcagggcgacagctcagtgaagtcttcattcagttaccttcaaggaaagaattaccagaatactatgaattaattaggaagccagtggatttcaaaaaaataaaggaaaggattcgtaatcataagtaccggagcctaggcgacctggagaaggatgtcatgcttctctgtcacaacgctcagacgttcaacctggagggatcccagatctatgaagactccatcgtcttacagtcagtgtttaagagtgcccggcagaaaattgccaaagaggaagagagtgaggatgaaagcaatgaagaggaggaagaggaagatgaagaagagtcagagtccgaggcaaaatcagtcaaggtgaaaattaagctcaataaaaaagatgacaaaggccgggacaaagggaaaggcaagaaaaggccaaatcgaggaaaagccaaacctgtagtgagcgattttgacagcgatgaggagcaggatgaacgtgaacagtcagaaggaagtgggacggatgatgagtagtaatgaactagtccgtaacttgaaagtatttcgatttcttggctttatatatcttgtggaaaggacgatgctcactcgagttggcacaagtt

SEQ ID NO: 473 - DNA, 848 bp, Homo sapiens
  source 1..848: mol_type = genomic DNA
accgccaccatgtggttggccatcgaagacggcaatttggaggaaatggaagaggaagtacggcttaagaagcgaaaaagacgaagaaatgtggataaagatcctgcaaaagaagatgtggaaaaagctaagaagagaagaggccgccctcccgctgagaaactgtcaccaaatccccccaaactgacaaagcagatgaacgctatcatcgatactgtgataaactacaaagatagttcagggcgacagctcagtgaagtcttcattcagttaccttcaaggaaagaattaccagaatactatgaattaattaggaagccagtggatttcaaaaaaataaaggaaaggattcgtaatcataagtaccggagcctaggcgacctggagaaggatgtcatgcttctctgtcacaacgctcagacgttcaacctggagggatcccagatctatgaagactccatcgtcttacagtcagtgtttaagagtgcccggcagaaaattgccaaagaggaagagagtgaggatgaaagcaatgaagaggaggaagaggaagatgaagaagagtcagagtccgaggcaaaatcagtcaaggtgaaaattaagctcaataaaaaagatgacaaaggccgggacaaagggaaaggcaagaaaaggccaaatcgaggaaaagccaaacctgtagtgagcgattttgacagcgatgaggagcaggatgaacgtgaacagtcagaaggaagtgggacggatgatgagtagtaatgaactagtccgtaacttgaaagtatttcgatttcttggctttatatatcttgtggaaaggacgatcaatatgcgcgggcttgcgcact

SEQ ID NO: 474 - DNA, 4874 bp, Homo sapiens
  source 1..4874: mol_type = genomic DNA
accgccaccatgtccacgcccacagaccctggtgcgatgccccacccagggccttcgccggggcctgggccttcccctgggccaattcttgggcctagtccaggaccaggaccatccccaggttccgtccacagcatgatggggccaagtcctggacctccaagtgtctcccatcctatgccgacgatggggtccacagacttcccacaggaaggcatgcatcaaatgcataagcccatcgatggtatacatgacaaggggattgtagaagacatccattgtggatccatgaagggcactggtatgcgaccacctcacccaggcatgggccctccccagagtccaatggatcaacacagccaaggttatatgtcaccacacccatctccattaggagccccagagcacgtctccagccctatgtctggaggaggcccaactccacctcagatgccaccaagccagccgggggccctcatcccaggtgatccgcaggccatgagccagcccaacagaggtccctcacctttcagtcctgtccagctgcatcagcttcgagctcagattttagcttataaaatgctggcccgaggccagcccctccccgaaacgctgcagcttgcagtccaggggaaaaggacgttgcctggcttgcagcaacaacagcagcagcaacagcagcagcagcagcagcagcagcagcagcagcagcagcaacagcagccgcagcagcagccgccgcaaccacagacgcagcaacaacagcagccggcccttgttaactacaacagaccatctggcccggggccggagctgagcggcccgagcaccccgcagaagctgccggtgcccgcgcccggcggccggccctcgcccgcgccccccgcagccgcgcagccgcccgcggccgcagtgcccgggccctcagtgccgcagccggccccggggcagccctcgcccgtcctccagctgcagcagaagcagagccgcatcagccccatccagaaaccgcaaggcctggaccccgtggaaattctgcaagagcgggaatacagacttcaggcccgcatagctcataggatacaagaactggaaaatctgcctggctctttgccaccagatttaagaaccaaagcaaccgtggaactaaaagcacttcggttactcaatttccagcgtcagctgagacaggaggtggtggcctgcatgcgcagggacacgaccctggagacggctctcaactccaaagcatacaaacggagcaagcgccagactctgagagaagctcgcatgaccgagaagctggagaagcagcagaagattgagcaggagaggaaacgccgtcagaaacaccaggaatacctgaacagtattttgcaacatgcaaaagattttaaggaatatcatcggtctgtggccggaaagatccagaagctctccaaagcagtggcaacttggcatgccaacactgaaagagagcagaagaaggagacagagcggattgaaaaggagagaatgcggcgactgatggctgaagatgaggagggttatagaaaactgattgatcaaaagaaagacaggcgtttagcttaccttttgcagcagaccgatgagtatgtagccaatctgaccaatctggtttgggagcacaagcaagcccaggcagccaaagagaagaagaagaggaggaggaggaagaagaaggctgaggagaatgcagagggtggggagtctgccctgggaccggatggagagcccatagatgagagcagccagatgagtgacctccctgtcaaagtgactcacacagaaaccggcaaggttctgttcggaccagaagcacccaaagcaagtcagctggacgcctggctggaaatgaatcctggttatgaagttgcccctagatctgacagtgaagagagtgattctgattatgaggaagaggatgaggaagaagagtccagtaggcaggaaaccgaagagaaaatactcctggatccaaatagcgaagaagtttctgagaaggatgctaagcagatcattgagacagctaagcaagacgtggatgatgaatacagcatgcagtacagtgccaggggctcccagtcctactacaccgtggctcatgccatctcggagagggtggagaaacagtctgccctcctaattaatgggaccctaaagcattaccagctccagggcctggaatggatggtttccctgtataataacaacttgaacggaatcttagccgatgaaatggggcttggaaagaccatacagaccattgcactcatcacttatctgatggagcacaaaagactcaatggcccctatctcatcattgttcccctttcgactctatctaactggacatatgaatttgacaaatgggctccttctgtggtgaagatttcttacaagggtactcctgccatgcgtcgctcccttgtcccccagctacggagtggcaaattcaatgtcctcttgactacttatgagtatattataaaagacaagcacattcttgcaaagattcggtggaaatacatgatagtggacgaaggccaccgaatgaagaatcaccactgcaagctgactcaggtcttgaacactcactatgtggcccccagaaggatcctcttgactgggaccccgctgcagaataagctccctgaactctgggccctcctcaacttcctcctcccaacaatttttaagagctgcagcacatttgaacaatggttcaatgctccatttgccatgactggtgaaagggtggacttaaatgaagaagaaactatattgatcatcaggcgtctacataaggtgttaagaccatttttactaaggagactgaagaaagaagttgaatcccagcttcccgaaaaagtggaatatgtgatcaagtgtgacatgtcagctctgcagaagattctgtatcgccatatgcaagccaaggggatccttctcacagatggttctgagaaagataagaaggggaaaggaggtgctaagacacttatgaacactattatgcagttgagaaaaatctgcaaccacccatatatgtttcagcacattgaggaatcctttgctgaacacctaggctattcaaatggggtcatcaatggggctgaactgtatcgggcctcagggaagtttgagctgcttgatcgtattctgccaaaattgagagcgactaatcaccgagtgctgcttttctgccagatgacatctctcatgaccatcatggaggattattttgcttttcggaacttcctttacctacgccttgatggcaccaccaagtctgaagatcgtgctgctttgctgaagaaattcaatgaacctggatcccagtatttcattttcttgctgagcacaagagctggtggcctgggcttaaatcttcaggcagctgatacagtggtcatctttgacagcgactggaatcctcatcaggatctgcaggcccaagaccgagctcaccgcatcgggcagcagaacgaggtccgggtactgaggctctgtaccgtgaacagcgtggaggaaaagatcctcgcggccgcaaaatacaagctgaacgtggatcagaaagtgatccaggcgggcatgtttgaccaaaagtcttcaagccacgagcggagggcattcctgcaggccatcttggagcatgaggaggaaaatgaggaagaagatgaagtaccggacgatgagactctgaaccaaatgattgctcgacgagaagaagaatttgacctttttatgcggatggacatggaccggcggagggaagatgcccggaacccgaaacggaagccccgtttaatggaggaggatgagctgccctcctggatcattaaggatgacgctgaagtagaaaggctcacctgtgaagaagaggaggagaaaatatttgggagggggtcccgccagcgccgtgacgtggactacagtgacgccctcacggagaagcagtggctaagggccatcgaagacggcaatttggaggaaatggaagaggaagtacggcttaagaagcgaaaaagacgaagaaatgtggataaagatcctgcaaaagaagatgtggaaaaagctaagaagagaagaggccgccctcccgctgagaaactgtcaccaaatccccccaaactgacaaagcagatgaacgctatcatcgatactgtgataaactacaaagataggtgtaacgtggagaaggtgcccagtaattctcagttggaaatagaaggaaacagttcagggcgacagctcagtgaagtcttcattcagttaccttcaaggaaagaattaccagaatactatgaattaattaggaagccagtggatttcaaaaaaataaaggaaaggattcgtaatcataagtaccggagcctaggcgacctggagaaggatgtcatgcttctctgtcacaacgctcagacgttcaacctggagggatcccagatctatgaagactccatcgtcttacagtcagtgtttaagagtgcccggcagaaaattgccaaagaggaagagagtgaggatgaaagcaatgaagaggaggaagaggaagatgaagaagagtcagagtccgaggcaaaatcagtcaaggtgaaaattaagctcaataaaaaagatgacaaaggccgggacaaagggaaaggcaagaaaaggccaaatcgaggaaaagccaaacctgtagtgagcgattttgacagcgatgaggagcaggatgaacgtgaacagtcagaaggaagtgggacggatgatgagtagtaatgaactagtccgtaacttgaaagtatttcgatttcttggctttatatatcttgtggaaaggacgactccttctactttgctgaggatag

SEQ ID NO: 475 - DNA, 4946 bp, Homo sapiens
  source 1..4946: mol_type = genomic DNA
accgccaccatgtccactccagacccacccctgggcggaactcctcggccaggtccttccccgggccctggcccttcccctggagccatgctgggccctagcccgggtccctcgccgggctccgcccacagcatgatggggcccagcccagggccgccctcagcaggacaccccatccccacccaggggcctggagggtaccctcaggacaacatgcaccagatgcacaagcccatggagtccatgcatgagaagggcatgtcggacgacccgcgctacaaccagatgaaaggaatggggatgcggtcagggggccatgctgggatggggcccccgcccagccccatggaccagcactcccaaggttacccctcgcccctgggtggctctgagcatgcctctagtccagttccagccagtggcccgtcttcggggccccagatgtcttccgggccaggaggtgccccgctggatggtgctgacccccaggccttggggcagcagaaccggggcccaaccccatttaaccagaaccagctgcaccagctcagagctcagatcatggcctacaagatgctggccagggggcagcccctccccgaccacctgcagatggcggtgcagggcaagcggccgatgcccgggatgcagcagcagatgccaacgctacctccaccctcggtgtccgcaacaggacccggccctggccctggccctggccccggcccgggtcccggcccggcacctccaaattacagcaggcctcatggtatgggagggcccaacatgcctcccccaggaccctcgggcgtgccccccgggatgccaggccagcctcctggagggcctcccaagccctggcctgaaggacccatggcgaatgctgctgcccccacgagcacccctcagaagctgattcccccgcagccaacgggccgcccttcccccgcgccccctgccgtcccacccgccgcctcgcccgtgatgccaccgcagacccagtcccccgggcagccggcccagcccgcgcccatggtgccactgcaccagaagcagagccgcatcacccccatccagaagccgcggggcctcgaccctgtggagatcctgcaggagcgcgagtacaggctgcaggctcgcatcgcacaccgaattcaggaacttgaaaaccttcccgggtccctggccggggatttgcgaaccaaagcgaccattgagctcaaggccctcaggctgctgaacttccagaggcagctgcgccaggaggtggtggtgtgcatgcggagggacacagcgctggagacagccctcaatgctaaggcctacaagcgcagcaagcgccagtccctgcgcgaggcccgcatcactgagaagctggagaagcagcagaagatcgagcaggagcgcaagcgccggcagaagcaccaggaatacctcaatagcattctccagcatgccaaggatttcaaggaatatcacagatccgtcacaggcaaaatccagaagctgaccaaggcagtggccacgtaccatgccaacacggagcgggagcagaagaaagagaacgagcggatcgagaaggagcgcatgcggaggctcatggctgaagatgaggaggggtaccgcaagctcatcgaccagaagaaggacaagcgcctggcctacctcttgcagcagacagacgagtacgtggctaacctcacggagctggtgcggcagcacaaggctgcccaggtcgccaaggagaaaaagaagaaaaagaaaaagaagaaggcagaaaatgcagaaggacagacgcctgccattgggccggatggcgagcctctggacgagaccagccagatgagcgacctcccggtgaaggtgatccacgtggagagtgggaagatcctcacaggcacagatgcccccaaagccgggcagctggaggcctggctcgagatgaacccggggtatgaagtagctccgaggtctgatagtgaagaaagtggctcagaagaagaggaagaggaggaggaggaagagcagccgcaggcagcacagcctcccaccctgcccgtggaggagaagaagaagattccagatccagacagcgatgacgtctctgaggtggacgcgcggcacatcattgagaatgccaagcaagatgtcgatgatgaatatggcgtgtcccaggcccttgcacgtggcctgcagtcctactatgccgtggcccatgctgtcactgagagagtggacaagcagtcagcgcttatggtcaatggtgtcctcaaacagtaccagatcaaaggtttggagtggctggtgtccctgtacaacaacaacctgaacggcatcctggccgacgagatgggcctggggaagaccatccagaccatcgcgctcatcacgtacctcatggagcacaaacgcatcaatgggcccttcctcatcatcgtgcctctctcaacgctgtccaactgggcgtacgagtttgacaagtgggccccctccgtggtgaaggtgtcttacaagggatccccagcagcaagacgggcctttgtcccccagctccggagtgggaagttcaacgtcttgctgacgacgtacgagtacatcatcaaagacaagcacatcctcgccaagatccgttggaagtacatgattgtggacgaaggtcaccgcatgaagaaccaccactgcaagctgacgcaggtgctcaacacgcactatgtggcaccccgccgcctgctgctgacgggcacaccgctgcagaacaagcttcccgagctctgggcgctgctcaacttcctgctgcccaccatcttcaagagctgcagcaccttcgagcagtggtttaacgcaccctttgccatgaccggggaaaaggtggacctgaatgaggaggaaaccattctcatcatccggcgtctccacaaagtgctgcggcccttcttgctccgacgactcaagaaggaagtcgaggcccagttgcccgaaaaggtggagtacgtcatcaagtgcgacatgtctgcgctgcagcgagtgctctaccgccacatgcaggccaagggcgtgctgctgactgatggctccgagaaggacaagaagggcaaaggcggcaccaagaccctgatgaacaccatcatgcagctgcggaagatctgcaaccacccctacatgttccagcacatcgaggagtccttttccgagcacttggggttcactggcggcattgtccaagggctggacctgtaccgagcctcgggtaaatttgagcttcttgatagaattcttcccaaactccgagcaaccaaccacaaagtgctgctgttctgccaaatgacctccctcatgaccatcatggaagattactttgcgtatcgcggctttaaatacctcaggcttgatggaaccacgaaggcggaggaccggggcatgctgctgaaaaccttcaacgagcccggctctgagtacttcatcttcctgctcagcacccgggctggggggctcggcctgaacctccagtcggcagacactgtgatcatttttgacagcgactggaatcctcaccaggacctgcaagcgcaggaccgagcccaccgcatcgggcagcagaacgaggtgcgtgtgctccgcctctgcaccgtcaacagcgtggaggagaagatcctagctgcagccaagtacaagctcaacgtggaccagaaggtgatccaggccggcatgttcgaccagaagtcctccagccatgagcggcgcgccttcctgcaggccatcctggagcacgaggagcaggatgaggaggaagacgaggtgcccgacgacgagaccgtcaaccagatgatcgcccggcacgaggaggagtttgatctgttcatgcgcatggacctggaccgcaggcgcgaggaggcccgcaaccccaagcggaagccgcgcctcatggaggaggacgagctcccctcgtggatcatcaaggacgacgcggaggtggagcggctgacctgtgaggaggaggaggagaagatgttcggccgtggctcccgccaccgcaaggaggtggactacagcgactcactgacggagaagcagtggctcaaggccatcgaggagggcacgctggaggagatcgaagaggaggtccggcagaagaaatcatcacggaagcgcaagcgagacagcgacgccggctcctccaccccgaccaccagcacccgcagccgcgacaaggacgacgagagcaagaagcagaagaagcgcgggcggccgcctgccgagaaactctcccctaacccacccaacctcaccaagaagatgaagaagattgtggatgccgtgatcaagtacaaggacagcagcagtggacgtcagctcagcgaggtcttcatccagctgccctcgcgaaaggagctgcccgagtactacgagctcatccgcaagcccgtggacttcaagaagataaaggagcgcattcgcaaccacaagtaccgcagcctcaacgacctagagaaggacgtcatgctcctgtgccagaacgcacagaccttcaacctggagggctccctgatctatgaagactccatcgtcttgcagtcggtcttcaccagcgtgcggcagaaaatcgagaaggaggatgacagtgaaggcgaggagagtgaggaggaggaagagggcgaggaggaaggctccgaatccgaatctcggtccgtcaaagtgaagatcaagcttggccggaaggagaaggcacaggaccggctgaagggcggccggcggcggccgagccgagggtcccgagccaagccggtcgtgagtgacgatgacagtgaggaggaacaagaggaggaccgctcaggaagtggcagcgaagaagactagtaatgaactagtccgtaacttgaaagtatttcgatttcttggctttatatatcttgtggaaaggacgaactatgatgggctccaaccgcaca

SEQ ID NO: 476 - DNA, 4943 bp, Homo sapiens
  source 1..4943: mol_type = genomic DNA
accgccaccatgtccactccagacccacccctgggcggaactcctcggccaggtccttccccgggccctggcccttcccctggagccatgctgggccctagcccgggtccctcgccgggctccgcccacagcatgatggggcccagcccagggccgccctcagcaggacaccccatccccacccaggggcctggagggtaccctcaggacaacatgcaccagatgcacaagcccatggagtccatgcatgagaagggcatgtcggacgacccgcgctacaaccagatgaaaggaatggggatgcggtcagggggccatgctgggatggggcccccgcccagccccatggaccagcactcccaaggttacccctcgcccctgggtggctctgagcatgcctctagtccagttccagccagtggcccgtcttcggggccccagatgtcttccgggccaggaggtgccccgctggatggtgctgacccccaggccttggggcagcagaaccggggcccaaccccatttaaccagaaccagctgcaccagctcagagctcagatcatggcctacaagatgctggccagggggcagcccctccccgaccacctgcagatggcggtgcagggcaagcggccgatgcccgggatgcagcagcagatgccaacgctacctccaccctcggtgtccgcaacaggacccggccctggccctggccctggccccggcccgggtcccggcccggcacctccaaattacagcaggcctcatggtatgggagggcccaacatgcctcccccaggaccctcgggcgtgccccccgggatgccaggccagcctcctggagggcctcccaagccctggcctgaaggacccatggcgaatgctgctgcccccacgagcacccctcagaagctgattcccccgcagccaacgggccgcccttcccccgcgccccctgccgtcccacccgccgcctcgcccgtgatgccaccgcagacccagtcccccgggcagccggcccagcccgcgcccatggtgccactgcaccagaagcagagccgcatcacccccatccagaagccgcggggcctcgaccctgtggagatcctgcaggagcgcgagtacaggctgcaggctcgcatcgcacaccgaattcaggaacttgaaaaccttcccgggtccctggccggggatttgcgaaccaaagcgaccattgagctcaaggccctcaggctgctgaacttccagaggcagctgcgccaggaggtggtggtgtgcatgcggagggacacagcgctggagacagccctcaatgctaaggcctacaagcgcagcaagcgccagtccctgcgcgaggcccgcatcactgagaagctggagaagcagcagaagatcgagcaggagcgcaagcgccggcagaagcaccaggaatacctcaatagcattctccagcatgccaaggatttcaaggaatatcacagatccgtcacaggcaaaatccagaagctgaccaaggcagtggccacgtaccatgccaacacggagcgggagcagaagaaagagaacgagcggatcgagaaggagcgcatgcggaggctcatggctgaagatgaggaggggtaccgcaagctcatcgaccagaagaaggacaagcgcctggcctacctcttgcagcagacagacgagtacgtggctaacctcacggagctggtgcggcagcacaaggctgcccaggtcgccaaggagaaaaagaagaaaaagaaaaagaagaaggcagaaaatgcagaaggacagacgcctgccattgggccggatggcgagcctctggacgagaccagccagatgagcgacctcccggtgaaggtgatccacgtggagagtgggaagatcctcacaggcacagatgcccccaaagccgggcagctggaggcctggctcgagatgaacccggggtatgaagtagctccgaggtctgatagtgaagaaagtggctcagaagaagaggaagaggaggaggaggaagagcagccgcaggcagcacagcctcccaccctgcccgtggaggagaagaagaagattccagatccagacagcgatgacgtctctgaggtggacgcgcggcacatcattgagaatgccaagcaagatgtcgatgatgaatatggcgtgtcccaggcccttgcacgtggcctgcagtcctactatgccgtggcccatgctgtcactgagagagtggacaagcagtcagcgcttatggtcaatggtgtcctcaaacagtaccagatcaaaggtttggagtggctggtgtccctgtacaacaacaacctgaacggcatcctggccgacgagatgggcctggggaagaccatccagaccatcgcgctcatcacgtacctcatggagcacaaacgcatcaatgggcccttcctcatcatcgtgcctctctcaacgctgtccaactgggcgtacgagtttgacaagtgggccccctccgtggtgaaggtgtcttacaagggatccccagcagcaagacgggcctttgtcccccagctccggagtgggaagttcaacgtcttgctgacgacgtacgagtacatcatcaaagacaagcacatcctcgccaagatccgttggaagtacatgattgtggacgaaggtcaccgcatgaagaaccaccactgcaagctgacgcaggtgctcaacacgcactatgtggcaccccgccgcctgctgctgacgggcacaccgctgcagaacaagcttcccgagctctgggcgctgctcaacttcctgctgcccaccatcttcaagagctgcagcaccttcgagcagtggtttaacgcaccctttgccatgaccggggaaaaggtggacctgaatgaggaggaaaccattctcatcatccggcgtctccacaaagtgctgcggcccttcttgctccgacgactcaagaaggaagtcgaggcccagttgcccgaaaaggtggagtacgtcatcaagtgcgacatgtctgcgctgcagcgagtgctctaccgccacatgcaggccaagggcgtgctgctgactgatggctccgagaaggacaagaagggcaaaggcggcaccaagaccctgatgaacaccatcatgcagctgcggaagatctgcaaccacccctacatgttccagcacatcgaggagtccttttccgagcacttggggttcactggcggcattgtccaagggctggacctgtaccgagcctcgggtaaatttgagcttcttgatagaattcttcccaaactccgagcaaccaaccacaaagtgctgctgttctgccaaatgacctccctcatgaccatcatggaagattactttgcgtatcgcggctttaaatacctcaggcttgatggaaccacgaaggcggaggaccggggcatgctgctgaaaaccttcaacgagcccggctctgagtacttcatcttcctgctcagcacccgggctggggggctcggcctgaacctccagtcggcagacactgtgatcatttttgacagcgactggaatcctcaccaggacctgcaagcgcaggaccgagcccaccgcatcgggcagcagaacgaggtgcgtgtgctccgcctctgcaccgtcaacagcgtggaggagaagatcctagctgcagccaagtacaagctcaacgtggaccagaaggtgatccaggccggcatgttcgaccagaagtcctccagccatgagcggcgcgccttcctgcaggccatcctggagcacgaggagcaggatgaggaggaagacgaggtgcccgacgacgagaccgtcaaccagatgatcgcccggcacgaggaggagtttgatctgttcatgcgcatggacctggaccgcaggcgcgaggaggcccgcaaccccaagcggaagccgcgcctcatggaggaggacgagctcccctcgtggatcatcaaggacgacgcggaggtggagcggctgacctgtgaggaggaggaggagaagatgttcggccgtggctcccgccaccgcaaggaggtggactacagcgactcactgacggagaagcagtggctcaaggccatcgaggagggcacgctggaggagatcgaagaggaggtccggcagaagaaatcatcacggaagcgcaagcgagacagcgacgccggctcctccaccccgaccaccagcacccgcagccgcgacaaggacgacgagagcaagaagcagaagaagcgcgggcggccgcctgccgagaaactctcccctaacccacccaacctcaccaagaagatgaagaagattgtggatgccgtgatcaagtacaaggacagcagtggacgtcagctcagcgaggtcttcatccagctgccctcgcgaaaggagctgcccgagtactacgagctcatccgcaagcccgtggacttcaagaagataaaggagcgcattcgcaaccacaagtaccgcagcctcaacgacctagagaaggacgtcatgctcctgtgccagaacgcacagaccttcaacctggagggctccctgatctatgaagactccatcgtcttgcagtcggtcttcaccagcgtgcggcagaaaatcgagaaggaggatgacagtgaaggcgaggagagtgaggaggaggaagagggcgaggaggaaggctccgaatccgaatctcggtccgtcaaagtgaagatcaagcttggccggaaggagaaggcacaggaccggctgaagggcggccggcggcggccgagccgagggtcccgagccaagccggtcgtgagtgacgatgacagtgaggaggaacaagaggaggaccgctcaggaagtggcagcgaagaagactagtaatgaactagtccgtaacttgaaagtatttcgatttcttggctttatatatcttgtggaaaggacgacatggaccgactagttataaggtg

SEQ ID NO: 477 - DNA, 4955 bp, Homo sapiens
  source 1..4955: mol_type = genomic DNA
accgccaccatgtccactccagacccacccctgggcggaactcctcggccaggtccttccccgggccctggcccttcccctggagccatgctgggccctagcccgggtccctcgccgggctccgcccacagcatgatggggcccagcccagggccgccctcagcaggacaccccatccccacccaggggcctggagggtaccctcaggacaacatgcaccagatgcacaagcccatggagtccatgcatgagaagggcatgtcggacgacccgcgctacaaccagatgaaaggaatggggatgcggtcagggggccatgctgggatggggcccccgcccagccccatggaccagcactcccaaggttacccctcgcccctgggtggctctgagcatgcctctagtccagttccagccagtggcccgtcttcggggccccagatgtcttccgggccaggaggtgccccgctggatggtgctgacccccaggccttggggcagcagaaccggggcccaaccccatttaaccagaaccagctgcaccagctcagagctcagatcatggcctacaagatgctggccagggggcagcccctccccgaccacctgcagatggcggtgcagggcaagcggccgatgcccgggatgcagcagcagatgccaacgctacctccaccctcggtgtccgcaacaggacccggccctggccctggccctggccccggcccgggtcccggcccggcacctccaaattacagcaggcctcatggtatgggagggcccaacatgcctcccccaggaccctcgggcgtgccccccgggatgccaggccagcctcctggagggcctcccaagccctggcctgaaggacccatggcgaatgctgctgcccccacgagcacccctcagaagctgattcccccgcagccaacgggccgcccttcccccgcgccccctgccgtcccacccgccgcctcgcccgtgatgccaccgcagacccagtcccccgggcagccggcccagcccgcgcccatggtgccactgcaccagaagcagagccgcatcacccccatccagaagccgcggggcctcgaccctgtggagatcctgcaggagcgcgagtacaggctgcaggctcgcatcgcacaccgaattcaggaacttgaaaaccttcccgggtccctggccggggatttgcgaaccaaagcgaccattgagctcaaggccctcaggctgctgaacttccagaggcagctgcgccaggaggtggtggtgtgcatgcggagggacacagcgctggagacagccctcaatgctaaggcctacaagcgcagcaagcgccagtccctgcgcgaggcccgcatcactgagaagctggagaagcagcagaagatcgagcaggagcgcaagcgccggcagaagcaccaggaatacctcaatagcattctccagcatgccaaggatttcaaggaatatcacagatccgtcacaggcaaaatccagaagctgaccaaggcagtggccacgtaccatgccaacacggagcgggagcagaagaaagagaacgagcggatcgagaaggagcgcatgcggaggctcatggctgaagatgaggaggggtaccgcaagctcatcgaccagaagaaggacaagcgcctggcctacctcttgcagcagacagacgagtacgtggctaacctcacggagctggtgcggcagcacaaggctgcccaggtcgccaaggagaaaaagaagaaaaagaaaaagaagaaggcagaaaatgcagaaggacagacgcctgccattgggccggatggcgagcctctggacgagaccagccagatgagcgacctcccggtgaaggtgatccacgtggagagtgggaagatcctcacaggcacagatgcccccaaagccgggcagctggaggcctggctcgagatgaacccggggtatgaagtagctccgaggtctgatagtgaagaaagtggctcagaagaagaggaagaggaggaggaggaagagcagccgcaggcagcacagcctcccaccctgcccgtggaggagaagaagaagattccagatccagacagcgatgacgtctctgaggtggacgcgcggcacatcattgagaatgccaagcaagatgtcgatgatgaatatggcgtgtcccaggcccttgcacgtggcctgcagtcctactatgccgtggcccatgctgtcactgagagagtggacaagcagtcagcgcttatggtcaatggtgtcctcaaacagtaccagatcaaaggtttggagtggctggtgtccctgtacaacaacaacctgaacggcatcctggccgacgagatgggcctggggaagaccatccagaccatcgcgctcatcacgtacctcatggagcacaaacgcatcaatgggcccttcctcatcatcgtgcctctctcaacgctgtccaactgggcgtacgagtttgacaagtgggccccctccgtggtgaaggtgtcttacaagggatccccagcagcaagacgggcctttgtcccccagctccggagtgggaagttcaacgtcttgctgacgacgtacgagtacatcatcaaagacaagcacatcctcgccaagatccgttggaagtacatgattgtggacgaaggtcaccgcatgaagaaccaccactgcaagctgacgcaggtgctcaacacgcactatgtggcaccccgccgcctgctgctgacgggcacaccgctgcagaacaagcttcccgagctctgggcgctgctcaacttcctgctgcccaccatcttcaagagctgcagcaccttcgagcagtggtttaacgcaccctttgccatgaccggggaaaaggtggacctgaatgaggaggaaaccattctcatcatccggcgtctccacaaagtgctgcggcccttcttgctccgacgactcaagaaggaagtcgaggcccagttgcccgaaaaggtggagtacgtcatcaagtgcgacatgtctgcgctgcagcgagtgctctaccgccacatgcaggccaagggcgtgctgctgactgatggctccgagaaggacaagaagggcaaaggcggcaccaagaccctgatgaacaccatcatgcagctgcggaagatctgcaaccacccctacatgttccagcacatcgaggagtccttttccgagcacttggggttcactggcggcattgtccaagggctggacctgtaccgagcctcgggtaaatttgagcttcttgatagaattcttcccaaactccgagcaaccaaccacaaagtgctgctgttctgccaaatgacctccctcatgaccatcatggaagattactttgcgtatcgcggctttaaatacctcaggcttgatggaaccacgaaggcggaggaccggggcatgctgctgaaaaccttcaacgagcccggctctgagtacttcatcttcctgctcagcacccgggctggggggctcggcctgaacctccagtcggcagacactgtgatcatttttgacagcgactggaatcctcaccaggacctgcaagcgcaggaccgagcccaccgcatcgggcagcagaacgaggtgcgtgtgctccgcctctgcaccgtcaacagcgtggaggagaagatcctagctgcagccaagtacaagctcaacgtggaccagaaggtgatccaggccggcatgttcgaccagaagtcctccagccatgagcggcgcgccttcctgcaggccatcctggagcacgaggagcaggatgaggaggaagacgaggtgcccgacgacgagaccgtcaaccagatgatcgcccggcacgaggaggagtttgatctgttcatgcgcatggacctggaccgcaggcgcgaggaggcccgcaaccccaagcggaagccgcgcctcatggaggaggacgagctcccctcgtggatcatcaaggacgacgcggaggtggagcggctgacctgtgaggaggaggaggagaagatgttcggccgtggctcccgccaccgcaaggaggtggactacagcgactcactgacggagaagcagtggctcaagaccctgaaggccatcgaggagggcacgctggaggagatcgaagaggaggtccggcagaagaaatcatcacggaagcgcaagcgagacagcgacgccggctcctccaccccgaccaccagcacccgcagccgcgacaaggacgacgagagcaagaagcagaagaagcgcgggcggccgcctgccgagaaactctcccctaacccacccaacctcaccaagaagatgaagaagattgtggatgccgtgatcaagtacaaggacagcagcagtggacgtcagctcagcgaggtcttcatccagctgccctcgcgaaaggagctgcccgagtactacgagctcatccgcaagcccgtggacttcaagaagataaaggagcgcattcgcaaccacaagtaccgcagcctcaacgacctagagaaggacgtcatgctcctgtgccagaacgcacagaccttcaacctggagggctccctgatctatgaagactccatcgtcttgcagtcggtcttcaccagcgtgcggcagaaaatcgagaaggaggatgacagtgaaggcgaggagagtgaggaggaggaagagggcgaggaggaaggctccgaatccgaatctcggtccgtcaaagtgaagatcaagcttggccggaaggagaaggcacaggaccggctgaagggcggccggcggcggccgagccgagggtcccgagccaagccggtcgtgagtgacgatgacagtgaggaggaacaagaggaggaccgctcaggaagtggcagcgaagaagactagtaatgaactagtccgtaacttgaaagtatttcgatttcttggctttatatatcttgtggaaaggacgagaaacctcacatggacctacgtgt

SEQ ID NO: 478 - DNA, 5141 bp, Homo sapiens
  source 1..5141: mol_type = genomic DNA
accgccaccatgtccactccagacccacccctgggcggaactcctcggccaggtccttccccgggccctggcccttcccctggagccatgctgggccctagcccgggtccctcgccgggctccgcccacagcatgatggggcccagcccagggccgccctcagcaggacaccccatccccacccaggggcctggagggtaccctcaggacaacatgcaccagatgcacaagcccatggagtccatgcatgagaagggcatgtcggacgacccgcgctacaaccagatgaaaggaatggggatgcggtcagggggccatgctgggatggggcccccgcccagccccatggaccagcactcccaaggttacccctcgcccctgggtggctctgagcatgcctctagtccagttccagccagtggcccgtcttcggggccccagatgtcttccgggccaggaggtgccccgctggatggtgctgacccccaggccttggggcagcagaaccggggcccaaccccatttaaccagaaccagctgcaccagctcagagctcagatcatggcctacaagatgctggccagggggcagcccctccccgaccacctgcagatggcggtgcagggcaagcggccgatgcccgggatgcagcagcagatgccaacgctacctccaccctcggtgtccgcaacaggacccggccctggccctggccctggccccggcccgggtcccggcccggcacctccaaattacagcaggcctcatggtatgggagggcccaacatgcctcccccaggaccctcgggcgtgccccccgggatgccaggccagcctcctggagggcctcccaagccctggcctgaaggacccatggcgaatgctgctgcccccacgagcacccctcagaagctgattcccccgcagccaacgggccgcccttcccccgcgccccctgccgtcccacccgccgcctcgcccgtgatgccaccgcagacccagtcccccgggcagccggcccagcccgcgcccatggtgccactgcaccagaagcagagccgcatcacccccatccagaagccgcggggcctcgaccctgtggagatcctgcaggagcgcgagtacaggctgcaggctcgcatcgcacaccgaattcaggaacttgaaaaccttcccgggtccctggccggggatttgcgaaccaaagcgaccattgagctcaaggccctcaggctgctgaacttccagaggcagctgcgccaggaggtggtggtgtgcatgcggagggacacagcgctggagacagccctcaatgctaaggcctacaagcgcagcaagcgccagtccctgcgcgaggcccgcatcactgagaagctggagaagcagcagaagatcgagcaggagcgcaagcgccggcagaagcaccaggaatacctcaatagcattctccagcatgccaaggatttcaaggaatatcacagatccgtcacaggcaaaatccagaagctgaccaaggcagtggccacgtaccatgccaacacggagcgggagcagaagaaagagaacgagcggatcgagaaggagcgcatgcggaggctcatggctgaagatgaggaggggtaccgcaagctcatcgaccagaagaaggacaagcgcctggcctacctcttgcagcagacagacgagtacgtggctaacctcacggagctggtgcggcagcacaaggctgcccaggtcgccaaggagaaaaagaagaaaaagaaaaagaagaaggcagaaaatgcagaaggacagacgcctgccattgggccggatggcgagcctctggacgagaccagccagatgagcgacctcccggtgaaggtgatccacgtggagagtgggaagatcctcacaggcacagatgcccccaaagccgggcagctggaggcctggctcgagatgaacccggggtatgaagtagctccgaggtctgatagtgaagaaagtggctcagaagaagaggaagaggaggaggaggaagagcagccgcaggcagcacagcctcccaccctgcccgtggaggagaagaagaagattccagatccagacagcgatgacgtctctgaggtggacgcgcggcacatcattgagaatgccaagcaagatgtcgatgatgaatatggcgtgtcccaggcccttgcacgtggcctgcagtcctactatgccgtggcccatgctgtcactgagagagtggacaagcagtcagcgcttatggtcaatggtgtcctcaaacagtaccagatcaaaggtttggagtggctggtgtccctgtacaacaacaacctgaacggcatcctggccgacgagatgggcctggggaagaccatccagaccatcgcgctcatcacgtacctcatggagcacaaacgcatcaatgggcccttcctcatcatcgtgcctctctcaacgctgtccaactgggcgtacgagtttgacaagtgggccccctccgtggtgaaggtgtcttacaagggatccccagcagcaagacgggcctttgtcccccagctccggagtgggaagttcaacgtcttgctgacgacgtacgagtacatcatcaaagacaagcacatcctcgccaagatccgttggaagtacatgattgtggacgaaggtcaccgcatgaagaaccaccactgcaagctgacgcaggtgctcaacacgcactatgtggcaccccgccgcctgctgctgacgggcacaccgctgcagaacaagcttcccgagctctgggcgctgctcaacttcctgctgcccaccatcttcaagagctgcagcaccttcgagcagtggtttaacgcaccctttgccatgaccggggaaaaggtggacctgaatgaggaggaaaccattctcatcatccggcgtctccacaaagtgctgcggcccttcttgctccgacgactcaagaaggaagtcgaggcccagttgcccgaaaaggtggagtacgtcatcaagtgcgacatgtctgcgctgcagcgagtgctctaccgccacatgcaggccaagggcgtgctgctgactgatggctccgagaaggacaagaagggcaaaggcggcaccaagaccctgatgaacaccatcatgcagctgcggaagatctgcaaccacccctacatgttccagcacatcgaggagtccttttccgagcacttggggttcactggcggcattgtccaagggctggacctgtaccgagcctcgggtaaatttgagcttcttgatagaattcttcccaaactccgagcaaccaaccacaaagtgctgctgttctgccaaatgacctccctcatgaccatcatggaagattactttgcgtatcgcggctttaaatacctcaggcttgatggaaccacgaaggcggaggaccggggcatgctgctgaaaaccttcaacgagcccggctctgagtacttcatcttcctgctcagcacccgggctggggggctcggcctgaacctccagtcggcagacactgtgatcatttttgacagcgactggaatcctcaccaggacctgcaagcgcaggaccgagcccaccgcatcgggcagcagaacgaggtgcgtgtgctccgcctctgcaccgtcaacagcgtggaggagaagatcctagctgcagccaagtacaagctcaacgtggaccagaaggtgatccaggccggcatgttcgaccagaagtcctccagccatgagcggcgcgccttcctgcaggccatcctggagcacgaggagcaggatgagagcagacactgcagcacgggcagcggcagtgccagcttcgcccacactgcccctccgccagcgggcgtcaaccccgacttggaggagccacctctaaaggaggaagacgaggtgcccgacgacgagaccgtcaaccagatgatcgcccggcacgaggaggagtttgatctgttcatgcgcatggacctggaccgcaggcgcgaggaggcccgcaaccccaagcggaagccgcgcctcatggaggaggacgagctcccctcgtggatcatcaaggacgacgcggaggtggagcggctgacctgtgaggaggaggaggagaagatgttcggccgtggctcccgccaccgcaaggaggtggactacagcgactcactgacggagaagcagtggctcaagaaaattacaggaaaagatatccatgacacagccagcagtgtggcacgtgggctacaattccagcgtggccttcagttctgcacacgtgcgtcaaaggccatcgaggagggcacgctggaggagatcgaagaggaggtccggcagaagaaatcatcacggaagcgcaagcgagacagcgacgccggctcctccaccccgaccaccagcacccgcagccgcgacaaggacgacgagagcaagaagcagaagaagcgcgggcggccgcctgccgagaaactctcccctaacccacccaacctcaccaagaagatgaagaagattgtggatgccgtgatcaagtacaaggacagcagcagtggacgtcagctcagcgaggtcttcatccagctgccctcgcgaaaggagctgcccgagtactacgagctcatccgcaagcccgtggacttcaagaagataaaggagcgcattcgcaaccacaagtaccgcagcctcaacgacctagagaaggacgtcatgctcctgtgccagaacgcacagaccttcaacctggagggctccctgatctatgaagactccatcgtcttgcagtcggtcttcaccagcgtgcggcagaaaatcgagaaggaggatgacagtgaaggcgaggagagtgaggaggaggaagagggcgaggaggaaggctccgaatccgaatctcggtccgtcaaagtgaagatcaagcttggccggaaggagaaggcacaggaccggctgaagggcggccggcggcggccgagccgagggtcccgagccaagccggtcgtgagtgacgatgacagtgaggaggaacaagaggaggaccgctcaggaagtggcagcgaagaagactagtaatgaactagtccgtaacttgaaagtatttcgatttcttggctttatatatcttgtggaaaggacgatcatatacgtcaagacaagtacat

SEQ ID NO: 479 - DNA, 5045 bp, Homo sapiens
  source 1..5045: mol_type = genomic DNA
accgccaccatgtccactccagacccacccctgggcggaactcctcggccaggtccttccccgggccctggcccttcccctggagccatgctgggccctagcccgggtccctcgccgggctccgcccacagcatgatggggcccagcccagggccgccctcagcaggacaccccatccccacccaggggcctggagggtaccctcaggacaacatgcaccagatgcacaagcccatggagtccatgcatgagaagggcatgtcggacgacccgcgctacaaccagatgaaaggaatggggatgcggtcagggggccatgctgggatggggcccccgcccagccccatggaccagcactcccaaggttacccctcgcccctgggtggctctgagcatgcctctagtccagttccagccagtggcccgtcttcggggccccagatgtcttccgggccaggaggtgccccgctggatggtgctgacccccaggccttggggcagcagaaccggggcccaaccccatttaaccagaaccagctgcaccagctcagagctcagatcatggcctacaagatgctggccagggggcagcccctccccgaccacctgcagatggcggtgcagggcaagcggccgatgcccgggatgcagcagcagatgccaacgctacctccaccctcggtgtccgcaacaggacccggccctggccctggccctggccccggcccgggtcccggcccggcacctccaaattacagcaggcctcatggtatgggagggcccaacatgcctcccccaggaccctcgggcgtgccccccgggatgccaggccagcctcctggagggcctcccaagccctggcctgaaggacccatggcgaatgctgctgcccccacgagcacccctcagaagctgattcccccgcagccaacgggccgcccttcccccgcgccccctgccgtcccacccgccgcctcgcccgtgatgccaccgcagacccagtcccccgggcagccggcccagcccgcgcccatggtgccactgcaccagaagcagagccgcatcacccccatccagaagccgcggggcctcgaccctgtggagatcctgcaggagcgcgagtacaggctgcaggctcgcatcgcacaccgaattcaggaacttgaaaaccttcccgggtccctggccggggatttgcgaaccaaagcgaccattgagctcaaggccctcaggctgctgaacttccagaggcagctgcgccaggaggtggtggtgtgcatgcggagggacacagcgctggagacagccctcaatgctaaggcctacaagcgcagcaagcgccagtccctgcgcgaggcccgcatcactgagaagctggagaagcagcagaagatcgagcaggagcgcaagcgccggcagaagcaccaggaatacctcaatagcattctccagcatgccaaggatttcaaggaatatcacagatccgtcacaggcaaaatccagaagctgaccaaggcagtggccacgtaccatgccaacacggagcgggagcagaagaaagagaacgagcggatcgagaaggagcgcatgcggaggctcatggctgaagatgaggaggggtaccgcaagctcatcgaccagaagaaggacaagcgcctggcctacctcttgcagcagacagacgagtacgtggctaacctcacggagctggtgcggcagcacaaggctgcccaggtcgccaaggagaaaaagaagaaaaagaaaaagaagaaggcagaaaatgcagaaggacagacgcctgccattgggccggatggcgagcctctggacgagaccagccagatgagcgacctcccggtgaaggtgatccacgtggagagtgggaagatcctcacaggcacagatgcccccaaagccgggcagctggaggcctggctcgagatgaacccggggtatgaagtagctccgaggtctgatagtgaagaaagtggctcagaagaagaggaagaggaggaggaggaagagcagccgcaggcagcacagcctcccaccctgcccgtggaggagaagaagaagattccagatccagacagcgatgacgtctctgaggtggacgcgcggcacatcattgagaatgccaagcaagatgtcgatgatgaatatggcgtgtcccaggcccttgcacgtggcctgcagtcctactatgccgtggcccatgctgtcactgagagagtggacaagcagtcagcgcttatggtcaatggtgtcctcaaacagtaccagatcaaaggtttggagtggctggtgtccctgtacaacaacaacctgaacggcatcctggccgacgagatgggcctggggaagaccatccagaccatcgcgctcatcacgtacctcatggagcacaaacgcatcaatgggcccttcctcatcatcgtgcctctctcaacgctgtccaactgggcgtacgagtttgacaagtgggccccctccgtggtgaaggtgtcttacaagggatccccagcagcaagacgggcctttgtcccccagctccggagtgggaagttcaacgtcttgctgacgacgtacgagtacatcatcaaagacaagcacatcctcgccaagatccgttggaagtacatgattgtggacgaaggtcaccgcatgaagaaccaccactgcaagctgacgcaggtgctcaacacgcactatgtggcaccccgccgcctgctgctgacgggcacaccgctgcagaacaagcttcccgagctctgggcgctgctcaacttcctgctgcccaccatcttcaagagctgcagcaccttcgagcagtggtttaacgcaccctttgccatgaccggggaaaaggtggacctgaatgaggaggaaaccattctcatcatccggcgtctccacaaagtgctgcggcccttcttgctccgacgactcaagaaggaagtcgaggcccagttgcccgaaaaggtggagtacgtcatcaagtgcgacatgtctgcgctgcagcgagtgctctaccgccacatgcaggccaagggcgtgctgctgactgatggctccgagaaggacaagaagggcaaaggcggcaccaagaccctgatgaacaccatcatgcagctgcggaagatctgcaaccacccctacatgttccagcacatcgaggagtccttttccgagcacttggggttcactggcggcattgtccaagggctggacctgtaccgagcctcgggtaaatttgagcttcttgatagaattcttcccaaactccgagcaaccaaccacaaagtgctgctgttctgccaaatgacctccctcatgaccatcatggaagattactttgcgtatcgcggctttaaatacctcaggcttgatggaaccacgaaggcggaggaccggggcatgctgctgaaaaccttcaacgagcccggctctgagtacttcatcttcctgctcagcacccgggctggggggctcggcctgaacctccagtcggcagacactgtgatcatttttgacagcgactggaatcctcaccaggacctgcaagcgcaggaccgagcccaccgcatcgggcagcagaacgaggtgcgtgtgctccgcctctgcaccgtcaacagcgtggaggagaagatcctagctgcagccaagtacaagctcaacgtggaccagaaggtgatccaggccggcatgttcgaccagaagtcctccagccatgagcggcgcgccttcctgcaggccatcctggagcacgaggagcaggatgagagcagacactgcagcacgggcagcggcagtgccagcttcgcccacactgcccctccgccagcgggcgtcaaccccgacttggaggagccacctctaaaggaggaagacgaggtgcccgacgacgagaccgtcaaccagatgatcgcccggcacgaggaggagtttgatctgttcatgcgcatggacctggaccgcaggcgcgaggaggcccgcaaccccaagcggaagccgcgcctcatggaggaggacgagctcccctcgtggatcatcaaggacgacgcggaggtggagcggctgacctgtgaggaggaggaggagaagatgttcggccgtggctcccgccaccgcaaggaggtggactacagcgactcactgacggagaagcagtggctcaaggccatcgaggagggcacgctggaggagatcgaagaggaggtccggcagaagaaatcatcacggaagcgcaagcgagacagcgacgccggctcctccaccccgaccaccagcacccgcagccgcgacaaggacgacgagagcaagaagcagaagaagcgcgggcggccgcctgccgagaaactctcccctaacccacccaacctcaccaagaagatgaagaagattgtggatgccgtgatcaagtacaaggacagcagcagtggacgtcagctcagcgaggtcttcatccagctgccctcgcgaaaggagctgcccgagtactacgagctcatccgcaagcccgtggacttcaagaagataaaggagcgcattcgcaaccacaagtaccgcagcctcaacgacctagagaaggacgtcatgctcctgtgccagaacgcacagaccttcaacctggagggctccctgatctatgaagactccatcgtcttgcagtcggtcttcaccagcgtgcggcagaaaatcgagaaggaggatgacagtgaaggcgaggagagtgaggaggaggaagagggcgaggaggaaggctccgaatccgaatctcggtccgtcaaagtgaagatcaagcttggccggaaggagaaggcacaggaccggctgaagggcggccggcggcggccgagccgagggtcccgagccaagccggtcgtgagtgacgatgacagtgaggaggaacaagaggaggaccgctcaggaagtggcagcgaagaagactagtaatgaactagtccgtaacttgaaagtatttcgatttcttggctttatatatcttgtggaaaggacgagcgtcactctggtagcgaagactg

SEQ ID NO: 480 - DNA, 4952 bp, Homo sapiens
  source 1..4952: mol_type = genomic DNA
accgccaccatgtccactccagacccacccctgggcggaactcctcggccaggtccttccccgggccctggcccttcccctggagccatgctgggccctagcccgggtccctcgccgggctccgcccacagcatgatggggcccagcccagggccgccctcagcaggacaccccatccccacccaggggcctggagggtaccctcaggacaacatgcaccagatgcacaagcccatggagtccatgcatgagaagggcatgtcggacgacccgcgctacaaccagatgaaaggaatggggatgcggtcagggggccatgctgggatggggcccccgcccagccccatggaccagcactcccaaggttacccctcgcccctgggtggctctgagcatgcctctagtccagttccagccagtggcccgtcttcggggccccagatgtcttccgggccaggaggtgccccgctggatggtgctgacccccaggccttggggcagcagaaccggggcccaaccccatttaaccagaaccagctgcaccagctcagagctcagatcatggcctacaagatgctggccagggggcagcccctccccgaccacctgcagatggcggtgcagggcaagcggccgatgcccgggatgcagcagcagatgccaacgctacctccaccctcggtgtccgcaacaggacccggccctggccctggccctggccccggcccgggtcccggcccggcacctccaaattacagcaggcctcatggtatgggagggcccaacatgcctcccccaggaccctcgggcgtgccccccgggatgccaggccagcctcctggagggcctcccaagccctggcctgaaggacccatggcgaatgctgctgcccccacgagcacccctcagaagctgattcccccgcagccaacgggccgcccttcccccgcgccccctgccgtcccacccgccgcctcgcccgtgatgccaccgcagacccagtcccccgggcagccggcccagcccgcgcccatggtgccactgcaccagaagcagagccgcatcacccccatccagaagccgcggggcctcgaccctgtggagatcctgcaggagcgcgagtacaggctgcaggctcgcatcgcacaccgaattcaggaacttgaaaaccttcccgggtccctggccggggatttgcgaaccaaagcgaccattgagctcaaggccctcaggctgctgaacttccagaggcagctgcgccaggaggtggtggtgtgcatgcggagggacacagcgctggagacagccctcaatgctaaggcctacaagcgcagcaagcgccagtccctgcgcgaggcccgcatcactgagaagctggagaagcagcagaagatcgagcaggagcgcaagcgccggcagaagcaccaggaatacctcaatagcattctccagcatgccaaggatttcaaggaatatcacagatccgtcacaggcaaaatccagaagctgaccaaggcagtggccacgtaccatgccaacacggagcgggagcagaagaaagagaacgagcggatcgagaaggagcgcatgcggaggctcatggctgaagatgaggaggggtaccgcaagctcatcgaccagaagaaggacaagcgcctggcctacctcttgcagcagacagacgagtacgtggctaacctcacggagctggtgcggcagcacaaggctgcccaggtcgccaaggagaaaaagaagaaaaagaaaaagaagaaggcagaaaatgcagaaggacagacgcctgccattgggccggatggcgagcctctggacgagaccagccagatgagcgacctcccggtgaaggtgatccacgtggagagtgggaagatcctcacaggcacagatgcccccaaagccgggcagctggaggcctggctcgagatgaacccggggtatgaagtagctccgaggtctgatagtgaagaaagtggctcagaagaagaggaagaggaggaggaggaagagcagccgcaggcagcacagcctcccaccctgcccgtggaggagaagaagaagattccagatccagacagcgatgacgtctctgaggtggacgcgcggcacatcattgagaatgccaagcaagatgtcgatgatgaatatggcgtgtcccaggcccttgcacgtggcctgcagtcctactatgccgtggcccatgctgtcactgagagagtggacaagcagtcagcgcttatggtcaatggtgtcctcaaacagtaccagatcaaaggtttggagtggctggtgtccctgtacaacaacaacctgaacggcatcctggccgacgagatgggcctggggaagaccatccagaccatcgcgctcatcacgtacctcatggagcacaaacgcatcaatgggcccttcctcatcatcgtgcctctctcaacgctgtccaactgggcgtacgagtttgacaagtgggccccctccgtggtgaaggtgtcttacaagggatccccagcagcaagacgggcctttgtcccccagctccggagtgggaagttcaacgtcttgctgacgacgtacgagtacatcatcaaagacaagcacatcctcgccaagatccgttggaagtacatgattgtggacgaaggtcaccgcatgaagaaccaccactgcaagctgacgcaggtgctcaacacgcactatgtggcaccccgccgcctgctgctgacgggcacaccgctgcagaacaagcttcccgagctctgggcgctgctcaacttcctgctgcccaccatcttcaagagctgcagcaccttcgagcagtggtttaacgcaccctttgccatgaccggggaaaaggtggacctgaatgaggaggaaaccattctcatcatccggcgtctccacaaagtgctgcggcccttcttgctccgacgactcaagaaggaagtcgaggcccagttgcccgaaaaggtggagtacgtcatcaagtgcgacatgtctgcgctgcagcgagtgctctaccgccacatgcaggccaagggcgtgctgctgactgatggctccgagaaggacaagaagggcaaaggcggcaccaagaccctgatgaacaccatcatgcagctgcggaagatctgcaaccacccctacatgttccagcacatcgaggagtccttttccgagcacttggggttcactggcggcattgtccaagggctggacctgtaccgagcctcgggtaaatttgagcttcttgatagaattcttcccaaactccgagcaaccaaccacaaagtgctgctgttctgccaaatgacctccctcatgaccatcatggaagattactttgcgtatcgcggctttaaatacctcaggcttgatggaaccacgaaggcggaggaccggggcatgctgctgaaaaccttcaacgagcccggctctgagtacttcatcttcctgctcagcacccgggctggggggctcggcctgaacctccagtcggcagacactgtgatcatttttgacagcgactggaatcctcaccaggacctgcaagcgcaggaccgagcccaccgcatcgggcagcagaacgaggtgcgtgtgctccgcctctgcaccgtcaacagcgtggaggagaagatcctagctgcagccaagtacaagctcaacgtggaccagaaggtgatccaggccggcatgttcgaccagaagtcctccagccatgagcggcgcgccttcctgcaggccatcctggagcacgaggagcaggatgaggaggaagacgaggtgcccgacgacgagaccgtcaaccagatgatcgcccggcacgaggaggagtttgatctgttcatgcgcatggacctggaccgcaggcgcgaggaggcccgcaaccccaagcggaagccgcgcctcatggaggaggacgagctcccctcgtggatcatcaaggacgacgcggaggtggagcggctgacctgtgaggaggaggaggagaagatgttcggccgtggctcccgccaccgcaaggaggtggactacagcgactcactgacggagaagcagtggctcaagaccctgaaggccatcgaggagggcacgctggaggagatcgaagaggaggtccggcagaagaaatcatcacggaagcgcaagcgagacagcgacgccggctcctccaccccgaccaccagcacccgcagccgcgacaaggacgacgagagcaagaagcagaagaagcgcgggcggccgcctgccgagaaactctcccctaacccacccaacctcaccaagaagatgaagaagattgtggatgccgtgatcaagtacaaggacagcagtggacgtcagctcagcgaggtcttcatccagctgccctcgcgaaaggagctgcccgagtactacgagctcatccgcaagcccgtggacttcaagaagataaaggagcgcattcgcaaccacaagtaccgcagcctcaacgacctagagaaggacgtcatgctcctgtgccagaacgcacagaccttcaacctggagggctccctgatctatgaagactccatcgtcttgcagtcggtcttcaccagcgtgcggcagaaaatcgagaaggaggatgacagtgaaggcgaggagagtgaggaggaggaagagggcgaggaggaaggctccgaatccgaatctcggtccgtcaaagtgaagatcaagcttggccggaaggagaaggcacaggaccggctgaagggcggccggcggcggccgagccgagggtcccgagccaagccggtcgtgagtgacgatgacagtgaggaggaacaagaggaggaccgctcaggaagtggcagcgaagaagactagtaatgaactagtccgtaacttgaaagtatttcgatttcttggctttatatatcttgtggaaaggacgacatctcccactatctggttgagga

SEQ ID NO: 481 - DNA, 602 bp, Homo sapiens
  source 1..602: mol_type = genomic DNA
accgccaccatggcggcctatccggagagctgcgtggacactacggtgctggacttcgtcgcagacctgtccctggcctccccgagacgccctctcctctgcgacttcgcacccggggtctccttgggggacccagcccttgcgctccgagagggaagacccaggaggatggcgcggtttgaagagggggacccagaagaagaggagtgcgaagtggaccagggggacggagaagaggaggaggaagaggagcgcggaagaggtgtctccctattaggccgccccaagaggaaaagggtgatcacctacgcccagcgccaggccgccaacatccgcgaaaggaagcggatgttcaacctcaacgaggcctttgaccagctgcggaggaaggtgcccacgtttgcttacgagaaaaggctgtcccggatcgagaccctccgcctggccatcgtctatatctccttcatgaccgagctcttggagagctgtgagaagaaggaaagcggctagtaatgaactagtccgtaacttgaaagtatttcgatttcttggctttatatatcttgtggaaaggacgatatctatgtctcagccgacgtgtc

SEQ ID NO: 482 - DNA, 2162 bp, Homo sapiens
  source 1..2162: mol_type = genomic DNA
accgccaccatggaggtggtaacatttggcgatgtggctgtgcacttctctcgggaggagtggcagtgtctggaccctggccagagggccctctacagggaagtgatgctggagaaccacagcagtgtggctggactagcaggattcctggttttcaagcctgagctgatctctcggctggagcagggagaagagccatgggtcctcgacctgcagggagcagaggggacagaggcaccaaggacctccaagacagattctacgattaggactgaaaatgagcaggcctgtgaggacatggacatcctaaaatcagaatcctatgggacagtggtcagaatctccccacaggactttcctcagaatcctggctttggagacgtttctgattctgaggtctggttagacagtcatctgggcagtcccgggctgaaagtgacaggctttaccttccaaaataactgtttgaatgaggagactgtggttcccaagaccttcaccaaggacgcaccccagggatgtaaggagctgggaagcagcggcctggattgtcagcctcttgaaagtcagggagagagtgcggaagggatgtcccagagatgcgaggagtgtggcaaaggcatcagagccacttcagatatcgctctgcattgggaaattaatacacagaaaattagcagatgtcaagaatgccaaaaaaagttatctgactgcttgcaggggaaacatacaaataactgccatggagagaagccgtacgaatgtgcagagtgtgggaaagtcttcaggctctgctcgcagcttaatcagcatcagagaatccacacgggagagaaaccctttaaatgcactgagtgtggaaaagccttccgcctgagctcaaaacttattcagcatcaaagaatccacactggggagaagccctacagatgtgaggaatgtggaaaagcttttggtcagagctcaagcctcatccaccatcagagaatccacacaggagagaggccctatggttgtcgtgagtgtgggaaagccttcagccagcagtcgcagctggttagacaccagagaactcacactggggagaggccctacccttgcaaggagtgtgggaaggccttcagccagagctccaccctagcccagcatcaaaggatgcatactggggagaaagctcaaattctaaaagcctcagacagtccaagccttgttgcacatcagagaattcacgctgtagagaaaccatttaagtgtgatgagtgtgggaaagcttttaggtggatctctcgcctgagtcagcatcagctgattcacactggagagaagccttataaatgcaacaagtgtacaaaagcctttggttgtagttcacggcttattcgccatcagagaactcacactggagaaaaaccatttaaatgtgatgagtgtggcaaaggctttgttcagggctcacaccttattcagcatcagcgaatccacactggagagaaaccctatgtgtgtaatgactgtggaaaagccttcagtcagagttccagccttatttaccatcagagaatccataaaggagagaagccctacgaatgcctccaatgcggaaaagccttcagtatgagcacacagcttacaatacatcaaagggttcacactggagagaggccctataaatgtaatgaatgtgggaaagccttcagtcaaaactcaacccttttccaacaccagataattcatgcaggggtgaagccctatgagtgcagtgagtgtggaaaagccttcagccggagctcatatcttattgaacaccagagaatacacactagggcccagtggttttacgaatatgggaatgccctggaagggtccacctttgtgagccgtaaaaaggttaatactataaagaaactgcatcagtgtgaagactgtgagaagatatttaggtggcgttcacacctaattatacaccagagaattcacaccggggagaagccttataaatgcaatgactgtggcaaagcttttaatcgtagctcaaggcttacccagcatcaaaaaattcacatgggatagtaatgaactagtccgtaacttgaaagtatttcgatttcttggctttatatatcttgtggaaaggacgaaattgtgggcgcaaaccacagcac

SEQ ID NO: 483 - DNA, 2195 bp, Homo sapiens
  source 1..2195: mol_type = genomic DNA
accgccaccatgggattcctggggtgctggtgtgtgtcctttcaggaggtggtaacatttggcgatgtggctgtgcacttctctcgggaggagtggcagtgtctggaccctggccagagggccctctacagggaagtgatgctggagaaccacagcagtgtggctggactagcaggattcctggttttcaagcctgagctgatctctcggctggagcagggagaagagccatgggtcctcgacctgcagggagcagaggggacagaggcaccaaggacctccaagacagattctacgattaggactgaaaatgagcaggcctgtgaggacatggacatcctaaaatcagaatcctatgggacagtggtcagaatctccccacaggactttcctcagaatcctggctttggagacgtttctgattctgaggtctggttagacagtcatctgggcagtcccgggctgaaagtgacaggctttaccttccaaaataactgtttgaatgaggagactgtggttcccaagaccttcaccaaggacgcaccccagggatgtaaggagctgggaagcagcggcctggattgtcagcctcttgaaagtcagggagagagtgcggaagggatgtcccagagatgcgaggagtgtggcaaaggcatcagagccacttcagatatcgctctgcattgggaaattaatacacagaaaattagcagatgtcaagaatgccaaaaaaagttatctgactgcttgcaggggaaacatacaaataactgccatggagagaagccgtacgaatgtgcagagtgtgggaaagtcttcaggctctgctcgcagcttaatcagcatcagagaatccacacgggagagaaaccctttaaatgcactgagtgtggaaaagccttccgcctgagctcaaaacttattcagcatcaaagaatccacactggggagaagccctacagatgtgaggaatgtggaaaagcttttggtcagagctcaagcctcatccaccatcagagaatccacacaggagagaggccctatggttgtcgtgagtgtgggaaagccttcagccagcagtcgcagctggttagacaccagagaactcacactggggagaggccctacccttgcaaggagtgtgggaaggccttcagccagagctccaccctagcccagcatcaaaggatgcatactggggagaaagctcaaattctaaaagcctcagacagtccaagccttgttgcacatcagagaattcacgctgtagagaaaccatttaagtgtgatgagtgtgggaaagcttttaggtggatctctcgcctgagtcagcatcagctgattcacactggagagaagccttataaatgcaacaagtgtacaaaagcctttggttgtagttcacggcttattcgccatcagagaactcacactggagaaaaaccatttaaatgtgatgagtgtggcaaaggctttgttcagggctcacaccttattcagcatcagcgaatccacactggagagaaaccctatgtgtgtaatgactgtggaaaagccttcagtcagagttccagccttatttaccatcagagaatccataaaggagagaagccctacgaatgcctccaatgcggaaaagccttcagtatgagcacacagcttacaatacatcaaagggttcacactggagagaggccctataaatgtaatgaatgtgggaaagccttcagtcaaaactcaacccttttccaacaccagataattcatgcaggggtgaagccctatgagtgcagtgagtgtggaaaagccttcagccggagctcatatcttattgaacaccagagaatacacactagggcccagtggttttacgaatatgggaatgccctggaagggtccacctttgtgagccgtaaaaaggttaatactataaagaaactgcatcagtgtgaagactgtgagaagatatttaggtggcgttcacacctaattatacaccagagaattcacaccggggagaagccttataaatgcaatgactgtggcaaagcttttaatcgtagctcaaggcttacccagcatcaaaaaattcacatgggatagtaatgaactagtccgtaacttgaaagtatttcgatttcttggctttatatatcttgtggaaaggacgatgaacaagtactccgttaggagag

SEQ ID NO: 484 - DNA, 581 bp, Homo sapiens
  source 1..581: mol_type = genomic DNA
accgccaccatgggattcctggggtgctggtgtgtgtcctttcaggaggtggtaacatttggcgatgtggctgtgcacttctctcgggaggagtggcagtgtctggaccctggccagagggccctctacagggaagtgatgctggagaaccacagcagtgtggctggactagcaggattcctggttttcaagcctgagctgatctctcggctggagcagggagaagagccatgggtcctcgacctgcagggagcagaggggacagaggcaccaaggacctccaagacaggctttctgggccgcccaaccatgggacaagagccaaggcacccacatgcaccgcctgcaactcctgttcctggccttccaaaacactgctcacaaagactgaccctgcctcctcctgggctctcgtcatctcctcttggccacttcctggttcatgatcaggacagaaggaggggaacgtcagccatatggatggtctagtaatgaactagtccgtaacttgaaagtatttcgatttcttggctttatatatcttgtggaaaggacgacagaaggctatagtgtactcaaga

SEQ ID NO: 485 - DNA, 548 bp, Homo sapiens
  source 1..548: mol_type = genomic DNA
accgccaccatggaggtggtaacatttggcgatgtggctgtgcacttctctcgggaggagtggcagtgtctggaccctggccagagggccctctacagggaagtgatgctggagaaccacagcagtgtggctggactagcaggattcctggttttcaagcctgagctgatctctcggctggagcagggagaagagccatgggtcctcgacctgcagggagcagaggggacagaggcaccaaggacctccaagacaggctttctgggccgcccaaccatgggacaagagccaaggcacccacatgcaccgcctgcaactcctgttcctggccttccaaaacactgctcacaaagactgaccctgcctcctcctgggctctcgtcatctcctcttggccacttcctggttcatgatcaggacagaaggaggggaacgtcagccatatggatggtctagtaatgaactagtccgtaacttgaaagtatttcgatttcttggctttatatatcttgtggaaaggacgaattgtcttcggaacaacgaagacg

SEQ ID NO: 486 - DNA, 1874 bp, Homo sapiens
  source 1..1874: mol_type = genomic DNA
accgccaccatggacatcctaaaatcagaatcctatgggacagtggtcagaatctccccacaggactttcctcagaatcctggctttggagacgtttctgattctgaggtctggttagacagtcatctgggcagtcccgggctgaaagtgacaggctttaccttccaaaataactgtttgaatgaggagactgtggttcccaagaccttcaccaaggacgcaccccagggatgtaaggagctgggaagcagcggcctggattgtcagcctcttgaaagtcagggagagagtgcggaagggatgtcccagagatgcgaggagtgtggcaaaggcatcagagccacttcagatatcgctctgcattgggaaattaatacacagaaaattagcagatgtcaagaatgccaaaaaaagttatctgactgcttgcaggggaaacatacaaataactgccatggagagaagccgtacgaatgtgcagagtgtgggaaagtcttcaggctctgctcgcagcttaatcagcatcagagaatccacacgggagagaaaccctttaaatgcactgagtgtggaaaagccttccgcctgagctcaaaacttattcagcatcaaagaatccacactggggagaagccctacagatgtgaggaatgtggaaaagcttttggtcagagctcaagcctcatccaccatcagagaatccacacaggagagaggccctatggttgtcgtgagtgtgggaaagccttcagccagcagtcgcagctggttagacaccagagaactcacactggggagaggccctacccttgcaaggagtgtgggaaggccttcagccagagctccaccctagcccagcatcaaaggatgcatactggggagaaagctcaaattctaaaagcctcagacagtccaagccttgttgcacatcagagaattcacgctgtagagaaaccatttaagtgtgatgagtgtgggaaagcttttaggtggatctctcgcctgagtcagcatcagctgattcacactggagagaagccttataaatgcaacaagtgtacaaaagcctttggttgtagttcacggcttattcgccatcagagaactcacactggagaaaaaccatttaaatgtgatgagtgtggcaaaggctttgttcagggctcacaccttattcagcatcagcgaatccacactggagagaaaccctatgtgtgtaatgactgtggaaaagccttcagtcagagttccagccttatttaccatcagagaatccataaaggagagaagccctacgaatgcctccaatgcggaaaagccttcagtatgagcacacagcttacaatacatcaaagggttcacactggagagaggccctataaatgtaatgaatgtgggaaagccttcagtcaaaactcaacccttttccaacaccagataattcatgcaggggtgaagccctatgagtgcagtgagtgtggaaaagccttcagccggagctcatatcttattgaacaccagagaatacacactagggcccagtggttttacgaatatgggaatgccctggaagggtccacctttgtgagccgtaaaaaggttaatactataaagaaactgcatcagtgtgaagactgtgagaagatatttaggtggcgttcacacctaattatacaccagagaattcacaccggggagaagccttataaatgcaatgactgtggcaaagcttttaatcgtagctcaaggcttacccagcatcaaaaaattcacatgggatagtaatgaactagtccgtaacttgaaagtatttcgatttcttggctttatatatcttgtggaaaggacgaccacagctcccggctgttagtagc

SEQ ID NO: 487 - DNA, 1139 bp, Homo sapiens
  source 1..1139: mol_type = genomic DNA
accgccaccatgctggagaactataacagcattgtgtcattggactgggaaactaagcctgagattcacgatgcttcagacaaaaaatcagaaggatcattgagggaatgccttggaaggcaaagtcctctgtgtcctaaatttgaagttcatacacccaatggcaggatgggaacagaaaagcaaagcccttcaggggagactcgtaagaaatccctctcccgggacaaaggcttgcggcgacggtcagccctgtccagggaaattctcactaaagagagacaccaggaatgcagtgactgtgggaagaccttttttgaccactcatccctcacccgccatcagaggactcacactggggagaagccctacgactgccgcgagtgtgggaaagccttcagccacaggagcagcctcagcagacatctgatgtcacacactggggagagcccctacgagtgcagtgtgtgctcaaaagccttctttgaccgttcgtccctaactgtccatcagcgaattcacactggagagaaaccctttcagtgcaacgagtgtggaaaagccttttttgaccgttcatcccttactcgacaccagagaattcacactggagaaagtccttatgaatgtcatcagtgtgggaaagcctttagccagaaaagtattcttactcgccatcagctaatccacactggcaggaagccttatgagtgtaacgagtgcgggaaagctttctatggtgtctcgtctctgaatagacatcagaaagctcatgctggggaccctcgctatcagtgtaacgagtgtggcaaagctttctttgaccgctcatcccttacacagcatcagaagatccacactggagacaagccatatgaatgcagcgaatgcgggaaagcctttagccagcggtgccggctcacgcggcatcagcgtgtccacacgggagagaagccctttgaatgcactgtgtgtgggaaagttttcagttcaaaatcttctgttattcaacatcaacggcgttacgccaaacagggaatagactagtaatgaactagtccgtaacttgaaagtatttcgatttcttggctttatatatcttgtggaaaggacgactactctggtgattcacggctcaa

SEQ ID NO: 488 - DNA, 1418 bp, Homo sapiens
  source 1..1418: mol_type = genomic DNA
accgccaccatggctgctgtgtctccgaccaccagatgccaggaatcagtgacattcgaagacgttgccgtggttttcacagatgaagagtggagtcgtctggtccccatacagagggacctctacaaggaggtgatgctggagaactataacagcattgtgtcattgggccttccagttcctcaacctgatgtgattttccaattgaagagaggggacaagccgtggatggtagatcttcatgggtctgaggagagagaatggccagagagtgtctctctagcccaggaaaaaaactgcatctgttttctgtttgttccagactgggaaactaagcctgagattcacgatgcttcagacaaaaaatcagaaggatcattgagggaatgccttggaaggcaaagtcctctgtgtcctaaatttgaagttcatacacccaatggcaggatgggaacagaaaagcaaagcccttcaggggagactcgtaagaaatccctctcccgggacaaaggcttgcggcgacggtcagccctgtccagggaaattctcactaaagagagacaccaggaatgcagtgactgtgggaagaccttttttgaccactcatccctcacccgccatcagaggactcacactggggagaagccctacgactgccgcgagtgtgggaaagccttcagccacaggagcagcctcagcagacatctgatgtcacacactggggagagcccctacgagtgcagtgtgtgctcaaaagccttctttgaccgttcgtccctaactgtccatcagcgaattcacactggagagaaaccctttcagtgcaacgagtgtggaaaagccttttttgaccgttcatcccttactcgacaccagagaattcacactggagaaagtccttatgaatgtcatcagtgtgggaaagcctttagccagaaaagtattcttactcgccatcagctaatccacactggcaggaagccttatgagtgtaacgagtgcgggaaagctttctatggtgtctcgtctctgaatagacatcagaaagctcatgctggggaccctcgctatcagtgtaacgagtgtggcaaagctttctttgaccgctcatcccttacacagcatcagaagatccacactggagacaagccatatgaatgcagcgaatgcgggaaagcctttagccagcggtgccggctcacgcggcatcagcgtgtccacacgggagagaagccctttgaatgcactgtgtgtgggaaagttttcagttcaaaatcttctgttattcaacatcaacggcgttacgccaaacagggaatagactagtaatgaactagtccgtaacttgaaagtatttcgatttcttggctttatatatcttgtggaaaggacgaccttaagcggtgtgttcttgccat

SEQ ID NO: 489 - DNA, 1253 bp, Homo sapiens
  source 1..1253: mol_type = genomic DNA
accgccaccatgctggagaactataacagcattgtgtcattgggccttccagttcctcaacctgatgtgattttccaattgaagagaggggacaagccgtggatggtagatcttcatgggtctgaggagagagaatggccagagagtgtctctctagactgggaaactaagcctgagattcacgatgcttcagacaaaaaatcagaaggatcattgagggaatgccttggaaggcaaagtcctctgtgtcctaaatttgaagttcatacacccaatggcaggatgggaacagaaaagcaaagcccttcaggggagactcgtaagaaatccctctcccgggacaaaggcttgcggcgacggtcagccctgtccagggaaattctcactaaagagagacaccaggaatgcagtgactgtgggaagaccttttttgaccactcatccctcacccgccatcagaggactcacactggggagaagccctacgactgccgcgagtgtgggaaagccttcagccacaggagcagcctcagcagacatctgatgtcacacactggggagagcccctacgagtgcagtgtgtgctcaaaagccttctttgaccgttcgtccctaactgtccatcagcgaattcacactggagagaaaccctttcagtgcaacgagtgtggaaaagccttttttgaccgttcatcccttactcgacaccagagaattcacactggagaaagtccttatgaatgtcatcagtgtgggaaagcctttagccagaaaagtattcttactcgccatcagctaatccacactggcaggaagccttatgagtgtaacgagtgcgggaaagctttctatggtgtctcgtctctgaatagacatcagaaagctcatgctggggaccctcgctatcagtgtaacgagtgtggcaaagctttctttgaccgctcatcccttacacagcatcagaagatccacactggagacaagccatatgaatgcagcgaatgcgggaaagcctttagccagcggtgccggctcacgcggcatcagcgtgtccacacgggagagaagccctttgaatgcactgtgtgtgggaaagttttcagttcaaaatcttctgttattcaacatcaacggcgttacgccaaacagggaatagactagtaatgaactagtccgtaacttgaaagtatttcgatttcttggctttatatatcttgtggaaaggacgatcgtgtcgagtggagttgatgttt

SEQ ID NO: 490 - DNA, 1265 bp, Homo sapiens
  source 1..1265: mol_type = genomic DNA
accgccaccatggctgctgtgtctccgaccaccagatgccaggaatcagtgacattcgaagacgttgccgtggttttcacagatgaagagtggagtcgtctggtccccatacagagggacctctacaaggaggtgatgctggagaactataacagcattgtgtcattggactgggaaactaagcctgagattcacgatgcttcagacaaaaaatcagaaggatcattgagggaatgccttggaaggcaaagtcctctgtgtcctaaatttgaagttcatacacccaatggcaggatgggaacagaaaagcaaagcccttcaggggagactcgtaagaaatccctctcccgggacaaaggcttgcggcgacggtcagccctgtccagggaaattctcactaaagagagacaccaggaatgcagtgactgtgggaagaccttttttgaccactcatccctcacccgccatcagaggactcacactggggagaagccctacgactgccgcgagtgtgggaaagccttcagccacaggagcagcctcagcagacatctgatgtcacacactggggagagcccctacgagtgcagtgtgtgctcaaaagccttctttgaccgttcgtccctaactgtccatcagcgaattcacactggagagaaaccctttcagtgcaacgagtgtggaaaagccttttttgaccgttcatcccttactcgacaccagagaattcacactggagaaagtccttatgaatgtcatcagtgtgggaaagcctttagccagaaaagtattcttactcgccatcagctaatccacactggcaggaagccttatgagtgtaacgagtgcgggaaagctttctatggtgtctcgtctctgaatagacatcagaaagctcatgctggggaccctcgctatcagtgtaacgagtgtggcaaagctttctttgaccgctcatcccttacacagcatcagaagatccacactggagacaagccatatgaatgcagcgaatgcgggaaagcctttagccagcggtgccggctcacgcggcatcagcgtgtccacacgggagagaagccctttgaatgcactgtgtgtgggaaagttttcagttcaaaatcttctgttattcaacatcaacggcgttacgccaaacagggaatagactagtaatgaactagtccgtaacttgaaagtatttcgatttcttggctttatatatcttgtggaaaggacgatagtttaactgcaatagcccgttc

SEQ ID NO: 491 - DNA, 1379 bp, Homo sapiens
  source 1..1379: mol_type = genomic DNA
accgccaccatggctgctgtgtctccgaccaccagatgccaggaatcagtgacattcgaagacgttgccgtggttttcacagatgaagagtggagtcgtctggtccccatacagagggacctctacaaggaggtgatgctggagaactataacagcattgtgtcattgggccttccagttcctcaacctgatgtgattttccaattgaagagaggggacaagccgtggatggtagatcttcatgggtctgaggagagagaatggccagagagtgtctctctagactgggaaactaagcctgagattcacgatgcttcagacaaaaaatcagaaggatcattgagggaatgccttggaaggcaaagtcctctgtgtcctaaatttgaagttcatacacccaatggcaggatgggaacagaaaagcaaagcccttcaggggagactcgtaagaaatccctctcccgggacaaaggcttgcggcgacggtcagccctgtccagggaaattctcactaaagagagacaccaggaatgcagtgactgtgggaagaccttttttgaccactcatccctcacccgccatcagaggactcacactggggagaagccctacgactgccgcgagtgtgggaaagccttcagccacaggagcagcctcagcagacatctgatgtcacacactggggagagcccctacgagtgcagtgtgtgctcaaaagccttctttgaccgttcgtccctaactgtccatcagcgaattcacactggagagaaaccctttcagtgcaacgagtgtggaaaagccttttttgaccgttcatcccttactcgacaccagagaattcacactggagaaagtccttatgaatgtcatcagtgtgggaaagcctttagccagaaaagtattcttactcgccatcagctaatccacactggcaggaagccttatgagtgtaacgagtgcgggaaagctttctatggtgtctcgtctctgaatagacatcagaaagctcatgctggggaccctcgctatcagtgtaacgagtgtggcaaagctttctttgaccgctcatcccttacacagcatcagaagatccacactggagacaagccatatgaatgcagcgaatgcgggaaagcctttagccagcggtgccggctcacgcggcatcagcgtgtccacacgggagagaagccctttgaatgcactgtgtgtgggaaagttttcagttcaaaatcttctgttattcaacatcaacggcgttacgccaaacagggaatagactagtaatgaactagtccgtaacttgaaagtatttcgatttcttggctttatatatcttgtggaaaggacgatttcgaccatccgagccgcataag

SEQ ID NO: 492 - DNA, 497 bp, Homo sapiens
  source 1..497: mol_type = genomic DNA
accgccaccatggaaactcaggctgatctcgtatctcaggaacctcaggccctgcttgacagtgctcttccttcaaaagttcctgccttttccgacaaggacagcctgggggatgagatgttggcggctgcgctcctaaaggccaagtcccaggagctggtaacctttgaggatgtagctgtgtacttcatccggaaggagtggaagcgtttggaacctgctcagagggacctctatagagatgtgatgctggagaattacgggaatgtgttctcactggactggatacacgtctgtttaactacgcaaaaggtaatgctggcatggcttactgggaccctaagtgtggcgaagggactctgctccagtgaactggcgagtgtggaacctcctgacaccttctagtaatgaactagtccgtaacttgaaagtatttcgatttcttggctttatatatcttgtggaaaggacgactgttagtaacgtcacgaaggtcg

SEQ ID NO: 493 - DNA, 1442 bp, Homo sapiens
  source 1..1442: mol_type = genomic DNA
accgccaccatggaaactcaggctgatctcgtatctcaggaacctcaggccctgcttgacagtgctcttccttcaaaagttcctgccttttccgacaaggacagcctgggggatgagatgttggcggctgcgctcctaaaggccaagtcccaggagctggtaacctttgaggatgtagctgtgtacttcatccggaaggagtggaagcgtttggaacctgctcagagggacctctatagagatgtgatgctggagaattacgggaatgtgttctcactggatcgtgagaccaggactgaaaatgatcaagaaatttctgaagacacaagatcacatggggtcctactgggaagatttcaaaaggatatttctcagggtctcaagtttaaagaagcctatgaacgagaagtcagtctgaaaaggccgctggggaactcccctggagaaagactgaacaggaaaatgccagattttggtcaagtgacagttgaggagaagctaacccccaggggagagagaagcgagaaatataatgattttgggaacagcttcactgtgaattccaaccttatctcacatcagagactccccgtgggagacagaccccataagtgtgatgaatgtagcaagagctttaatcgaacttcagaccttattcaacatcagagaatccacactggggaaaagccctatgaatgtaatgagtgtgggaaggccttcagccagagctcacaccttattcagcatcagagaatccacactggggaaaaaccttatgaatgtagtgattgtgggaaaaccttcagctgtagctctgccctcattctgcatcggaggatccacacgggggagaaaccctatgaatgtaatgagtgtgggaagaccttcagctggagctccaccctcacccaccatcagagaatccacactggtgagaaaccctacgcctgcaatgaatgtgggaaggccttcagcaggagctcaacccttattcaccatcagagaatccacactggagaaaaaccctatgaatgtaatgaatgtgggaaagccttcagccagagctcacacctctatcagcaccagagaatccacactggagagaagccctacgaatgtatggaatgtggaggaaagtttacctacagttcaggccttattcagcatcaaagaatccacaccggggagaacccctatgaatgtagtgagtgtgggaaagccttcaggtacagctcggctcttgttcgccatcagagaattcacactggagagaagcctttgaatgggatcggcatgagcaaaagctccctcagagttacgaccgagttaaatatcagagagtccacgtagtaatgaactagtccgtaacttgaaagtatttcgatttcttggctttatatatcttgtggaaaggacgaataggagttacctccgagtaaact

SEQ ID NO: 494 - DNA, 2204 bp, Homo sapiens
  source 1..2204: mol_type = genomic DNA
accgccaccatggcagccactgagatctctgtcctttctgagcaattcaccaagatcaaagaactcgagttgatgccggaaaaaggcctgaaggaggaggaaaaagacggagtgtgcagagagaaagaccatcggagccctagtgagttggaggccgagcgtacctctggggccttccaggacagcgtcctggaggaagaagtggagctggtgctggccccctcggaggagagcgagaagtacatcctgaccctgcagacggtgcacttcacttctgaagctgtggagttgcaggatatgagcttgctgagcatacagcagcaagaaggggtgcaggtggtggtgcaacagcctggccctgggttgctgtggcttgaggaagggccccggcagagcctgcagcagtgtgtggccattagtatccagcaagagctgtactccccgcaagagatggaggtgttgcagttccacgctctagaggagaatgtgatggtggccagtgaagacagtaagttagcggtgagcctggctgaaactactggactgatcaagctcgaggaagagcaggagaagaaccagttattggctgaaagaacaaaggagcagctcttttttgtggaaacaatgtcaggagatgaaagaagtgacgaaattgttctcacagtttcaaattcaaatgtggaagaacaagaggatcaacctacagctggtcaagcagatgctgaaaaggccaaatctacaaaaaatcaaagaaagacaaagggagcaaaaggaaccttccactgtgatgtctgcatgttcacctcttctagaatgtcaagttttaatcgtcatatgaaaactcacaccagtgagaagcctcacctgtgtcacctctgcctgaaaaccttccgtacggtcactctgctgcggaaccatgttaacacccacacaggaaccaggccctacaagtgtaacgactgcaacatggcatttgtcaccagtggagaactcgtccgacacaggcgctataaacatactcatgagaaaccctttaaatgttccatgtgcaagtatgccagtgtggaggcaagtaaattgaagcgccatgtccgatcccacactggggagcgcccctttcagtgttgccagtgcagctatgccagcagagatacctacaagctgaaacgccacatgagaacgcactcaggtgagaagccttacgaatgccacatctgccacacccgcttcacccagagcgggaccatgaaaatacatattctgcagaaacacggcgaaaatgtccccaaataccagtgtccccattgtgccaccatcattgcacggaaaagcgacctacgtgtgcatatgcgcaacttgcatgcttacagcgctgcagagctgaaatgccgctactgttctgctgtcttccatgaacgctatgccctcattcagcaccagaaaactcataagaatgagaagaggttcaagtgcaaacactgcagttatgcctgcaagcaggaacgtcatatgaccgctcacattcgtacccacactggagagaaaccattcacctgcctttcttgcaataaatgtttccgacagaagcaacttctaaacgctcacttcaggaaataccacgatgcaaatttcatcccgactgtttacaaatgctccaagtgtggcaaaggcttttcccgctggattaacctgcacagacattcggagaagtgtggatcaggggaagcaaagtcggctgcttcaggaaagggaagaagaacaagaaagaggaagcagaccatcctgaaggaagccacaaagggtcagaaggaagctgcgaagggatggaaggaagccgcgaacggagacgaagctgctgctgaggaggcttccaccacgaagggagaacagttcccaggagagatgtttcctgtcgcctgcagagaaaccacagccagagtcaaagaggaagtggatgaaggcgtgacctgtgaaatgctcctcaacacgatggataattccgcaggctgtacaggaaggatgatgttggtatctgcctggcttctggggaggcctcaggaaacttacaatcaaggcagaaggcgaagagggagtaggcgcgtcacatggtagtaatgaactagtccgtaacttgaaagtatttcgatttcttggctttatatatcttgtggaaaggacgagtgatcttacacgtgacgcatacc

SEQ ID NO: 495 - DNA, 2093 bp, Homo sapiens
  source 1..2093: mol_type = genomic DNA
accgccaccatggcagccactgagatctctgtcctttctgagcaattcaccaagatcaaagaactcgagttgatgccggaaaaaggcctgaaggaggaggaaaaagacggagtgtgcagagagaaagaccatcggagccctagtgagttggaggccgagcgtacctctggggccttccaggacagcgtcctggaggaagaagtggagctggtgctggccccctcggaggagagcgagaagtacatcctgaccctgcagacggtgcacttcacttctgaagctgtggagttgcaggatatgagcttgctgagcatacagcagcaagaaggggtgcaggtggtggtgcaacagcctggccctgggttgctgtggcttgaggaagggccccggcagagcctgcagcagtgtgtggccattagtatccagcaagagctgtactccccgcaagagatggaggtgttgcagttccacgctctagaggagaatgtgatggtggccagtgaagacagtaagttagcggtgagcctggctgaaactactggactgatcaagctcgaggaagagcaggagaagaaccagttattggctgaaagaacaaaggagcagctcttttttgtggaaacaatgtcaggagatgaaagaagtgacgaaattgttctcacagtttcaaattcaaatgtggaagaacaagaggatcaacctacagctggtcaagcagatgctgaaaaggccaaatctacaaaaaatcaaagaaagacaaagggagcaaaaggaaccttccactgtgatgtctgcatgttcacctcttctagaatgtcaagttttaatcgtcatatgaaaactcacaccagtgagaagcctcacctgtgtcacctctgcctgaaaaccttccgtacggtcactctgctgcggaaccatgttaacacccacacaggaaccaggccctacaagtgtaacgactgcaacatggcatttgtcaccagtggagaactcgtccgacacaggcgctataaacatactcatgagaaaccctttaaatgttccatgtgcaagtatgccagtgtggaggcaagtaaattgaagcgccatgtccgatcccacactggggagcgcccctttcagtgttgccagtgcagctatgccagcagagatacctacaagctgaaacgccacatgagaacgcactcaggtgagaagccttacgaatgccacatctgccacacccgcttcacccagagcgggaccatgaaaatacatattctgcagaaacacggcgaaaatgtccccaaataccagtgtccccattgtgccaccatcattgcacggaaaagcgacctacgtgtgcatatgcgcaacttgcatgcttacagcgctgcagagctgaaatgccgctactgttctgctgtcttccatgaacgctatgccctcattcagcaccagaaaactcataagaatgagaagaggttcaagtgcaaacactgcagttatgcctgcaagcaggaacgtcatatgaccgctcacattcgtacccacactggagagaaaccattcacctgcctttcttgcaataaatgtttccgacagaagcaacttctaaacgctcacttcaggaaataccacgatgcaaatttcatcccgactgtttacaaatgctccaagtgtggcaaaggcttttcccgctggattaacctgcacagacattcggagaagtgtggatcaggggaagcaaagtcggctgcttcaggaaagggaagaagaacaagaaagaggaagcagaccatcctgaaggaagccacaaagggtcagaaggaagctgcgaagggatggaaggaagccgcgaacggagacgaagctgctgctgaggaggcttccaccacgaagggagaacagttcccaggagagatgtttcctgtcgcctgcagagaaaccacagccagagtcaaagaggaagtggatgaaggcgtgacctgtgaaatgctcctcaacacgatggataagtagtaatgaactagtccgtaacttgaaagtatttcgatttcttggctttatatatcttgtggaaaggacgattcttcgtcagtgacatcgtcctc

SEQ ID NO: 496 - DNA, 1316 bp, Homo sapiens
  source 1..1316: mol_type = genomic DNA
accgccaccatggcagccactgagatctctgtcctttctgagcaattcaccaagatcaaagaactcgagttgatgccggaaaaaggcctgaaggaggaggaaaaagacggagtgtgcagagagaaagaccatcggagccctagtgagttggaggccgagcgtacctctggggccttccaggacagcgtcctggaggaagaagtggagctggtgctggccccctcggaggagagcgagaagtacatcctgaccctgcagacggtgcacttcacttctgaagctgtggagttgcaggatatgagcttgctgagcatacagcagcaagaaggggtgcaggtggtggtgcaacagcctggccctgggttgctgtggcttgaggaagggccccggcagagcctgcagcagtgtgtggccattagtatccagcaagagctgtactccccgcaagagatggaggtgttgcagttccacgctctagaggagaatgtgatggtggccagtgaagacagtaagttagcggtgagcctggctgaaactactggactgatcaagctcgaggaagagcaggagaagaaccagttattggctgaaagaacaaaggagcagctcttttttgtggaaacaatgtcaggagatgaaagaagtgacgaaattgttctcacagtttcaaattcaaatgtggaagaacaagaggatcaacctacagctggtcaagcagatgctgaaaaggccaaatctacaaaaaatcaaagaaagacaaagggagcaaaaggaaccttccactgtgatgtctgcatgttcacctcttctagaatgtcaagttttaatcgtcatatgaaaactcacaccagtgagaagcctcacctgtgtcacctctgcctgaaaaccttccgtacggtcactctgctgcggaaccatgttaacacccacacaggaaccaggccctacaagtgtaacgactgcaacatggcatttgtcaccagtggagaactcgtccgacacaggcgctataaacatactcatgagaaaccctttaaatgttccatgtgcaagtatgccagtgtggaggtaaagccattcttggacttgaagcttcatggcatcttagtagaggctgctgtacaagttactccaagtgtaactaacagtagaatctgttacaaacaggctttttattattcatataaaatttatgcaggaaataatatgcattctcttttatagtaatgaactagtccgtaacttgaaagtatttcgatttcttggctttatatatcttgtggaaaggacgatgggtgggagtaggcattcctact

SEQ ID NO: 497 - DNA, 1484 bp, Homo sapiens
  source 1..1484: mol_type = genomic DNA
accgccaccatgtcaggagatgaaagaagtgacgaaattgttctcacagtttcaaattcaaatgtggaagaacaagaggatcaacctacagctggtcaagcagatgctgaaaaggccaaatctacaaaaaatcaaagaaagacaaagggagcaaaaggaaccttccactgtgatgtctgcatgttcacctcttctagaatgtcaagttttaatcgtcatatgaaaactcacaccagtgagaagcctcacctgtgtcacctctgcctgaaaaccttccgtacggtcactctgctgcggaaccatgttaacacccacacaggaaccaggccctacaagtgtaacgactgcaacatggcatttgtcaccagtggagaactcgtccgacacaggcgctataaacatactcatgagaaaccctttaaatgttccatgtgcaagtatgccagtgtggaggcaagtaaattgaagcgccatgtccgatcccacactggggagcgcccctttcagtgttgccagtgcagctatgccagcagagatacctacaagctgaaacgccacatgagaacgcactcaggtgagaagccttacgaatgccacatctgccacacccgcttcacccagagcgggaccatgaaaatacatattctgcagaaacacggcgaaaatgtccccaaataccagtgtccccattgtgccaccatcattgcacggaaaagcgacctacgtgtgcatatgcgcaacttgcatgcttacagcgctgcagagctgaaatgccgctactgttctgctgtcttccatgaacgctatgccctcattcagcaccagaaaactcataagaatgagaagaggttcaagtgcaaacactgcagttatgcctgcaagcaggaacgtcatatgaccgctcacattcgtacccacactggagagaaaccattcacctgcctttcttgcaataaatgtttccgacagaagcaacttctaaacgctcacttcaggaaataccacgatgcaaatttcatcccgactgtttacaaatgctccaagtgtggcaaaggcttttcccgctggattaacctgcacagacattcggagaagtgtggatcaggggaagcaaagtcggctgcttcaggaaagggaagaagaacaagaaagaggaagcagaccatcctgaaggaagccacaaagggtcagaaggaagctgcgaagggatggaaggaagccgcgaacggagacggtgtgatctcagctcaccgcaacctctgcctcctgggttcaagtgattctcatgcctcagtctccggagctgggattacagatgcccgccaccacgcctggctaattgttctattatttttagtagagatggggttttaccatgtctctcactcctagtaatgaactagtccgtaacttgaaagtatttcgatttcttggctttatatatcttgtggaaaggacgatactcatacagtctacagtgcaca

SEQ ID NO: 498 - DNA, 1553 bp, Homo sapiens
  source 1..1553: mol_type = genomic DNA
accgccaccatggcagccactgagatctctgtcctttctgagcaattcaccaagatcaaagaactcgagttgatgccggaaaaaggcctgaaggaggaggaaaaagacggagtgtgcagagagaaagaccatcggagccctagtgagttggaggccgagcgtacctctggggccttccaggacagcgtcctggaggaagaagtggagctggtgctggccccctcggaggagagcgagaagtacatcctgaccctgcagacggtgcacttcacttctgaagctgtggagttgcaggatatgagcttgctgagcatacagcagcaagaaggggtgcaggtggtggtgcaacagcctggccctgggttgctgtggcttgaggaagggccccggcagagcctgcagcagtgtgtggccattagtatccagcaagagctgtactccccgcaagagatggaggtgttgcagttccacgctctagaggagaatgtgatggtggccagtgaagacagtaagttagcggtgagcctggctgaaactactggactgatcaagctcgaggaagagcaggagaagaaccagttattggctgaaagaacaaaggagcagctcttttttgtggaaacaatgtcaggagatgaaagaagtgacgaaattgttctcacagtttcaaattcaaatgtggaagaacaagaggatcaacctacagctggtcaagcagatgctgaaaaggccaaatctacaaaaaatcaaagaaagacaaagggagcaaaaggaaccttccactgtgatgtctgcatgttcacctcttctagaatgtcaagttttaatcgtcatatgaaaactcacaccagtgagaagcctcacctgtgtcacctctgcctgaaaaccttccgtacggtcactctgctgcggaaccatgttaacacccacacaggaaccaggccctacaagtgtaacgactgcaacatggcatttgtcaccagtggagaactcgtccgacacaggcgctataaacatactcatgagaaaccctttaaatgttccatgtgcaagtatgccagtgtggaggaacgtcatatgaccgctcacattcgtacccacactggagagaaaccattcacctgcctttcttgcaataaatgtttccgacagaagcaacttctaaacgctcacttcaggaaataccacgatgcaaatttcatcccgactgtttacaaatgctccaagtgtggcaaaggcttttcccgctggattctctgggttgggaactcggaagtggctgaactgggtggtcctggctcagggccactcctgaggctgcagtcaggatgtccgccagggctgcatcatccgaaggctggactggggccagaggatccacttccaggacagctccgccacacaactgctggcaccggcctcagttccttgctacagggacctctctgcagggctgcttagtaatgaactagtccgtaacttgaaagtatttcgatttcttggctttatatatcttgtggaaaggacgatttgcagcgaaccgagagtttcgc

SEQ ID NO: 499 - DNA, 1943 bp, Homo sapiens
  source 1..1943: mol_type = genomic DNA
accgccaccatggcagccactgagatctctgtcctttctgagcaattcaccaagatcaaagaactcgagttgatgccggaaaaaggcctgaaggaggaggaaaaagacggagtgtgcagagagaaagaccatcggagccctagtgagttggaggccgagcgtacctctggggccttccaggacagcgtcctggaggaagaagtggagctggtgctggccccctcggaggagagcgagaagtacatcctgaccctgcagacggtgcacttcacttctgaagctgtggagttgcaggatatgagcttgctgagcatacagcagcaagaaggggtgcaggtggtggtgcaacagcctggccctgggttgctgtggcttgaggaagggccccggcagagcctgcagcagtgtgtggccattagtatccagcaagagctgtactccccgcaagagatggaggtgttgcagttccacgctctagaggagaatgtgatggtggccagtgaagacagtaagttagcggtgagcctggctgaaactactggactgatcaagctcgaggaagagcaggagaagaaccagttattggctgaaagaacaaaggagcagctcttttttgtggaaacaatgtcaggagatgaaagaagtgacgaaattgttctcacagtttcaaattcaaatgtggaagaacaagaggatcaacctacagctggtcaagcagatgctgaaaaggccaaatctacaaaaaatcaaagaaagacaaagggagcaaaaggaaccttccactgtgatgtctgcatgttcacctcttctagaatgtcaagttttaatcgtcatatgaaaactcacaccagtgagaagcctcacctgtgtcacctctgcctgaaaaccttccgtacggtcactctgctgcggaaccatgttaacacccacacaggaaccaggccctacaagtgtaacgactgcaacatggcatttgtcaccagtggagaactcgtccgacacaggcgctataaacatactcatgagaaaccctttaaatgttccatgtgcaagtatgccagtgtggaggcaagtaaattgaagcgccatgtccgatcccacactggggagcgcccctttcagtgttgccagtgcagctatgccagcagagatacctacaagctgaaacgccacatgagaacgcactcaggtgtgcatatgcgcaacttgcatgcttacagcgctgcagagctgaaatgccgctactgttctgctgtcttccatgaacgctatgccctcattcagcaccagaaaactcataagaatgagaagaggttcaagtgcaaacactgcagttatgcctgcaagcaggaacgtcatatgaccgctcacattcgtacccacactggagagaaaccattcacctgcctttcttgcaataaatgtttccgacagaagcaacttctaaacgctcacttcaggaaataccacgatgcaaatttcatcccgactgtttacaaatgctccaagtgtggcaaaggcttttcccgctggattaacctgcacagacattcggagaagtgtggatcaggggaagcaaagtcggctgcttcaggaaagggaagaagaacaagaaagaggaagcagaccatcctgaaggaagccacaaagggtcagaaggaagctgcgaagggatggaaggaagccgcgaacggagacgaagctgctgctgaggaggcttccaccacgaagggagaacagttcccaggagagatgtttcctgtcgcctgcagagaaaccacagccagagtcaaagaggaagtggatgaaggcgtgacctgtgaaatgctcctcaacacgatggataagtagtaatgaactagtccgtaacttgaaagtatttcgatttcttggctttatatatcttgtggaaaggacgacgtgtggcatatgattctagacgt

SEQ ID NO: 500 - DNA, 1001 bp, Homo sapiens
  source 1..1001: mol_type = genomic DNA
accgccaccatgttcacctcttctagaatgtcaagttttaatcgtcatatgaaaactcacaccagtgagaagcctcacctgtgtcacctctgcctgaaaaccttccgtacggtcactctgctgcggaaccatgttaacacccacacaggaaccaggccctacaagtgtaacgactgcaacatggcatttgtcaccagtggagaactcgtccgacacaggcgctataaacatactcatgagaaaccctttaaatgttccatgtgcaagtatgccagtgtggaggcaagtaaattgaagcgccatgtccgatcccacactggggagcgcccctttcagtgttgccagtgcagctatgccagcagagatacctacaagctgaaacgccacatgagaacgcactcaggtgagaagccttacgaatgccacatctgccacacccgcttcacccagagcgggaccatgaaaatacatattctgcagaaacacggcgaaaatgtccccaaataccagtgtccccattgtgccaccatcattgcacggaaaagcgacctacgtgtgcatatgcgcaacttgcatgcttacagcgctgcagagctgaaatgccgctactgttctgctgtcttccatgaacgctatgccctcattcagcaccagaaaactcataagaatgagaagaggttcaagtgcaaacactgcagttatgcctgcaagcaggaacgtcatatgaccgctcacattcgtacccacactggagagaaaccattcacctgcctttcttgcaataaatgtttccgacagaagcaacttctaaacgctcacttcaggaaataccacgatgcaaatttcatcccgactgtttacaaatgctccaagtgtggcaaaggcttttcccgctgggtgttgtattagtaatgaactagtccgtaacttgaaagtatttcgatttcttggctttatatatcttgtggaaaggacgagatagtcagaatttccagccgtta

SEQ ID NO: 501 - DNA, 1313 bp, Homo sapiens
  source 1..1313: mol_type = genomic DNA
accgccaccatgttcacctcttctagaatgtcaagttttaatcgtcatatgaaaactcacaccagtgagaagcctcacctgtgtcacctctgcctgaaaaccttccgtacggtcactctgctgcggaaccatgttaacacccacacaggaaccaggccctacaagtgtaacgactgcaacatggcatttgtcaccagtggagaactcgtccgacacaggcgctataaacatactcatgagaaaccctttaaatgttccatgtgcaagtatgccagtgtggaggcaagtaaattgaagcgccatgtccgatcccacactggggagcgcccctttcagtgttgccagtgcagctatgccagcagagatacctacaagctgaaacgccacatgagaacgcactcaggtgagaagccttacgaatgccacatctgccacacccgcttcacccagagcgggaccatgaaaatacatattctgcagaaacacggcgaaaatgtccccaaataccagtgtccccattgtgccaccatcattgcacggaaaagcgacctacgtgtgcatatgcgcaacttgcatgcttacagcgctgcagagctgaaatgccgctactgttctgctgtcttccatgaacgctatgccctcattcagcaccagaaaactcataagaatgagaagaggttcaagtgcaaacactgcagttatgcctgcaagcaggaacgtcatatgaccgctcacattcgtacccacactggagagaaaccattcacctgcctttcttgcaataaatgtttccgacagaagcaacttctaaacgctcacttcaggaaataccacgatgcaaatttcatcccgactgtttacaaatgctccaagtgtggcaaaggcttttcccgctggattaacctgcacagacattcggagaagtgtggatcaggggaagcaaagtcggctgcttcaggaaagggaagaagaacaagaaagaggaagcagaccatcctgaaggaagccacaaagggtcagaaggaagctgcgaagggatggaaggaagccgcgaacggagacggtgtgatctcagctcaccgcaacctctgcctcctgggttcaagtgattctcatgcctcagtctccggagctgggattacagatgcccgccaccacgcctggctaattgttctattatttttagtagagatggggttttaccatgtctctcactcctagtaatgaactagtccgtaacttgaaagtatttcgatttcttggctttatatatcttgtggaaaggacgagcagtataatctatttcgagtaat

SEQ ID NO: 502 - DNA, 2099 bp, Homo sapiens
  source 1..2099: mol_type = genomic DNA
accgccaccatggcagccactgagatctctgtcctttctgagcaattcaccaagatcaaagaactcgagttgatgccggaaaaaggcctgaaggaggaggaaaaagacggagtgtgcagagagaaagaccatcggagccctagtgagttggaggccgagcgtacctctggggccttccaggacagcgtcctggaggaagaagtggagctggtgctggccccctcggaggagagcgagaagtacatcctgaccctgcagacggtgcacttcacttctgaagctgtggagttgcaggatatgagcttgctgagcatacagcagcaagaaggggtgcaggtggtggtgcaacagcctggccctgggttgctgtggcttgaggaagggccccggcagagcctgcagcagtgtgtggccattagtatccagcaagagctgtactccccgcaagagatggaggtgttgcagttccacgctctagaggagaatgtgatggtggccagtgaagacagtaagttagcggtgagcctggctgaaactactggactgatcaagctcgaggaagagcaggagaagaaccagttattggctgaaagaacaaaggagcagctcttttttgtggaaacaatgtcaggagatgaaagaagtgacgaaattgttctcacagtttcaaattcaaatgtggaagaacaagaggatcaacctacagctggtcaagcagatgctgaaaaggccaaatctacaaaaaatcaaagaaagacaaagggagcaaaaggaaccttccactgtgatgtctgcatgttcacctcttctagaatgtcaagttttaatcgtcatatgaaaactcacaccagtgagaagcctcacctgtgtcacctctgcctgaaaaccttccgtacggtcactctgctgcggaaccatgttaacacccacacaggaaccaggccctacaagtgtaacgactgcaacatggcatttgtcaccagtggagaactcgtccgacacaggcgctataaacatactcatgagaaaccctttaaatgttccatgtgcaagtatgccagtgtggaggcaagtaaattgaagcgccatgtccgatcccacactggggagcgcccctttcagtgttgccagtgcagctatgccagcagagatacctacaagctgaaacgccacatgagaacgcactcaggtgagaagccttacgaatgccacatctgccacacccgcttcacccagagcgggaccatgaaaatacatattctgcagaaacacggcgaaaatgtccccaaataccagtgtccccattgtgccaccatcattgcacggaaaagcgacctacgtgtgcatatgcgcaacttgcatgcttacagcgctgcagagctgaaatgccgctactgttctgctgtcttccatgaacgctatgccctcattcagcaccagaaaactcataagaatgagaagaggttcaagtgcaaacactgcagttatgcctgcaagcaggaacgtcatatgaccgctcacattcgtacccacactggagagaaaccattcacctgcctttcttgcaataaatgtttccgacagaagcaacttctaaacgctcacttcaggaaataccacgatgcaaatttcatcccgactgtttacaaatgctccaagtgtggcaaaggcttttcccgctggattaacctgcacagacattcggagaagtgtggatcaggggaagcaaagtcggctgcttcaggaaagggaagaagaacaagaaagaggaagcagaccatcctgaaggaagccacaaagggtcagaaggaagctgcgaagggatggaaggaagccgcgaacggagacggtgtgatctcagctcaccgcaacctctgcctcctgggttcaagtgattctcatgcctcagtctccggagctgggattacagatgcccgccaccacgcctggctaattgttctattatttttagtagagatggggttttaccatgtctctcactcctagtaatgaactagtccgtaacttgaaagtatttcgatttcttggctttatatatcttgtggaaaggacgacaaagggataccagtcactcatcc

SEQ ID NO: 503 - DNA, 1985 bp, Homo sapiens
  source 1..1985: mol_type = genomic DNA
accgccaccatggcagccactgagatctctgtcctttctgagcaattcaccaagatcaaagaactcgagttgatgccggaaaaaggcctgaaggaggaggaaaaagacggagtgtgcagagagaaagaccatcggagccctagtgagttggaggccgagcgtacctctggggccttccaggacagcgtcctggaggaagaagtggagctggtgctggccccctcggaggagagcgagaagtacatcctgaccctgcagacggtgcacttcacttctgaagctgtggagttgcaggatatgagcttgctgagcatacagcagcaagaaggggtgcaggtggtggtgcaacagcctggccctgggttgctgtggcttgaggaagggccccggcagagcctgcagcagtgtgtggccattagtatccagcaagagctgtactccccgcaagagatggaggtgttgcagttccacgctctagaggagaatgtgatggtggccagtgaagacagtaagttagcggtgagcctggctgaaactactggactgatcaagctcgaggaagagcaggagaagaaccagttattggctgaaagaacaaaggagcagctcttttttgtggaaacaatgtcaggagatgaaagaagtgacgaaattgttctcacagtttcaaattcaaatgtggaagaacaagaggatcaacctacagctggtcaagcagatgctgaaaaggccaaatctacaaaaaatcaaagaaagacaaagggagcaaaaggaaccttccactgtgatgtctgcatgttcacctcttctagaatgtcaagttttaatcgtcatatgaaaactcacaccagtgagaagcctcacctgtgtcacctctgcctgaaaaccttccgtacggtcactctgctgcggaaccatgttaacacccacacaggaaccaggccctacaagtgtaacgactgcaacatggcatttgtcaccagtggagaactcgtccgacacaggcgctataaacatactcatgagaaaccctttaaatgttccatgtgcaagtatgccagtgtggaggcaagtaaattgaagcgccatgtccgatcccacactggggagcgcccctttcagtgttgccagtgcagctatgccagcagagatacctacaagctgaaacgccacatgagaacgcactcaggtgagaagccttacgaatgccacatctgccacacccgcttcacccagagcgggaccatgaaaatacatattctgcagaaacacggcgaaaatgtccccaaataccagtgtccccattgtgccaccatcattgcacggaaaagcgacctacgtgtgcatatgcgcaacttgcatgcttacagcgctgcagagctgaaatgccgctactgttctgctgtcttccatgaacgctatgccctcattcagcaccagaaaactcataagaatgagaagaggttcaagtgcaaacactgcagttatgcctgcaagcaggaacgtcatatgaccgctcacattcgtacccacactggagagaaaccattcacctgcctttcttgcaataaatgtttccgacagaagcaacttctaaacgctcacttcaggaaataccacgatgcaaatttcatcccgactgtttacaaatgctccaagtgtggcaaaggcttttcccgctggattctctgggttgggaactcggaagtggctgaactgggtggtcctggctcagggccactcctgaggctgcagtcaggatgtccgccagggctgcatcatccgaaggctggactggggccagaggatccacttccaggacagctccgccacacaactgctggcaccggcctcagttccttgctacagggacctctctgcagggctgcttagtaatgaactagtccgtaacttgaaagtatttcgatttcttggctttatatatcttgtggaaaggacgaccatctgtcagggtaacccagttg

SEQ ID NO: 504 - DNA, 1370 bp, Homo sapiens
  source 1..1370: mol_type = genomic DNA
accgccaccatgtcaggagatgaaagaagtgacgaaattgttctcacagtttcaaattcaaatgtggaagaacaagaggatcaacctacagctggtcaagcagatgctgaaaaggccaaatctacaaaaaatcaaagaaagacaaagggagcaaaaggaaccttccactgtgatgtctgcatgttcacctcttctagaatgtcaagttttaatcgtcatatgaaaactcacaccagtgagaagcctcacctgtgtcacctctgcctgaaaaccttccgtacggtcactctgctgcggaaccatgttaacacccacacaggaaccaggccctacaagtgtaacgactgcaacatggcatttgtcaccagtggagaactcgtccgacacaggcgctataaacatactcatgagaaaccctttaaatgttccatgtgcaagtatgccagtgtggaggcaagtaaattgaagcgccatgtccgatcccacactggggagcgcccctttcagtgttgccagtgcagctatgccagcagagatacctacaagctgaaacgccacatgagaacgcactcaggtgagaagccttacgaatgccacatctgccacacccgcttcacccagagcgggaccatgaaaatacatattctgcagaaacacggcgaaaatgtccccaaataccagtgtccccattgtgccaccatcattgcacggaaaagcgacctacgtgtgcatatgcgcaacttgcatgcttacagcgctgcagagctgaaatgccgctactgttctgctgtcttccatgaacgctatgccctcattcagcaccagaaaactcataagaatgagaagaggttcaagtgcaaacactgcagttatgcctgcaagcaggaacgtcatatgaccgctcacattcgtacccacactggagagaaaccattcacctgcctttcttgcaataaatgtttccgacagaagcaacttctaaacgctcacttcaggaaataccacgatgcaaatttcatcccgactgtttacaaatgctccaagtgtggcaaaggcttttcccgctggattctctgggttgggaactcggaagtggctgaactgggtggtcctggctcagggccactcctgaggctgcagtcaggatgtccgccagggctgcatcatccgaaggctggactggggccagaggatccacttccaggacagctccgccacacaactgctggcaccggcctcagttccttgctacagggacctctctgcagggctgcttagtaatgaactagtccgtaacttgaaagtatttcgatttcttggctttatatatcttgtggaaaggacgaaatccgccgtaatagtaaataatc

SEQ ID NO: 505 - DNA, 1823 bp, Homo sapiens
  source 1..1823: mol_type = genomic DNA
accgccaccatggcagccactgagatctctgtcctttctgagcaattcaccaagatcaaagaactcgagttgatgccggaaaaaggcctgaaggaggaggaaaaagacggagtgtgcagagagaaagaccatcggagccctagtgagttggaggccgagcgtacctctggggccttccaggacagcgtcctggaggaagaagtggagctggtgctggccccctcggaggagagcgagaagtacatcctgaccctgcagacggtgcacttcacttctgaagctgtggagttgcaggatatgagcttgctgagcatacagcagcaagaaggggtgcaggtggtggtgcaacagcctggccctgggttgctgtggcttgaggaagggccccggcagagcctgcagcagtgtgtggccattagtatccagcaagagctgtactccccgcaagagatggaggtgttgcagttccacgctctagaggagaatgtgatggtggccagtgaagacagtaagttagcggtgagcctggctgaaactactggactgatcaagctcgaggaagagcaggagaagaaccagttattggctgaaagaacaaaggagcagctcttttttgtggaaacaatgtcaggagatgaaagaagtgacgaaattgttctcacagtttcaaattcaaatgtggaagaacaagaggatcaacctacagctggtcaagcagatgctgaaaaggccaaatctacaaaaaatcaaagaaagacaaagggagcaaaaggaaccttccactgtgatgtctgcatgttcacctcttctagaatgtcaagttttaatcgtcatatgaaaactcacaccagtgagaagcctcacctgtgtcacctctgcctgaaaaccttccgtacggtcactctgctgcggaaccatgttaacacccacacaggaaccaggccctacaagtgtaacgactgcaacatggcatttgtcaccagtggagaactcgtccgacacaggcgctataaacatactcatgagaaaccctttaaatgttccatgtgcaagtatgccagtgtggaggcaagtaaattgaagcgccatgtccgatcccacactggggagcgcccctttcagtgttgccagtgcagctatgccagcagagatacctacaagctgaaacgccacatgagaacgcactcaggtgagaagccttacgaatgccacatctgccacacccgcttcacccagagcgggaccatgaaaatacatattctgcagaaacacggcgaaaatgtccccaaataccagtgtccccattgtgccaccatcattgcacggaaaagcgacctacgtgtgcatatgcgcaacttgcatgcttacagcgctgcagagctgaaatgccgctactgttctgctgtcttccatgaacgctatgccctcattcagcaccagaaaactcataagaatgagaagaggttcaagtgcaaacactgcagttatgcctgcaagcaggaacgtcatatgaccgctcacattcgtacccacactggagagaaaccattcacctgcctttcttgcaataaatgtttccgacagaagcaacttctaaacgctcacttcaggaaataccacgatgcaaatttcatcccgactgtttacaaatgctccaagtgtggcaaaggcttttcccgctggattacctcaaaatggagtggcttaaaaccacaaacatttatcacctagtaatgaactagtccgtaacttgaaagtatttcgatttcttggctttatatatcttgtggaaaggacgaaccagggatgaacttgtacgaatg

SEQ ID NO: 506 - DNA, 464 bp, Homo sapiens
  source 1..464: mol_type = genomic DNA
accgccaccatggctgcagggtggctgacaacctggtcacagaactcagtaaccttccaggaagtggcagtggacttttcccaggaggagtgggcattgctggaccctgctcaaaaaaatctatacaaagatgtgatgctggagaactttaggaacctggcctcagtagggtatcagctctgcagacacagtctgatctccaaggtggatcaagaacagctgaagacagatgaaagaggaattttacaaggtgactgtgcagactgggaaactcaacttaaaccaaaagatacaattgctatgcagaacattcctgggggaaaaacatccaatggcataaacacgaatcctcatggaagagaattcctgtagtaatgaactagtccgtaacttgaaagtatttcgatttcttggctttatatatcttgtggaaaggacgaggagttagaggtccttcgaggccg

SEQ ID NO: 507 - DNA, 959 bp, Homo sapiens
  source 1..959: mol_type = genomic DNA
accgccaccatgtcggacgatttcttatggtttgaaggcatagctttccctactatgggtttcagatccgaaaccttaagaaaagtacgtgatgagttcgtgataagggatgaagatgtaataatattgacttaccccaaatcaggaacaaactggttggctgagattctctgcctgatgcactccaagggggatgccaagtggatccaatctgtgcccatctgggagcgatcaccctgggtagagagtgagattgggtatacagcactcagtgaaacggagagtccacgtttattctcctcccacctccccatccagttattccccaagtctttcttcagttccaaggccaaggtgatttatctcatgagaaatcccagagatgttttggtgtctggttattttttctggaaaaacatgaagtttattaagaaaccaaagtcatgggaagaatattttgaatggttttgtcaaggaactgtgctatatgggtcatggtttgaccacattcatggctggatgcccatgagagaggagaaaaacttcctgttactgagttatgaggagctgaaacaggacacaggaagaaccatagagaagatctgtcaattcctgggaaagacgttagaacccgaagaactgaacttaattctcaagaacagctcctttcagagcatgaaagaaaacaagatgtccaattattccctcctgagtgttgattatgtagtggacaaagcacaacttctgagaaaaggtgtatctggggactggaaaaatcacttcacagtggcccaagctgaagactttgataaattgttccaagagaagatggcagatcttcctcgagagctgttcccatgggaatagtaatgaactagtccgtaacttgaaagtatttcgatttcttggctttatatatcttgtggaaaggacgaatcggaaccacttctgtttaagca

SEQ ID NO: 508 - DNA, 2510 bp, Homo sapiens
  source 1..2510: mol_type = genomic DNA
accgccaccatgcctcgaattatgatcaaggggggcgtatggaggaataccgaggatgaaattctgaaagcagcggtaatgaaatatgggaaaaatcagtggtctaggattgcctcattgctgcatagaaaatcagcaaagcagtgcaaagccagatggtatgaatggctggatccaagcattaagaagacagaatggtccagagaagaagaggaaaaactcttgcacttggccaagttgatgccaactcagtggaggaccattgctccaatcattggaagaacagcggcccagtgcttagaacactatgaatttcttctggataaagctgcccaaagagacaatgaagaggaaacaacagatgatccacgaaaacttaaacctggagaaatagatccaaatccagaaacaaaaccagcgcggcctgatccaattgatatggatgaggatgaacttgagatgctttctgaagccagagcccgcttggctaatactcagggaaagaaggccaagaggaaagcaagagagaaacaattggaagaagcaagacgtcttgctgccctccaaaaaagaagagaacttcgagcagctggcatagaaattcagaagaaaagaaaaaggaagagaggagttgattataatgccgaaatcccatttgaaaaaaagcctgcccttggtttttatgatacttctgaggaaaactaccaagctcttgacgcagatttcaggaaattaagacaacaggatcttgatggggagctaagatctgaaaaagaaggaagagatagaaaaaaagacaaacagcatttgaaaaggaaaaaagaatctgatttaccatcagctattcttcaaactagtggtgtttctgaatttactaaaaagagaagcaaactagtacttcctgcccctcagatttcagatgcagaactccaggaagttgtaaaagtaggccaagcgagtgaaattgcacgtcaaactgccgaggaatctggcataacaaattctgcttccagtacacttttgtctgagtacaatgtcaccaacaacagcgttgctcttagaacaccacgaacaccagcttcccaggacagaattctgcaggaagcccagaacctcatggccctcaccaatgtggacaccccattgaaaggtggacttaataccccattgcatgagagtgacttctcaggtgtaactccacagcgacaagttgtacagactccaaacacagttctctctactccattcaggactccttctaatggagctgaagggctgactccccggagtggaacaactcccaaaccagttattaactctactccgggtagaactcctcttcgagacaagttaaacattaatcccgaggatggaatggcagactatagtgatccctcttacgtgaagcagatggaaagagaatcccgagaacatctccgtttagggttgttgggccttcctgcccctaagaatgattttgaaattgttctaccagaaaatgccgagaaggagctggaagaacgtgaaatagatgatacttacattgaagatgctgctgatgtggatgctcgaaagcaggccatacgagatgcagagcgtgtaaaggaaatgaaacgaatgcataaagctgtccagaaagatctgccaagaccatcagaagtaaatgaaactattctaagacccttaaatgtagaaccgcctttaacagatttacagaaaagtgaagaactaatcaaaaaagaaatgatcacaatgcttcattatgaccttctacatcacccttatgaaccatctggaaataaaaaaggcaaaactgtagggtttggtaccaataattcagagcacattacctatctggaacataatccttatgaaaagttctccaaagaagagctgaaaaaggcccaggatgttttggtgcaggagatggaagtggttaaacaaggaatgagccatggagagctctcaagtgaagcttataaccaggtgtgggaagaatgctacagtcaagttttatatcttcctgggcagagccgctacacacgggccaatctggctagtaaaaaggacagaattgaatcacttgaaaagaggctcgagataaacaggggtcacatgacgacagaagccaagagggctgcaaagatggaaaagaagatgaaaattttgcttgggggttaccagtctcgtgctatggggctcatgaaacagttgaatgacttatgggaccaaattgaacaggctcacttggagttacgcacttttgaagaactcaagaaacatgaagattctgctattccccggaggctagagtgtctaaaagaagacgttcagcgacaacaagaaagagaaaaggaacttcaacatagatatgctgatttgctgctggagaaagagactttaaagtcaaaattctagtaatgaactagtccgtaacttgaaagtatttcgatttcttggctttatatatcttgtggaaaggacgacatatggcgacccaggtggaaccg

SEQ ID NO: 509 - DNA, 2096 bp, Homo sapiens
  source 1..2096: mol_type = genomic DNA
accgccaccatgggagatgatggcagccccccagcgaaaaaaatgataacggacattcatgcaaatggaaaaacgataaacaaggtgccaacagttaagaaggaacacttggatgactatggagaagcaccagtggaaactgatggagagcatgttaagcgaacctgtacttctgttcctgaaactttgcatttaaatcccagtttgaaacacacattggcacaattccatttaagtagtcagagctcgctgggtggaccagcagcattttctgctcggcattcccaagaaagcatgtcgcctactgtatttctgcctcttccatcacctcaggttcttcctggcccattgctcatcccttcagatagctccacagaactcactcagactgtgttggaaggggaatctatttcttgttttcaagttggaggagaaaagagactctgtttgccccaagtcttaaattctgttctccgagaatttacactccagcaaataaatacagtgtgtgatgaactgtacatatattgttcaaggtgtacttcagaccagcttcatatcttaaaggtactgggcatacttccattcaatgccccatcctgtgggctgattacattaactgatgcacaaagattatgtaatgctttattgcggccacgaacttttcctcaaaatggtagcgtacttcctgctaaaagctcattggcccagttaaaggaaactggcagtgcctttgaagtggagcatgaatgcctaggcaaatgtcagggtttatttgcaccccagttttatgttcagcctgatgctccgtgtattcaatgtctggagtgttgtggaatgtttgcaccccagacgtttgtgatgcattctcacagatcacctgacaaaagaacttgccactggggctttgaatcagctaaatggcattgctatcttcatgtgaaccaaaaatacttaggaacacctgaagaaaagaaactgaagataattttagaagaaatgaaggagaagtttagcatgagaagtggaaagagaaatcaatccaagacagatgcaccatcaggaatggaattacagtcatggtatcctgttataaagcaggaaggtgaccatgtttctcagacacattcatttttacaccccagctactacttatacatgtgtgataaagtggttgccccaaatgtgtcacttacttctgctgtatcccagtctaaagagctcacaaagacagaggcaagtaagtccatatcaagacagtcagagaaggctcacagtagtggtaaacttcaaaaaacagtgtcttatccagatgtctcacttgaggaacaggagaaaatggatttaaaaacaagtagagaattatgtagccgtttagatgcatcaatctcaaataattctacaagtaaaaggaaatctgagtctgccacttgcaacttagtcagagacataaacaaagtgggaattggccttgttgctgccgcttcatctccgcttcttgtgaaagatgtcatttgtgaggatgataagggaaaaatcatggaagaagtaatgagaacttatttaaaacaacaggaaaaactaaacttgattttgcaaaagaagcaacaacttcagatggaagtaaaaatgttgagtagttcaaaatctatgaaggaactcactgaagaacagcagaatttacagaaagagcttgaatctttgcagaatgaacatgctcaaagaatggaagaattttatgttgaacagaaagacttagagaaaaaattggagcagataatgaagcaaaaatgtacctgtgactcaaatttagaaaaagacaaagaggctgaatatgcaggacagttggcagaactgaggcagagattggaccatgctgaggccgataggcaagaactccaagatgaactcagacaggaacgggaagcaagacagaagttagagatgatgataaaagagctaaagctgcaaattctgaaatcatcaaagactgctaaagaatagtaatgaactagtccgtaacttgaaagtatttcgatttcttggctttatatatcttgtggaaaggacgataagggagccatttgaacgcttat

SEQ ID NO: 510 - DNA, 2018 bp, Homo sapiens
  source 1..2018: mol_type = genomic DNA
accgccaccatggaaaacctccagacaaatttctccttggttcagggctcaactaaaaaactgaatgggatgggagatgatggcagccccccagcgaaaaaaatgataacggacattcatgcaaatggaaaaacgataaacaaggtgccaacagttaagaaggaacacttggatgactatggagaagcaccagtggaaactgatggagagcatgttaagcgaacctgtacttctgttcctgaaactttgcatttaaatcccagtttgaaacacacattggcacaattccatttaagtagtcagagctcgctgggtggaccagcagcattttctgctcggcattcccaagaaagcatgtcgcctactgtatttctgcctcttccatcacctcaggttcttcctggcccattgctcatcccttcagatagctccacagaactcactcagactgtgttggaaggggaatctatttcttgttttcaagttggaggagaaaagagactctgtttgccccaagtcttaaattctgttctccgagaatttacactccagcaaataaatacagtgtgtgatgaactgtacatatattgttcaaggtgtacttcagaccagcttcatatcttaaaggtactgggcatacttccattcaatgccccatcctgtgggctgattacattaactgatgcacaaagattatgtaatgctttattgcggccacgaacttttcctcaaaatggtagcgtacttcctgctaaaagctcattggcccagttaaaggaaactggcagtgcctttgaagtggagcatgaatgcctaggcaaatgtcagggtttatttgcaccccagttttatgttcagcctgatgctccgtgtattcaatgtctggagtgttgtggaatgtttgcaccccagacgtttgtgatgcattctcacagatcacctgacaaaagaacttgccactggggctttgaatcagctaaatggcattgctatcttcatgtgaaccaaaaatacttaggaacacctgaagaaaagaaactgaagataattttagaagaaatgaaggagaagtttagcatgagaagtggaaagagaaatcaatccaagacagatgcaccatcaggaatggaattacagtcatggtatcctgttataaagcaggaaggtgaccatgtttctcagacacattcatttttacaccccagctactacttatacatgtgtgataaagtggttgccccaaatgtgtcacttacttctgctgtatcccagtctaaagagctcacaaagacagaggcaaatgcatcaatctcaaataattctacaagtaaaaggaaatctgagtctgccacttgcaacttagtcagagacataaacaaagtgggaattggccttgttgctgccgcttcatctccgcttcttgtgaaagatgtcatttgtgaggatgataagggaaaaatcatggaagaagtaatgagaacttatttaaaacaacaggaaaaactaaacttgattttgcaaaagaagcaacaacttcagatggaagtaaaaatgttgagtagttcaaaatctatgaaggaactcactgaagaacagcagaatttacagaaagagcttgaatctttgcagaatgaacatgctcaaagaatggaagaattttatgttgaacagaaagacttagagaaaaaattggagcagataatgaagcaaaaatgtacctgtgactcaaatttagaaaaagacaaagaggctgaatatgcaggacagttggcagaactgaggcagagattggaccatgctgaggccgataggcaagaactccaagatgaactcagacaggaacgggaagcaagacagaagttagagatgatgataaaagagctaaagctgcaaattctgaaatcatcaaagactgctaaagaatagtaatgaactagtccgtaacttgaaagtatttcgatttcttggctttatatatcttgtggaaaggacgataactacgttgatggcttatccac

SEQ ID NO: 511 - DNA, 2156 bp, Homo sapiens
  source 1..2156: mol_type = genomic DNA
accgccaccatggaaaacctccagacaaatttctccttggttcagggctcaactaaaaaactgaatgggatgggagatgatggcagccccccagcgaaaaaaatgataacggacattcatgcaaatggaaaaacgataaacaaggtgccaacagttaagaaggaacacttggatgactatggagaagcaccagtggaaactgatggagagcatgttaagcgaacctgtacttctgttcctgaaactttgcatttaaatcccagtttgaaacacacattggcacaattccatttaagtagtcagagctcgctgggtggaccagcagcattttctgctcggcattcccaagaaagcatgtcgcctactgtatttctgcctcttccatcacctcaggttcttcctggcccattgctcatcccttcagatagctccacagaactcactcagactgtgttggaaggggaatctatttcttgttttcaagttggaggagaaaagagactctgtttgccccaagtcttaaattctgttctccgagaatttacactccagcaaataaatacagtgtgtgatgaactgtacatatattgttcaaggtgtacttcagaccagcttcatatcttaaaggtactgggcatacttccattcaatgccccatcctgtgggctgattacattaactgatgcacaaagattatgtaatgctttattgcggccacgaacttttcctcaaaatggtagcgtacttcctgctaaaagctcattggcccagttaaaggaaactggcagtgcctttgaagtggagcatgaatgcctaggcaaatgtcagggtttatttgcaccccagttttatgttcagcctgatgctccgtgtattcaatgtctggagtgttgtggaatgtttgcaccccagacgtttgtgatgcattctcacagatcacctgacaaaagaacttgccactggggctttgaatcagctaaatggcattgctatcttcatgtgaaccaaaaatacttaggaacacctgaagaaaagaaactgaagataattttagaagaaatgaaggagaagtttagcatgagaagtggaaagagaaatcaatccaagacagatgcaccatcaggaatggaattacagtcatggtatcctgttataaagcaggaaggtgaccatgtttctcagacacattcatttttacaccccagctactacttatacatgtgtgataaagtggttgccccaaatgtgtcacttacttctgctgtatcccagtctaaagagctcacaaagacagaggcaagtaagtccatatcaagacagtcagagaaggctcacagtagtggtaaacttcaaaaaacagtgtcttatccagatgtctcacttgaggaacaggagaaaatggatttaaaaacaagtagagaattatgtagccgtttagatgcatcaatctcaaataattctacaagtaaaaggaaatctgagtctgccacttgcaacttagtcagagacataaacaaagtgggaattggccttgttgctgccgcttcatctccgcttcttgtgaaagatgtcatttgtgaggatgataagggaaaaatcatggaagaagtaatgagaacttatttaaaacaacaggaaaaactaaacttgattttgcaaaagaagcaacaacttcagatggaagtaaaaatgttgagtagttcaaaatctatgaaggaactcactgaagaacagcagaatttacagaaagagcttgaatctttgcagaatgaacatgctcaaagaatggaagaattttatgttgaacagaaagacttagagaaaaaattggagcagataatgaagcaaaaatgtacctgtgactcaaatttagaaaaagacaaagaggctgaatatgcaggacagttggcagaactgaggcagagattggaccatgctgaggccgataggcaagaactccaagatgaactcagacaggaacgggaagcaagacagaagttagagatgatgataaaagagctaaagctgcaaattctgaaatcatcaaagactgctaaagaatagtaatgaactagtccgtaacttgaaagtatttcgatttcttggctttatatatcttgtggaaaggacgacagcgcccaaagagttagagtggt

SEQ ID NO: 512 - DNA, 1394 bp, Homo sapiens
  source 1..1394: mol_type = genomic DNA
accgccaccatggacgaacggctactggggccgccccctccaggcgggggccgggggggcctgggattggtgagtggggagcctgggggccctggcgagcctcccggtggcggagaccccggtgggggtagcgggggggtcccgggaggccgagggaagcaagacatcggggacattctgcagcagataatgaccatcaccgaccagagcctggacgaggcccaggccaagaaacacgccctaaactgccaccgaatgaagcctgctctctttagcgtcctgtgtgaaatcaaggagaaaactggcctcagcattcggagctcccaggaggaggagccggtggacccacagctgatgcgcttggacaacatgcttctggcagagggtgtggctgggcccgagaaagggggcggctcagcagcagcagctgcagccgctgcagcctctggtggtggtgtgtcccctgacaactccatcgaacactcggactatcgcagcaaacttgcccagatccgtcacatataccactcggagctggagaagtatgagcaggcatgtaatgagttcacgacccatgtcatgaacctgctgagggagcagagccgcaccaggcccgtggcccccaaagagatggaacgcatggtgagcatcatccatcgaaagttcagcgccatccagatgcagctgaagcagagcacctgcgaggctgtgatgatcctgcgctcccgtttcctggatgccagacgaaagcgccgtaacttcagcaaacaggccactgaggtcctaaatgagtatttctactcccacctgagtaacccatatcctagtgaggaggccaaggaggagcttgccaagaagtgtggcatcaccgtgtctcaggtctccaactggtttggcaacaagaggattcgctataagaaaaacatcggaaagttccaagaggaggcaaacatctatgctgtcaagaccgccgtgtcagtcacccaggggggccacagccgcaccagctccccgacacccccttcctctgcaggctctggcggctctttcaatctctcaggatctggagacatgtttctggggatgcctgggctcaacggagattcctattctgcttcccaggtggaatcactccgacactcgatggggccagggggctatggggataacctcgggggaggccagatgtacagcccacgggaaatgagggcaaatggcagctggcaagaggctgtgaccccctcttcagtgacatccccaacggagggaccagggagtgttcactctgatacctccaactagtaatgaactagtccgtaacttgaaagtatttcgatttcttggctttatatatcttgtggaaaggacgatgatgctgatcgtgataggtggat

SEQ ID NO: 513 - DNA, 1181 bp, Homo sapiens
  source 1..1181: mol_type = genomic DNA
accgccaccatgaaaccagcgctcttcagcgtcctgtgtgagatcaaagagaaaacaggtctcagcatcagaggagcccaggaggaggaccctcccgatccccagctaatgagactggacaatatgcttttggcagaaggggtttcaggtcctgagaaaggtgggggatcggcggcagcagctgcagccgcggcagcctctggaggttcttcagataactctattgaacactcagattacagagccaaattgacccagatcagacaaatctatcacacagaactggagaaatatgaacaggcatgtaatgaatttactacacatgtgatgaaccttctccgagaacagagtagaacacgtcccatttctccaaaagagattgaaagaatggtgggcatcatccatcgaaaatttagttccattcagatgcagctcaaacaaagcacttgtgaagcagttatgattttaagatcaaggttccttgatgccagacggaaaaggcgtaacttcagtaaacaggccacagaaatcttgaatgaatatttttactcacacctcagcaacccctaccccagtgaagaagccaaagaggagctggccaagaaatgcagcatcacagtgtcacaggtatccaattggtttggcaacaaacgaatcaggtacaagaagaacattggcaagtttcaggaagaagccaacctctatgctgcaaagacggccgtgacagctgcacacgcagtagcagcagctgtgcagaacaaccagaccaattcgcccaccacaccaaattccggttcttctggttcttttaacctcccaaattctggggacatgttcatgaacatgcagagtctgaatggggattcttaccaagggtcccaagtcggagccaatgtgcaatcacaggtggataccctccgtcatgttatcaatcagacgggaggctacagtgatggccttggaggaaattcactgtacagtccacataatttaaatgctaatggaggctggcaggacgcaacaactccatcttctgtgacttctcctacagaaggcccaggaagtgtgcactcggatacctctaactagtaatgaactagtccgtaacttgaaagtatttcgatttcttggctttatatatcttgtggaaaggacgagcagtatagattacgacgattgcc

SEQ ID NO: 514 - DNA, 1406 bp, Homo sapiens
  source 1..1406: mol_type = genomic DNA
accgccaccatggacgatcaatccaggatgctgcagactctggccggggtgaacctggctggccactcggtgcaggggggcatggccctgccgcctcccccgcacggccacgaaggggcggacggcgacggcaggaagcaggacatcggcgacatcctccaccagatcatgaccatcaccgaccagagcttggacgaggcgcaagcaaagaaacatgccctgaactgtcacagaatgaaaccagcgctcttcagcgtcctgtgtgagatcaaagagaaaacaggtctcagcatcagaggagcccaggaggaggaccctcccgatccccagctaatgagactggacaatatgcttttggcagaaggggtttcaggtcctgagaaaggtgggggatcggcggcagcagctgcagccgcggcagcctctggaggttcttcagataactctattgaacactcagattacagagccaaattgacccagatcagacaaatctatcacacagaactggagaaatatgaacaggcatgtaatgaatttactacacatgtgatgaaccttctccgagaacagagtagaacacgtcccatttctccaaaagagattgaaagaatggtgggcatcatccatcgaaaatttagttccattcagatgcagctcaaacaaagcacttgtgaagcagttatgattttaagatcaaggttccttgatgccagacggaaaaggcgtaacttcagtaaacaggccacagaaatcttgaatgaatatttttactcacacctcagcaacccctaccccagtgaagaagccaaagaggagctggccaagaaatgcagcatcacagtgtcacaggtatccaattggtttggcaacaaacgaatcaggtacaagaagaacattggcaagtttcaggaagaagccaacctctatgctgcaaagacggccgtgacagctgcacacgcagtagcagcagctgtgcagaacaaccagaccaattcgcccaccacaccaaattccggttcttctggttcttttaacctcccaaattctggggacatgttcatgaacatgcagagtctgaatggggattcttaccaagggtcccaagtcggagccaatgtgcaatcacaggtggataccctccgtcatgttatcaatcagacgggaggctacagtgatggccttggaggaaattcactgtacagtccacataatttaaatgctaatggaggctggcaggacgcaacaactccatcttctgtgacttctcctacagaaggcccaggaagtgtgcactcggatacctctaactagtaatgaactagtccgtaacttgaaagtatttcgatttcttggctttatatatcttgtggaaaggacgataagcacgtcgcaacagcattcag

SEQ ID NO: 515 - DNA, 1157 bp, Homo sapiens
  source 1..1157: mol_type = genomic DNA
accgccaccatggacgatcaatccaggatgctgcagactctggccggggtgaacctggctggccactcggtgcaggggggcatggccctgccgcctcccccgcacggccacgaaggggcggacggcgacggcaggaagcaggacatcggcgacatcctccaccagatcatgaccatcaccgaccagagcttggacgaggcgcaagcaaagaaacatgccctgaactgtcacagaatgaaaccagcgctcttcagcgtcctgtgtgagatcaaagagaaaacaggtctcagcatcagaggagcccaggaggaggaccctcccgatccccagctaatgagactggacaatatgcttttggcagaaggggtttcaggtcctgagaaaggtgggggatcggcggcagcagctgcagccgcggcagcctctggaggttcttcagataactctattgaacactcagattacagagccaaattgacccagatcagacaaatctatcacacagaactggagaaatatgaacaggcatgtaatgaatttactacacatgtgatgaaccttctccgagaacagagtagaacacgtcccatttctccaaaagagattgaaagaatggtgggcatcatccatcgaaaatttagttccattcagatgcagctcaaacaaagcacttgtgaagcagttatgattttaagatcaaggttccttgatgccagacggaaaaggcgtaacttcagtaaacaggccacagaaatcttgaatgaatatttttactcacacctcagcaacccctaccccagtgaagaagccaaagaggagctggccaagaaatgcagcatcacagtgtcacaggtatccaattggtttggcaacaaacgaatcaggtacaagaagaacattggcaagtttcaggaagaagccaacctctatgctgcaaagacggccgtgacagctgcacacgcagtagcagcagctgtgcagaacaaccagaccaattcgcccaccacaccaaattccggtggataccctccgtcatgttatcaatcagacgggaggctacagtagtaatgaactagtccgtaacttgaaagtatttcgatttcttggctttatatatcttgtggaaaggacgagtggtaacgccaaatatgaagcct

SEQ ID NO: 516 - DNA, 1469 bp, Homo sapiens
  source 1..1469: mol_type = genomic DNA
accgccaccatggacgatcaatccaggatgctgcagactctggccggggtgaacctggctggccactcggtgcaggggggcatggccctgccgcctcccccgcacggccacgaaggggcggacggcgacggcaggaagcaggacatcggcgacatcctccaccagatcatgaccatcaccgaccagagcttggacgaggcgcaagcaaagaaacatgccctgaactgtcacagaatgaaaccagcgctcttcagcgtcctgtgtgagatcaaagagaaaacaggtctcagcatcagaggagcccaggaggaggaccctcccgatccccagctaatgagactggacaatatgcttttggcagaaggggtttcaggtcctgagaaaggtgggggatcggcggcagcagctgcagccgcggcagcctctggaggttcttcagataactctattgaacactcagattacagagccaaattgacccagatcagacaaatctatcacacagaactggagaaatatgaacaggcatgtaatgaatttactacacatgtgatgaaccttctccgagaacagagtagaacacgtcccatttctccaaaagagattgaaagaatggtgggcatcatccatcgaaaatttagttccattcagatgcagctcaaacaaagcacttgtgaagcagttatgattttaagatcaaggttccttgatgccagacggaaaaggcgtaacttcagtaaacaggccacagaaatcttgaatgaatatttttactcacacctcagcaacccctaccccagtgaagaagccaaagaggagctggccaagaaatgcagcatcacagtgtcacagagtcttgtaaaggatccaaaagaaagagggagcaaaggttctgacatccagccaactagcgtggtatccaattggtttggcaacaaacgaatcaggtacaagaagaacattggcaagtttcaggaagaagccaacctctatgctgcaaagacggccgtgacagctgcacacgcagtagcagcagctgtgcagaacaaccagaccaattcgcccaccacaccaaattccggttcttctggttcttttaacctcccaaattctggggacatgttcatgaacatgcagagtctgaatggggattcttaccaagggtcccaagtcggagccaatgtgcaatcacaggtggataccctccgtcatgttatcaatcagacgggaggctacagtgatggccttggaggaaattcactgtacagtccacataatttaaatgctaatggaggctggcaggacgcaacaactccatcttctgtgacttctcctacagaaggcccaggaagtgtgcactcggatacctctaactagtaatgaactagtccgtaacttgaaagtatttcgatttcttggctttatatatcttgtggaaaggacgacctcaagcacctcggtgactgcgc

SEQ ID NO: 517 - DNA, 1394 bp, Homo sapiens
  source 1..1394: mol_type = genomic DNA
accgccaccatggacgagcagcccaggctgatgcattcccatgctggggtcgggatggccggacaccccggcctgtcccagcacttgcaggatggggccggagggaccgagggggagggcgggaggaagcaggacattggagacattttacagcaaattatgaccatcacagaccagagtttggatgaggcgcaggccagaaaacatgctttaaactgccacagaatgaagcctgccttgtttaatgtgttgtgtgaaatcaaagaaaaaacagttttgagtatccgaggagcccaggaggaggaacccacagacccccagctgatgcggctggacaacatgctgttagcggaaggcgtggcggggcctgagaagggcggagggtcggcggcagcggcggcagcggcggcggcttctggaggggcaggttcagacaactcagtggagcattcagattacagagccaaactctcacagatcagacaaatctaccatacggagctggagaaatacgagcaggcctgcaacgagttcaccacccacgtgatgaatctcctgcgagagcaaagccggaccaggcccatctccccaaaggagattgagcggatggtcagcatcatccaccgcaagttcagctccatccagatgcagctcaagcagagcacgtgcgaggcggtgatgatcctgcgttcccgatttctggatgcgcggcggaagagacggaatttcaacaagcaagcgacagaaatcctgaatgaatatttctattcccatctcagcaacccttaccccagtgaggaagccaaagaggagttagccaagaagtgtggcatcacagtctcccaggtatcaaactggtttggaaataagcgaatccggtacaagaagaacataggtaaatttcaagaggaagccaatatttatgctgccaaaacagctgtcactgctaccaatgtgtcagcccatggaagccaagctaactcgccctcaactcccaactcggctggttcttccagttcttttaacatgtcaaactctggagatttgttcatgagcgtgcagtcactcaatggggattcttaccaaggggcccaggttggagccaacgtgcaatcacaggtggatacccttcgccatgttatcagccagacaggaggatacagtgatggactcgcagccagtcagatgtacagtccgcagggcatcagtgctaatggaggttggcaggatgctactaccccttcatcagtgacctcccctacagaaggccctggcagtgttcactctgatacctccaactagtaatgaactagtccgtaacttgaaagtatttcgatttcttggctttatatatcttgtggaaaggacgaatacccgaccggttacaacacgac

SEQ ID NO: 518 - DNA, 1364 bp, Homo sapiens
  source 1..1364: mol_type = genomic DNA
accgccaccatggacgagcagcccaggctgatgcattcccatgctggggtcgggatggccggacaccccggcctgtcccagcacttgcaggatggggccggagggaccgagggggagggcgggaggaagcaggacattggagacattttacagcaaattatgaccatcacagaccagagtttggatgaggcgcaggccagaaaacatgctttaaactgccacagaatgaagcctgccttgtttaatgtgttgtgtgaaatcaaagaaaaaacagttttgagtatccgaggagcccaggaggaggaacccacagacccccagctgatgcggctggacaacatgctgttagcggaaggcgtggcggggcctgagaagggcggagggtcggcggcagcggcggcagcggcggcggcttctggaggggcaggttcagacaactcagtggagcattcagattacagagccaaactctcacagatcagacaaatctaccatacggagctggagaaatacgagcaggcctgcaacgagttcaccacccacgtgatgaatctcctgcgagagcaaagccggaccaggcccatctccccaaaggagattgagcggatggtcagcatcatccaccgcaagttcagctccatccagatgcagctcaagcagagcacgtgcgaggcggtgatgatcctgcgttcccgatttctggatgcgcggcggaagagacggaatttcaacaagcaagcgacagaaatcctgaatgaatatttctattcccatctcagcaacccttaccccagtgaggaagccaaagaggagttagccaagaagtgtggcatcacagtctcccaggtatcaaactggtttggaaataagcgaatccggtacaagaagaacataggtaaatttcaagaggaagccaatatttatgctgccaaaacagctgtcactgctaccaatgtgtcagcccatggaagccaagctaactcgccctcaactcccaactcggctggttcttccagttcttttaacatgtcaaactctggagatttgttcatgagcgtgcagtcactcaatggggattcttaccaaggggcccaggttggagccaacgtgcaatcacaggtggatacccttcgccatgttatcagccagacaggaggatacagtgatggactcgcagccagtcagatgtacagtccgcagggcatcagtcacctcccccggcacccccggcaagcccactatcacttccgacttccaacgtggcatccgtagtaatgaactagtccgtaacttgaaagtatttcgatttcttggctttatatatcttgtggaaaggacgactaccgggacactactcatgttcc

SEQ ID NO: 519 - DNA, 1145 bp, Homo sapiens
  source 1..1145: mol_type = genomic DNA
accgccaccatggacgagcagcccaggctgatgcattcccatgctggggtcgggatggccggacaccccggcctgtcccagcacttgcaggatggggccggagggaccgagggggagggcgggaggaagcaggacattggagacattttacagcaaattatgaccatcacagaccagagtttggatgaggcgcaggccagaaaacatgctttaaactgccacagaatgaagcctgccttgtttaatgtgttgtgtgaaatcaaagaaaaaacagttttgagtatccgaggagcccaggaggaggaacccacagacccccagctgatgcggctggacaacatgctgttagcggaaggcgtggcggggcctgagaagggcggagggtcggcggcagcggcggcagcggcggcggcttctggaggggcaggttcagacaactcagtggagcattcagattacagagccaaactctcacagatcagacaaatctaccatacggagctggagaaatacgagcaggcctgcaacgagttcaccacccacgtgatgaatctcctgcgagagcaaagccggaccaggcccatctccccaaaggagattgagcggatggtcagcatcatccaccgcaagttcagctccatccagatgcagctcaagcagagcacgtgcgaggcggtgatgatcctgcgttcccgatttctggatgcgcggcggaagagacggaatttcaacaagcaagcgacagaaatcctgaatgaatatttctattcccatctcagcaacccttaccccagtgaggaagccaaagaggagttagccaagaagtgtggcatcacagtctcccaggtatcaaactggtttggaaataagcgaatccggtacaagaagaacataggtaaatttcaagaggaagccaatatttatgctgccaaaacagctgtcactgctaccaatgtgtcagcccatggaagccaagctaactcgccctcaactcccaactcggctggtggatacccttcgccatgttatcagccagacaggaggatacagtagtaatgaactagtccgtaacttgaaagtatttcgatttcttggctttatatatcttgtggaaaggacgagtccggctgacattaaagaattaa

SEQ ID NO: 520 - DNA, 1241 bp, Homo sapiens
  source 1..1241: mol_type = genomic DNA
accgccaccatggaatctgagaaaatttatatgaccgcgaacccatatctctgtactgaatgtgggaaaggctacacttgtcttgcatccctgacccagcatcagaaaacacatattggagaaaaaccttatgaatgtaaaatatgtggtaagtcctttacccggaacagtaatcttgttcaacatcaaagaatacatactggagagaaaccttatgaatgtaatgaatgtgggaaagcttttagtcagagcactaatcttattcagcatcaaagagtccatactggggagaaaccttatgagtgtaatgaatgtgaaaaaacctttagtcataggtcatcccttagaaatcatgagagaatccatactggagaaaaaccctatccttgtaatgaatgtgggaaagctttcagccatatctctgcccttactcaacatcatagaattcatactggaaagaaaccatatgaatgtactgaatgtggaaaaaccttcagccgcagcacacacctaattgaacatcagggaattcattctgaggaaaaatcctaccagtgtaagcaatgtcggaaagttttttgccacagtacatcactaatccgacatcagagaacccacacaggagagaaaccatatgaatgtaatgaatgtgggaaagctttcagccataccccagccttcattcaacatcaaagaattcatactggagaaaaaccctatgagtgtaatgcatgtggaaaggccttcaatcggagtgcacatcttactgaacaccagagaactcatactggagagaagccctatgtttgtaaagaatgtggaaaaaccttcagtcgaagtacacaccttactgaacatctaaaaattcattcttgtgtgaaaccctatcaatgtaatgaatgtcagaaactgttttgctatagaacatcactaattcgacatcagaggacgcatacaggagagaaaccctaccagtgtaatgaatgtgggaaatccttcagcttaagctcagctctaactaaacataagcgaatacatacaagggagagaccctatcaatgtactaagtgtggtgatgtcttttgtcatagtacatccttaattcgacatcagaaaactcatttcagaaaggaaaccttagcagagtagtaatgaactagtccgtaacttgaaagtatttcgatttcttggctttatatatcttgtggaaaggacgaaacaacctcgccaaccgaaatatg

SEQ ID NO: 521 - DNA, 1739 bp, Homo sapiens
  source 1..1739: mol_type = genomic DNA
accgccaccatggcgacggacgcggcgctacgccggcttctgaggctgcaccgcacggagatcgcggtggccgtggacagcgccttcccactgctgcacgcgctggctgaccacgacgtggtccccgaggacaagtttcaggagacgcttcatctgaaggaaaaggagggctgcccccaggccttccacgccctcctgtcctggctgctgacccaggactccacagccatcctggacttctggagggtgctgttcaaggactacaacctggagcgctatggccggctgcagcccatcctggacagcttccccaaagatgtggacctcagccagccccggaaggggaggaagcccccggccgtccccaaggctttggtaccgccacccagactccccaccaagaggaaggcctcagaagaggctcgagctgccgcgccagcagccctgactccaaggggcaccgccagcccaggctctcaactgaaggccaagccccccaagaagccggagagcagcgcagagcagcagcgccttccactcgggaacgggattcagaccatgtcagcttcagtccagagagctgtggccatgtcctccggggacgtcccgggagcccgaggggccgtggaggggatcctcatccagcaggtgtttgagtcaggcggctccaagaagtgcatccaggttggcggggagttctacactcccagcaagttcgaagactccggcagtgggaagaacaaggcccgcagcagcagtggcccgaagcctctggttcgagccaagggagcccagggcgctgcccccggtggaggtgaggctaggctgggccagcagggcagcgttcccgcccctctggccctccccagtgacccccagctccaccagaagaatgaggacgagtgtgccgtgtgtcgggacggcggggagctcatctgctgtgacggctgccctcgggccttccacctggcctgcctgtcccctccgctccgggagatccccagtgggacctggaggtgctccagctgcctgcaggcaacagtccaggaggtgcagccccgggcagaggagccccggccccaggagccacccgtggagaccccgctccccccggggcttaggtcggcgggagaggaggtaagaggtccacctggggaacccctagccggcatggacacgactcttgtctacaagcacctgccggctccgccttctgcagccccgctgccagggctggactcctcggccctgcaccccctactgtgtgtgggtcctgagggtcagcagaacctggctcctggtgcgcgttgcggggtgtgcggagatggtacggacgtgctgcggtgtactcactgcgccgctgccttccactggcgctgccacttcccagccggcacctcccggcccgggacgggcctgcgctgcagatcctgctcaggagacgtgaccccagcccctgtggagggggtgctggcccccagccccgcccgcctggcccctgggcctgccaaggatgacactgccagtcacgagcccgctctgcacagggatgacctggagtcccttctgagcgagcacaccttcgatggcatcctgcagtgggccatccagagcatggcccgtccggcggcccccttcccctcctagtaatgaactagtccgtaacttgaaagtatttcgatttcttggctttatatatcttgtggaaaggacgacactagggcgagggagataatagg

SEQ ID NO: 522 - DNA, 4601 bp, Homo sapiens
  source 1..4601: mol_type = genomic DNA
accgccaccatgatgatggcaagaaagcaagatgtccgaattcccacctacaacatcagtgtggtgggattatctgggaccgagaaggaaaagggccagtgtgggattggaaagtcttgtttgtgcaaccgcttcgtgcgcccgagtgctgacgagtttcacttggaccatacctccgtcctcagcaccagtgactttggagggcgagtggtcaataatgaccactttctctactggggagaagttagccgctccctggaggattgtgtggaatgtaagatgcacattgtggagcagactgaatttattgatgatcagacttttcaacctcatcgaagcacggccctgcagccctatatcaagagagctgctgcgaccaagcttgcatcagctgaaaaactcatgtacttttgcactgaccagctggggctggagcaggactttgagcagaaacaaatgccagacggaaagctgctggttgatggttttcttcttggtattgatgttagcaggggcatgaataggaactttgatgaccagctcaagtttgtctccaatctctacaatcagcttgcaaaaacaaaaaagcccatagtggtggtcctgactaagtgtgacgaaggtgttgagcggtacattagagatgcacatacttttgccttaagcaaaaagaacctccaggttgtggagacctcagcgagatccaatgtaaacgtggacttggctttcagcaccttagtgcaactcattgataaaagtcggggaaagacaaaaatcattccttattttgaagctctcaagcagcagagtcagcagatagctacagcaaaagacaagtatgagtggctggtgagtcgcattgtgaaaaaccacaatgagaactggctgagtgtcagccgaaagatgcaggcctctccagaataccaggactatgtctacctggaagggactcagaaagccaagaagctgtttctacagcacatccaccgcctcaagcatgagcatatcgagcgtaggagaaagctgtacctggcagccctgccattagcttttgaagctcttatacctaatctagatgaaatagaccacctaagctgcataaaagccaaaaagctcttagaaaccaagccagaattcttgaagtggtttgttgtgcttgaagagaccccatgggatgccaccagtcacattgacaacatggaaaacgaacggattccctttgatttaatggataccgtccctgcagagcagctatacgaggcccacttagagaagctgaggaacgaaaggaaaagagttgagatgcgaagggcgtttaaagaaaacctggagacttctcctttcataactcccggaaagccttgggaagaggcccgtagttttattatgaatgaggatttctaccagtggctggaggaatctgtatacatggatatttatggcaaacaccaaaagcaaattatagataaagcaaaggaagaatttcaggagttgcttttggaatattcagaattgttttatgaactggagctggatgctaagcccagcaaggagaagatgggtgttattcaggatgttctgggagaggaacagcgatttaaagcattacaaaagctccaagcagagcgtgatgcccttattctgaaacacattcattttgtgtaccacccaacaaaggagacatgccccagctgcccagcttgtgtggacgctaagattgagcacttgattagttctcggtttatccggccgtctgaccggaatcagaaaaattcactctctgaccctaacattgatagaatcaacttggttatattgggcaaagacggccttgcccgagagttggccaatgagattcgagctctttgtacaaatgatgacaagtatgtgatagatggtaaaatgtatgagctttccctgaggccaatagaggggaatgtcaggcttcctgtgaactctttccagacgccaacatttcagccccacggctgtctctgcctttacaattcaaaggaatcgctatcctatgtagtggaaagtatagagaagagtagagagtccacgctgggccggcgggataatcatttagtccatctcccccttacattaattttggttaacaagagaggagacaccagtggagagactctgcatagcttaatacagcaaggtcaacaaattgctagcaaacttcagtgtgtctttctcgaccctgcttctgctggcattggttacggacgcaacattaatgaaaagcaaatcagtcaagttttgaagggactcctggactctaagcgtaacttaaacctggtcagttctactgctagcatcaaagatttggctgatgttgatctgcgaattgttatgtgtctgatgtgtggagatccttttagtgcagatgacatactttttcctgtccttcagtcccaaacctgtaaatcttcccattgtggaagcaacaactctgttttacttgaactaccaatcggactgcacaagaagcggattgaactgtctgttctttcataccattcctcctttagcatcagaaagagccggttggttcatgggtacattgttttttattcagccaaacgtaaggcctctttggctatgttacgtgcctttctttgtgaagtgcaggatattatccctattcagcttgtagcactcactgatggcgctgtagatgtcctggacaatgacttaagtagggaacagctaactgagggggaggagattgctcaagaaattgacggaaggttcacaagcatcccctgtagccaaccccagcataaacttgagatctttcacccattttttaaagatgtggtggaaaaaaagaacataatcgaggctactcatatgtacgataatgctgccgaggcctgtagcaccaccgaagaggtgtttaactccccccgggcaggatcaccgctctgcaactcaaacctgcaggattcagaagaagatatcgagccatcttacagcctgtttcgagaagacacatcactgccttctctgtccaaagaccattctaagctctctatggaactggagggaaatgatgggctgtctttcattatgagcaattttgagagtaaactgaacaacaaagtacctccgccagtcaaaccaaagcctcctgtccattttgaaattacaaagggggatctatcttatttagaccaaggccatagggatggacagaggaagtctgtgtcttctagcccctggctgcctcaggatgggtttgatccttctgactatgctgaacccatggatgctgtggtgaagccaaggaatgaagaagaaaacatatactccgtgccccatgacagcacccaaggcaaaatcatcaccattcggaatatcaacaaagcccagtccaacggcagcgggaatggttctgacagtgaaatggacaccagctctctagagcgagggcgcaaggtttccatcgtgagcaagccagtgctgtacaggacgagatgcacccggctggggcggtttgctagttaccggaccagcttcagcgtggggagtgatgatgagctggggcccatccggaagaaagaggaggatcaggcatcccagggttataaaggggacaatgctgtcattccatacgaaacagacgaagacccgcggaggaggaatattcttcgcagcctaaggaggaacactaagaaaccaaagcccaaaccccggccatccatcacaaaggcaacctgggagagtaactattttggggtgcccttaacaactgtcgtgactccagagaagccgatccccatttttattgaaagatgtattgagtacattgaagccacaggactgagcacggaaggcatctaccgggtcagcgggaacaagtctgagatggagagtctgcagagacagtttgatcaagaccacaacctggacctggcagagaaagactttacggtgaataccgtggctggtgccatgaagagctttttctcagaactgcctgaccccctggtcccgtataacatgcagatcgacttggtggaagcacacaaaatcaacgaccgggagcagaagttgcatgcccttaaggaggtattaaagaaatttccaaaggaaaaccacgaagtcttcaagtatgtcatctctcacctaaacaaggtcagccacaacaacaaggtgaatctcatgaccagcgagaacctctccatctgcttctggcccaccttgatgagacctgatttcagcactatggacgccctcacagccacgcgcacctaccagacaatcattgaactctttatccagcagtgccccttcttcttctacaatcggcccatcaccgagccccccggcgccaggcccagctccccctctgccgtggcttccaccgtccccttcctcacttccacgcctgtcacaagtcagccgtcgcccccacagtcgcctccacccaccccccagtccccaatgcagccactgcttccctcccagcttcaagccgaacacacgctgtagtaatgaactagtccgtaacttgaaagtatttcgatttcttggctttatatatcttgtggaaaggacgactaagcattgtttactgaatctgg

SEQ ID NO: 523 - DNA, 1559 bp, Homo sapiens
  source 1..1559: mol_type = genomic DNA
accgccaccatgcgtgacaacagagctgtatccctctgtcagcaagaatggatgtgcccaggccctgcacaaagggccctctacaggggtgccacccagaggaaggacagtcacgtctcgctggcaacaggtgtgccctggggctatgaagagaccaagacgctcctggctattcttagtagttctcaattttatggaaaactccagacctgtcagcagaacagccagatctacagggccatggcggaaggactctgggagcagggttttctgcggaccccagaacagtgtcgcaccaagttcaaaagcctacagttgagttaccgcaaagtgaggagaggccgtgtgcctgagccttgtatcttttatgaggaaatgaatgctctttcaggctcctgggcctctgcacctcctatggcaagcgatgctgttcctggccaagaaggaagtgatattgaggctggagagctgaatcaccagaatggggaacccacggaggtagaagatggcactgtggatggtgcagacagggatgaaaaggacttcaggaatcctggccaggaagtcaggaaactagacctgccagtgctgttcccaaacagacttggttttgagttcaagaacgagattaaaaaagaaaatctaaaatgggatgattcagaggaagtagaaataaacaaggctttacagagaaagtccagaggagtttattggcactctgagctacaaaaaggcttggagagtgagccaacatcaagaaggcaatgtagaaattctccaggggagagtgaggagaaaaccccatcccaggagaagatgagtcaccagagtttttgtgccagggacaaagcctgtacacatatcctctgtgggaaaaactgctctcagagtgtgcactctccccacaagccagcgctcaaactggaaaaagtatctcaatgtcctgaatgtgggaaaacctttagccgaagttcttatcttgttcggcatcaaagaatccacacaggcgagaagcctcacaagtgcagtgagtgcgggaagggctttagtgagcgctccaacctcactgcccacctacgaactcacacaggggagaggccctatcagtgtgggcaatgtgggaaaagcttcaaccagagttccagcctcattgtccaccagaggacccataccggggaaaagccttaccagtgcattgtctgtggaaagagattcaacaacagttcccagttcagtgctcaccggcgcatccacactggggagagcccatacaagtgtgcagtgtgtgggaaaatcttcaacaatagctcccacttcagtgcccaccgaaaaacccacactggtgaaaagccttacaggtgttctcactgtgagagaggcttcactaagaactctgccctcacccgtcatcagacagtacacatgaaagcagtactctcatcacaggaaggaagagatgcgttatagtaatgaactagtccgtaacttgaaagtatttcgatttcttggctttatatatcttgtggaaaggacgagcgaccgttcttccgctatagcgc

SEQ ID NO: 524 - DNA, 2195 bp, Homo sapiens
  source 1..2195: mol_type = genomic DNA
accgccaccatgatggctgcagtgaagagtaccgaggcacacccatcctcaaacaaggatcccacacagggccagaaatcagccctccagggtaacagccctgactccgaggcctcccgtcagcgcttcaggcagttttgctaccaggaggtaactggcccacatgaagcttttagcaaactctgggaactctgttgtcagtggctgaggccgaagacccactcaaaagaggaaatcctggagctgctggttttggagcagtttctgactatcttgccagaggagatccagacctgggtgagggagcagcatccagaaaacggcgaggaagctgtggctctggttgaggatgtacagagagctcctggacaacaggttctagattctgagaaggacttgaaagtactcatgaaggagatggcccctttgggagcaaccagagaatcactgagatcccaatggaaacaggaggttcagccagaggaaccgacttttaagggatcacagagctcacaccaaagaccaggggaacagtcagaagcctggcttgctcctcaggctcccaggaacctgcctcaaaacacaggtctccacgaccaggagacaggtgctgtggtctggacagctgggtcccagggaccagccatgcgtgacaacagagctgtatccctctgtcagcaagaatggatgtgcccaggccctgcacaaagggccctctacaggggtgccacccagaggaaggacagtcacgtctcgctggcaacaggtgtgccctggggctatgaagagaccaagacgctcctggctattcttagtagttctcaattttatggaaaactccagacctgtcagcagaacagccagatctacagggccatggcggaaggactctgggagcagggttttctgcggaccccagaacagtgtcgcaccaagttcaaaagcctacagttgagttaccgcaaagtgaggagaggccgtgtgcctgagccttgtatcttttatgaggaaatgaatgctctttcaggctcctgggcctctgcacctcctatggcaagcgatgctgttcctggccaagaaggaagtgatattgaggctggagagctgaatcaccagaatggggaacccacggaggtagaagatggcactgtggatggtgcagacagggatgaaaaggacttcaggaatcctggccaggaagtcaggaaactagacctgccagtgctgttcccaaacagacttggttttgagttcaagaacgagattaaaaaagaaaatctaaaatgggatgattcagaggaagtagaaataaacaaggctttacagagaaagtccagaggagtttattggcactctgagctacaaaaaggcttggagagtgagccaacatcaagaaggcaatgtagaaattctccaggggagagtgaggagaaaaccccatcccaggagaagatgagtcaccagagtttttgtgccagggacaaagcctgtacacatatcctctgtgggaaaaactgctctcagagtgtgcactctccccacaagccagcgctcaaactggaaaaagtatctcaatgtcctgaatgtgggaaaacctttagccgaagttcttatcttgttcggcatcaaagaatccacacaggcgagaagcctcacaagtgcagtgagtgcgggaagggctttagtgagcgctccaacctcactgcccacctacgaactcacacaggggagaggccctatcagtgtgggcaatgtgggaaaagcttcaaccagagttccagcctcattgtccaccagaggacccataccggggaaaagccttaccagtgcattgtctgtggaaagagattcaacaacagttcccagttcagtgctcaccggcgcatccacactggggagagcccatacaagtgtgcagtgtgtgggaaaatcttcaacaatagctcccacttcagtgcccaccgaaaaacccacactggtgaaaagccttacaggtgttctcactgtgagagaggcttcactaagaactctgccctcacccgtcatcagacagtacacatgaaagcagtactctcatcacaggaaggaagagatgcgttatagtaatgaactagtccgtaacttgaaagtatttcgatttcttggctttatatatcttgtggaaaggacgaggtaaggcagtcaacattgattac

SEQ ID NO: 525 - DNA, 1328 bp, Homo sapiens
  source 1..1328: mol_type = genomic DNA
accgccaccatggcggaaggactctgggagcagggttttctgcggaccccagaacagtgtcgcaccaagttcaaaagcctacagttgagttaccgcaaagtgaggagaggccgtgtgcctgagccttgtatcttttatgaggaaatgaatgctctttcaggctcctgggcctctgcacctcctatggcaagcgatgctgttcctggccaagaaggaagtgatattgaggctggagagctgaatcaccagaatggggaacccacggaggtagaagatggcactgtggatggtgcagacagggatgaaaaggacttcaggaatcctggccaggaagtcaggaaactagacctgccagtgctgttcccaaacagacttggttttgagttcaagaacgagattaaaaaagaaaatctaaaatgggatgattcagaggaagtagaaataaacaaggctttacagagaaagtccagaggagtttattggcactctgagctacaaaaaggcttggagagtgagccaacatcaagaaggcaatgtagaaattctccaggggagagtgaggagaaaaccccatcccaggagaagatgagtcaccagagtttttgtgccagggacaaagcctgtacacatatcctctgtgggaaaaactgctctcagagtgtgcactctccccacaagccagcgctcaaactggaaaaagtatctcaatgtcctgaatgtgggaaaacctttagccgaagttcttatcttgttcggcatcaaagaatccacacaggcgagaagcctcacaagtgcagtgagtgcgggaagggctttagtgagcgctccaacctcactgcccacctacgaactcacacaggggagaggccctatcagtgtgggcaatgtgggaaaagcttcaaccagagttccagcctcattgtccaccagaggacccataccggggaaaagccttaccagtgcattgtctgtggaaagagattcaacaacagttcccagttcagtgctcaccggcgcatccacactggggagagcccatacaagtgtgcagtgtgtgggaaaatcttcaacaatagctcccacttcagtgcccaccgaaaaacccacactggtgaaaagccttacaggtgttctcactgtgagagaggcttcactaagaactctgccctcacccgtcatcagacagtacacatgaaagcagtactctcatcacaggaaggaagagatgcgttatagtaatgaactagtccgtaacttgaaagtatttcgatttcttggctttatatatcttgtggaaaggacgatatgcacctgacacacgattggtg

SEQ ID NO: 526 - DNA, 1322 bp, Homo sapiens
  source 1..1322: mol_type = genomic DNA
accgccaccatggcttcaacagaggaacagtacgatcttaagattgtgaaagtggaggaagaccctatctgggaccaagaaacccaccttcgagggaacaacttttctggccaagaagcctcccgacaactttttaggcagttttgttaccaagagactcctggtccccgagaagctctgagccggctccgagaactctgtcatcagtggctaaggccagaaatccacaccaaagagcaaatcttggagctgctggtgctggagcaattcctgactatcctgcctgaggagctccaggcctgggtgcgggagcaccatccggagagtggggaggaggctgtggctgtagttgaagatctggaacaagagcttagtgagccagggaaccaggctccagaccatgaacatggacattctgaagtgctcttggaggatgtggaacatctgaaggtcaagcaggaaccaacagacatacagcttcagcctatggtgacacagctcagatatgaatctttttgcctccaccaatttcaagaacaagatggtgaaagtatacctgagaaccaggagttggcatcaaagcaagaaatcttaaaagaaatggaacatttgggggatagcaaactccaaagagatgtatctttggattctaagtacagagaaacttgtaaacgagacagcaaggcagaaaagcagcaggcacattccactggagagagacgccacaggtgcaatgaatgtgggaaaagcttcactaagagttcagtactcattgagcaccagagaatccacactggggagaagccatatgaatgtgaagaatgtgggaaggccttcagccggaggtcaagcctgaatgaacatcggcggagccacactggagagaaaccctatcaatgtaaggagtgtgggaaagccttcagtgccagcaatggcctcactcgacacagaagaatccacacaggggaaaaaccatatgaatgcaaagtgtgtgggaaggctttcctcctcagctcatgccttgttcagcatcagaggatacacactggagagaagcgctatcagtgtcgtgagtgtggcaaagccttcattcagaatgcagggcttttccagcatctccgagtccacactggtgagaaaccctatcagtgcagtcagtgcagtaaactctttagtaagcggacacttcttaagaaacatcagaaaatccacactggagagagaccatagtaatgaactagtccgtaacttgaaagtatttcgatttcttggctttatatatcttgtggaaaggacgaatacaatacaggattctgtccgta

SEQ ID NO: 527 - DNA, 845 bp, Homo sapiens
  source 1..845: mol_type = genomic DNA
accgccaccatggtgacacagctcagatatgaatctttttgcctccaccaatttcaagaacaagatggtgaaagtatacctgagaaccaggagttggcatcaaagcaagaaatcttaaaagaaatggaacatttgggggatagcaaactccaaagagatgtatctttggattctaagtacagagaaacttgtaaacgagacagcaaggcagaaaagcagcaggcacattccactggagagagacgccacaggtgcaatgaatgtgggaaaagcttcactaagagttcagtactcattgagcaccagagaatccacactggggagaagccatatgaatgtgaagaatgtgggaaggccttcagccggaggtcaagcctgaatgaacatcggcggagccacactggagagaaaccctatcaatgtaaggagtgtgggaaagccttcagtgccagcaatggcctcactcgacacagaagaatccacacaggggaaaaaccatatgaatgcaaagtgtgtgggaaggctttcctcctcagctcatgccttgttcagcatcagaggatacacactggagagaagcgctatcagtgtcgtgagtgtggcaaagccttcattcagaatgcagggcttttccagcatctccgagtccacactggtgagaaaccctatcagtgcagtcagtgcagtaaactctttagtaagcggacacttcttaagaaacatcagaaaatccacactggagagagaccatagtaatgaactagtccgtaacttgaaagtatttcgatttcttggctttatatatcttgtggaaaggacgagttgcggaactcctgcccgcgggc

SEQ ID NO: 528 - DNA, 1586 bp, Homo sapiens
  source 1..1586: mol_type = genomic DNA
accgccaccatgtcaggagaggccacagtcttggcctaccatgctccagaagaacaggaaggacttctagttgtcaaggttgaagaagaaaattatgttttggaccaggactttggccttcaggaaaacccctggagccaagaggtattccggcagaagttcaggcagtttagttactctgactccactggccctcgggaggctctgagccggctgcgagagctttgctgtcagtggttgaggccggaggtgcactccaaggagcagatcctggagctgctgatgttggagcagttcctggccatccttcctgaggagctgcaagcttggctgcgagagcatcggccagagaatggagaggaagctgtgactatgctggaggagctggaaaaagaactggaggagccaaggcaacaggacacaactcatggccaagaaatgttctggcaggaaatgacatccacaggagcactgaagtctctgtctctgaatagcccggtgcagcccttagagaaccagtgcaagactgagactcaggagtcccaggctttccaggagagagatggcaggatggtggctggcaaagtgttgatggcaaagcaagaaattgttgaatgtgtagcctcagcagctatgatatcgccgggaaaacttcctggagaaacacattcccaacggatagctgaagaagctttgggaggtctggacaactctaagaagcaaaagggaaatgctgcagggaacaaaatcagtcagcttccttcccaggacagacatttcagtctggcaaccttcaacagaagaatccccacagaacacagtgtccttgaatctcatgagagtgaaggaagtttcagtatgaattcaaatgatattacacaacagagcgttgacactagggaaaagctctatgagtgctttgactgtgggaaggccttttgccagagctcaaagctgattagacatcagagaattcatactggagagagaccttatgcatgtaaagaatgtggcaaagccttcagtttgagctcagaccttgttagacatcagagaattcatagtggtgaaaaaccctatgaatgttgtgaatgtggaaaagccttcaggggcagttcagagctcatcaggcatcggagaatccacactggagagaagccttatgaatgtggagaatgtgggaaggccttcagccggagctcagcccttattcagcataagaaaattcacactggagataaaagctatgaatgtattgcatgtggtaaggcttttggtaggagttctatccttattgaacatcaaagaattcacactggagagaaaccttatgaatgtaatgaatgtggaaaatccttcaatcagagctcagccctcacccagcaccagagaattcacactggagagaagccttatgaatgtagtgaatgtagaaaaacatttaggcataggtcaggccttatgcagcatcagagaacacacaccagagtttagtaatgaactagtccgtaacttgaaagtatttcgatttcttggctttatatatcttgtggaaaggacgaactccgtaagtcgggtgggtgttc

SEQ ID NO: 529 - DNA, 1025 bp, Homo sapiens
  source 1..1025: mol_type = genomic DNA
accgccaccatggtggctggcaaagtgttgatggcaaagcaagaaattgttgaatgtgtagcctcagcagctatgatatcgccgggaaaacttcctggagaaacacattcccaacggatagctgaagaagctttgggaggtctggacaactctaagaagcaaaagggaaatgctgcagggaacaaaatcagtcagcttccttcccaggacagacatttcagtctggcaaccttcaacagaagaatccccacagaacacagtgtccttgaatctcatgagagtgaaggaagtttcagtatgaattcaaatgatattacacaacagagcgttgacactagggaaaagctctatgagtgctttgactgtgggaaggccttttgccagagctcaaagctgattagacatcagagaattcatactggagagagaccttatgcatgtaaagaatgtggcaaagccttcagtttgagctcagaccttgttagacatcagagaattcatagtggtgaaaaaccctatgaatgttgtgaatgtggaaaagccttcaggggcagttcagagctcatcaggcatcggagaatccacactggagagaagccttatgaatgtggagaatgtgggaaggccttcagccggagctcagcccttattcagcataagaaaattcacactggagataaaagctatgaatgtattgcatgtggtaaggcttttggtaggagttctatccttattgaacatcaaagaattcacactggagagaaaccttatgaatgtaatgaatgtggaaaatccttcaatcagagctcagccctcacccagcaccagagaattcacactggagagaagccttatgaatgtagtgaatgtagaaaaacatttaggcataggtcaggccttatgcagcatcagagaacacacaccagagtttagtaatgaactagtccgtaacttgaaagtatttcgatttcttggctttatatatcttgtggaaaggacgaggatcggaccaagtcttcgtcgca

SEQ ID NO: 530 - DNA, 1934 bp, Homo sapiens
  source 1..1934: mol_type = genomic DNA
accgccaccatggatgaagatgaatttgaattgcagccacaagagccaaactcattttttgatggaatagtggatgatgctggcaaaatagaacatgatggttccactggagtgaccatcgatgcagaatcagaaatggatccttgtaaagtggatagcacttgtcctgaagtcatcaaggtgtacatttttaaagctgaccctggagaagatgacttaggtggaactgtagacattgtggagagtgaacctgaaaatgatcatggagttgaactacttgatcagaacagcagtattcgtgttcccagggaaaagatggtttatatgactgtcaatgactctcaacaagaagatgaagatttaaatgttgctgaaattgctgatgaagtttatatggaagtgatcgtaggagaggaggatgctgctgttgcagcagcagcagctgctgtgcatgagcagcaaattgatgaggatgaaatgaaaaccttcgtaccaattgcatgggcagcagcttatggtaataattctgatggaattgaaaaccggaatggcactgcaagtgccctcttgcacatagatgagtctgctggccttggcagactggctaaacagaaaccaaagaaaaagagaagacctgattccaggcagtaccaaacagcaataattattggccctgatggtcatcctttgactgtctatccttgcatgatttgtgggaagaagtttaagtcgaggggttttttgaaaagacacatgaaaaaccatcctgaacaccttgccaagaagaagtaccactgtactgactgtgattacactaccaataagaagataagtttacataaccacctggagagccacaagctgaccagcaaggcagagaaggccattgaatgtgatgagtgtgggaagcatttttctcatgcaggggctttgtttactcacaaaatggtgcataaggaaaaaggggccaacaaaatgcacaagtgtaaattctgtgaatatgagacagctgaacaggggttattgaatcgccacctcttggcagtccacagcaagaactttcctcatatttgtgtggagtgtggtaaaggtttccgacacccgtcggaactgagaaagcacatgcgaatccataccggcgagaagccataccaatgccagtactgtgaatataggtctgcagactcttctaacttgaaaacacatataaaaacaaagcatagtaaagagatgccattcaagtgtgacatttgtcttctgactttctcagataccaaagaagtgcagcaacatactcttgtccaccaagaaagcaaaacacatcagtgtttgcattgcgaccacaagagttcaaactcaagtgatttgaaacgacatgtaatttcagttcatacgaaagactatcctcataagtgtgagatgtgcgagaaaggctttcacaggccttcagaacttaagaaacatgtggctgtccacaaaggtaaaaaaatgcaccaatgtagacattgtgactttaagattgcagacccatttgttctaagtcgccatattctctcagttcacacaaaggatcttccatttaggtgtaagagatgtagaaagggatttaggcaacaaaatgagcttaaaaagcatatgaagacacacagtggcaggaaagtatatcagtgtgagtactgtgagtatagcactacagatgcctcaggctttaaacggcacgttatttccattcatacaaaagactatcctcatcggtgtgagtactgcaagaaaggcttccgaagaccttcagaaaagaaccagcacataatgagacaccataaagaagttggtctgccctagtaatgaactagtccgtaacttgaaagtatttcgatttcttggctttatatatcttgtggaaaggacgagagtccactacaggccgggcttga

SEQ ID NO: 531 - DNA, 2507 bp, Homo sapiens
  source 1..2507: mol_type = genomic DNA
accgccaccatggatgaagatgaatttgaattgcagccacaagagccaaactcattttttgatggaataggagctgatgctacacacatggatggtgatcagattgttgtggaaatacaagaagcagtttttgtttctaatattgtggattctgacataactgtgcataactttgttcctgatgacccagactcagttgtaatccaagatgttgttgaagatgttgtcatagaggaggatgttcagtgctcagatatcttagaagaggcagatgtatctgaaaatgtcatcattcctgagcaagtgctggactcagatgtaactgaagaagtttctttaccacactgcacagtcccagatgatgttttagcttctgacattacttcaacctcaatgtctatgccagaacatgttttaacgagtgaatccatgcatgtgtgtgacattggacatgttgaacatatggtgcatgatagtgtagtggaagcagaaatcattactgatcctctgacgagtgacatagtttcagaagaagtattggtagcagactgtgcccctgaagcagtcatagatgccagcgggatctcagtggaccagcaagataatgacaaagccagctgtgaggactacctaatgatttcgttggatgatgctggcaaaatagaacatgatggttccactggagtgaccatcgatgcagaatcagaaatggatccttgtaaagtggatagcacttgtcctgaagtcatcaaggtgtacatttttaaagctgaccctggagaagatgacttaggtggaactgtagacattgtggagagtgaacctgaaaatgatcatggagttgaactacttgatcagaacagcagtattcgtgttcccagggaaaagatggtttatatgactgtcaatgactctcaacaagaagatgaagatttaaatgttgctgaaattgctgatgaagtttatatggaagtgatcgtaggagaggaggatgctgctgttgcagcagcagcagctgctgtgcatgagcagcaaattgatgaggatgaaatgaaaaccttcgtaccaattgcatgggcagcagcttatggtaataattctgatggaattgaaaaccggaatggcactgcaagtgccctcttgcacatagatgagtctgctggccttggcagactggctaaacagaaaccaaagaaaaagagaagacctgattccaggcagtaccaaacagcaataattattggccctgatggtcatcctttgactgtctatccttgcatgatttgtgggaagaagtttaagtcgaggggttttttgaaaagacacatgaaaaaccatcctgaacaccttgccaagaagaagtaccactgtactgactgtgattacactaccaataagaagataagtttacataaccacctggagagccacaagctgaccagcaaggcagagaaggccattgaatgtgatgagtgtgggaagcatttttctcatgcaggggctttgtttactcacaaaatggtgcataaggaaaaaggggccaacaaaatgcacaagtgtaaattctgtgaatatgagacagctgaacaggggttattgaatcgccacctcttggcagtccacagcaagaactttcctcatatttgtgtggagtgtggtaaaggtttccgacacccgtcggaactgagaaagcacatgcgaatccataccggcgagaagccataccaatgccagtactgtgaatataggtctgcagactcttctaacttgaaaacacatataaaaacaaagcatagtaaagagatgccattcaagtgtgacatttgtcttctgactttctcagataccaaagaagtgcagcaacatactcttgtccaccaagaaagcaaaacacatcagtgtttgcattgcgaccacaagagttcaaactcaagtgatttgaaacgacatgtaatttcagttcatacgaaagactatcctcataagtgtgagatgtgcgagaaaggctttcacaggccttcagaacttaagaaacatgtggctgtccacaaaggtaaaaaaatgcaccaatgtagacattgtgactttaagattgcagacccatttgttctaagtcgccatattctctcagttcacacaaaggatcttccatttaggtgtaagagatgtagaaagggatttaggcaacaaaatgagcttaaaaagcatatgaagacacacagtggcaggaaagtatatcagtgtgagtactgtgagtatagcactacagatgcctcaggctttaaacggcacgttatttccattcatacaaaagactatcctcatcggtgtgagtactgcaagaaaggcttccgaagaccttcagaaaagaaccagcacataatgagacaccataaagaagttggtctgccctagtaatgaactagtccgtaacttgaaagtatttcgatttcttggctttatatatcttgtggaaaggacgacatacctttctatgcctcactcca

SEQ ID NO: 532 - DNA, 2636 bp, Homo sapiens
  source 1..2636: mol_type = genomic DNA
accgccaccatggatgaagatgggcttgaattacaacaagagccaaactcattttttgatgcaacagacagggtctcgttctgtcacccaggctggagcacagtggcgccatctgggtccactgcaacctccgcctcccaggctcaagtgatctgctcagcttcccgagtaactggggctacaggagctgatggtacacacatggatggtgatcaaattgttgtggaagtacaagaaactgtttttgtttcagatgttgtggattcagacataactgtgcataactttgttcctgatgacccagattcagttgtaatccaagatgttattgaggacgttgttatagaagatgttcagtgcccagatatcatggaagaagcagatgtgtctgaaacggtcatcattcctgagcaagtgctggactcagatgtaactgaagaagtttctttagcacattgcacagtcccagatgatgttttagcttctgacattacttcagcctcaatgtctatgccagaacacgtcttgacgggtgattctatacatgtgtctgacgttggacatgttggacatgttggacatgttgaacatgtggttcatgatagtgtagtggaagcagaaattgtcactgatcctctgactaccgacgtagtttcagaagaagtattggtagcagactgtgcctctgaagcagtcatagatgccaatgggatccctgtggaccagcaggatgatgacaaaggcaactgtgaggactaccttatgatttccttggatgatgctggcaaaatagaacacgatggttcttctggaatgaccatggacacagagtcggaaattgatccttgtaaagtggatggcacttgccctgaggtcatcaaggtgtacatttttaaagctgaccctggagaagatgacttaggtggaactgtagacattgtggagagtgagcctgagaatgatcatggagttgaactgcttgatcagaacagcagtattcgtgttcccagggaaaagatggtttatatgactgtcaatgactctcagccagaagatgaagatttaaatgttgctgaaatcgctgacgaagtttatatggaagtgatcgtaggagaggaggatgctgcagcagcagcggcagccgccgccgtgcacgagcagcaaatggatgacaatgaaatcaaaaccttcatgccgattgcatgggcagcagcttatggtaataattctgatggaattgaaaaccggaatggcactgcaagtgccctcttgcacatagatgagtctgctggcctcggcagactggctaaacaaaaaccaaagaaaaggagaagacctgattccaggcagtaccaaacagcaataattattggccctgatggacatcctttgactgtctatccttgcatgatttgtgggaagaagtttaagtcgagaggttttttgaaaaggcacatgaaaaaccatcccgaacaccttgccaagaagaaataccgctgtactgactgtgattacactaccaacaagaagataagtttacacaaccacctggagagccacaagctgaccagcaaggcagagaaggccattgaatgcgatgagtgtgggaagcatttctctcatgcaggggctttgtttactcacaaaatggtgcataaggaaaaaggagccaacaaaatgcacaagtgtaaattctgtgaatacgagacagctgaacaagggttattgaatcgccacctcttggcagtccacagcaagaactttcctcatatttgtgtggagtgtggtaagggttttcgtcacccgtcagagctcaaaaagcacatgagaatccatactggggagaagccgtaccaatgccagtactgcgaatataggtctgcagactcttctaacttgaaaacgcatgtcaaaactaagcatagtaaagagatgccattcaagtgtgacatttgtcttctgactttctcggataccaaagaggtgcagcaacatgctcttatccaccaagaaagcaaaacacaccagtgtttgcattgcgaccacaagagttcgaactcaagtgatttgaaacgacacataatttcagttcacacgaaagactacccccataagtgtgacatgtgtgataaaggctttcacaggccttcagaactcaagaaacacgtggctgcccacaagggcaaaaaaatgcaccagtgtagacattgtgactttaagattgcagatccatttgttctaagtcgccatattctctcagttcacacaaaggatcttccatttaggtgcaagagatgtagaaagggatttaggcaacagagtgagcttaaaaagcatatgaagacacacagtggcaggaaagtgtatcagtgtgagtactgtgagtatagcactacagatgcctcaggctttaaacggcacgttatttccattcacacgaaagactatcctcaccggtgtgagtactgcaagaaaggcttccgaagaccttcagaaaagaaccagcacataatgcgacatcataaagaagttggcctgccctagtaatgaactagtccgtaacttgaaagtatttcgatttcttggctttatatatcttgtggaaaggacgatctaaagactatgatgtctccttg

SEQ ID NO: 533 - DNA, 1832 bp, Homo sapiens
  source 1..1832: mol_type = genomic DNA
accgccaccatgaccatggacacagagtcggaaattgatccttgtaaagtggatggcacttgccctgaggtcatcaaggtgtacatttttaaagctgaccctggagaagatgacttaggtggaactgtagacattgtggagagtgagcctgagaatgatcatggagttgaactgcttgatcagaacagcagtattcgtgttcccagggaaaagatggtttatatgactgtcaatgactctcagccagaagatgaagatttaaatgttgctgaaatcgctgacgaagtttatatggaagtgatcgtaggagaggaggatgctgcagcagcagcggcagccgccgccgtgcacgagcagcaaatggatgacaatgaaatcaaaaccttcatgccgattgcatgggcagcagcttatggtaataattctgatggaattgaaaaccggaatggcactgcaagtgccctcttgcacatagatgagtctgctggcctcggcagactggctaaacaaaaaccaaagaaaaggagaagacctgattccaggcagtaccaaacagcaataattattggccctgatggacatcctttgactgtctatccttgcatgatttgtgggaagaagtttaagtcgagaggttttttgaaaaggcacatgaaaaaccatcccgaacaccttgccaagaagaaataccgctgtactgactgtgattacactaccaacaagaagataagtttacacaaccacctggagagccacaagctgaccagcaaggcagagaaggccattgaatgcgatgagtgtgggaagcatttctctcatgcaggggctttgtttactcacaaaatggtgcataaggaaaaaggagccaacaaaatgcacaagtgtaaattctgtgaatacgagacagctgaacaagggttattgaatcgccacctcttggcagtccacagcaagaactttcctcatatttgtgtggagtgtggtaagggttttcgtcacccgtcagagctcaaaaagcacatgagaatccatactggggagaagccgtaccaatgccagtactgcgaatataggtctgcagactcttctaacttgaaaacgcatgtcaaaactaagcatagtaaagagatgccattcaagtgtgacatttgtcttctgactttctcggataccaaagaggtgcagcaacatgctcttatccaccaagaaagcaaaacacaccagtgtttgcattgcgaccacaagagttcgaactcaagtgatttgaaacgacacataatttcagttcacacgaaagactacccccataagtgtgacatgtgtgataaaggctttcacaggccttcagaactcaagaaacacgtggctgcccacaagggcaaaaaaatgcaccagtgtagacattgtgactttaagattgcagatccatttgttctaagtcgccatattctctcagttcacacaaaggatcttccatttaggtgcaagagatgtagaaagggatttaggcaacagagtgagcttaaaaagcatatgaagacacacagtggcaggaaagtgtatcagtgtgagtactgtgagtatagcactacagatgcctcaggctttaaacggcacgttatttccattcacacgaaagactatcctcaccggtgtgagtactgcaagaaaggcttccgaagaccttcagaaaagaaccagcacataatgcgacatcataaagaagttggcctgccctagtaatgaactagtccgtaacttgaaagtatttcgatttcttggctttatatatcttgtggaaaggacgagactcgtcgcgaagacatgcggta

SEQ ID NO: 534 - DNA, 2519 bp, Homo sapiens
  source 1..2519: mol_type = genomic DNA
accgccaccatggatgaagatgggcttgaattacaacaagagccaaactcattttttgatgcaacaggagctgatggtacacacatggatggtgatcaaattgttgtggaagtacaagaaactgtttttgtttcagatgttgtggattcagacataactgtgcataactttgttcctgatgacccagattcagttgtaatccaagatgttattgaggacgttgttatagaagatgttcagtgcccagatatcatggaagaagcagatgtgtctgaaacggtcatcattcctgagcaagtgctggactcagatgtaactgaagaagtttctttagcacattgcacagtcccagatgatgttttagcttctgacattacttcagcctcaatgtctatgccagaacacgtcttgacgggtgattctatacatgtgtctgacgttggacatgttggacatgttggacatgttgaacatgtggttcatgatagtgtagtggaagcagaaattgtcactgatcctctgactaccgacgtagtttcagaagaagtattggtagcagactgtgcctctgaagcagtcatagatgccaatgggatccctgtggaccagcaggatgatgacaaaggcaactgtgaggactaccttatgatttccttggatgatgctggcaaaatagaacacgatggttcttctggaatgaccatggacacagagtcggaaattgatccttgtaaagtggatggcacttgccctgaggtcatcaaggtgtacatttttaaagctgaccctggagaagatgacttaggtggaactgtagacattgtggagagtgagcctgagaatgatcatggagttgaactgcttgatcagaacagcagtattcgtgttcccagggaaaagatggtttatatgactgtcaatgactctcagccagaagatgaagatttaaatgttgctgaaatcgctgacgaagtttatatggaagtgatcgtaggagaggaggatgctgcagcagcagcggcagccgccgccgtgcacgagcagcaaatggatgacaatgaaatcaaaaccttcatgccgattgcatgggcagcagcttatggtaataattctgatggaattgaaaaccggaatggcactgcaagtgccctcttgcacatagatgagtctgctggcctcggcagactggctaaacaaaaaccaaagaaaaggagaagacctgattccaggcagtaccaaacagcaataattattggccctgatggacatcctttgactgtctatccttgcatgatttgtgggaagaagtttaagtcgagaggttttttgaaaaggcacatgaaaaaccatcccgaacaccttgccaagaagaaataccgctgtactgactgtgattacactaccaacaagaagataagtttacacaaccacctggagagccacaagctgaccagcaaggcagagaaggccattgaatgcgatgagtgtgggaagcatttctctcatgcaggggctttgtttactcacaaaatggtgcataaggaaaaaggagccaacaaaatgcacaagtgtaaattctgtgaatacgagacagctgaacaagggttattgaatcgccacctcttggcagtccacagcaagaactttcctcatatttgtgtggagtgtggtaagggttttcgtcacccgtcagagctcaaaaagcacatgagaatccatactggggagaagccgtaccaatgccagtactgcgaatataggtctgcagactcttctaacttgaaaacgcatgtcaaaactaagcatagtaaagagatgccattcaagtgtgacatttgtcttctgactttctcggataccaaagaggtgcagcaacatgctcttatccaccaagaaagcaaaacacaccagtgtttgcattgcgaccacaagagttcgaactcaagtgatttgaaacgacacataatttcagttcacacgaaagactacccccataagtgtgacatgtgtgataaaggctttcacaggccttcagaactcaagaaacacgtggctgcccacaagggcaaaaaaatgcaccagtgtagacattgtgactttaagattgcagatccatttgttctaagtcgccatattctctcagttcacacaaaggatcttccatttaggtgcaagagatgtagaaagggatttaggcaacagagtgagcttaaaaagcatatgaagacacacagtggcaggaaagtgtatcagtgtgagtactgtgagtatagcactacagatgcctcaggctttaaacggcacgttatttccattcacacgaaagactatcctcaccggtgtgagtactgcaagaaaggcttccgaagaccttcagaaaagaaccagcacataatgcgacatcataaagaagttggcctgccctagtaatgaactagtccgtaacttgaaagtatttcgatttcttggctttatatatcttgtggaaaggacgaacttgtataacgctttgtcctctc

SEQ ID NO: 535 - DNA, 1586 bp, Homo sapiens
  source 1..1586: mol_type = genomic DNA
accgccaccatgcagggagaacgcttgagaccagggttagattcccaaaaggagaagcttcctggaaaaatgagccccaaacatgatggtttagggacagctgatagtgtgtgttcaaggattatacaggatcgagtctccttaggagatgatgtccatgactgtgactcacatggatcaggtaaaaatccagttattcaggaagaggaaaatatctttaaatgcaatgaatgtgaaaaagtgtttaacaagaaacgcctgcttgctcggcatgagaggattcactctggagtgaagccctatgaatgcacagagtgtggaaaaacctttagcaagagtacatacctcctgcagcaccacatggtccacactggggagaagccctataagtgcatggagtgtgggaaggcttttaatcggaagtcacaccttacccagcaccagcggattcacagtggagagaagccttataagtgcagtgaatgtggaaaggccttcacccaccgctccacttttgtcttgcataacaggagccacactggagaaaaaccctttgtgtgcaaagagtgtggcaaagcctttcgagataggccaggtttcattcgacactacatcatccacagtggtgagaatccctacgagtgcttcgaatgtggcaaggtcttcaaacacagatcatacctcatgtggcaccagcagactcataccggggagaagccctatgagtgcagtgaatgtgggaaggccttctgtgagagcgcagcgctgattcaccactatgtcatccacactggagagaagccctttgagtgcctcgagtgtgggaaggctttcaaccaccgatcctacctcaaaaggcaccagcggattcacactggggagaagccatatgtgtgtagtgaatgcggaaaggccttcacccactgctctactttcatcttgcataaaagggcccacactggagaaaaacctttcgagtgcaaagagtgtgggaaagcctttagcaatagggcagacctcattcgccacttcagcatccacactggagagaagccctatgagtgcatggagtgtggaaaggccttcaaccgcaggtcaggcctcacaaggcaccagcggattcatagtggagagaagccctatgaatgcatcgagtgtgggaaaacattttgctggagcacaaacctcattcgacactctatcatccacactggagagaagccgtatgagtgcagtgaatgtggaaaggccttcagtcgcagctcgtccctcactcagcatcaaaggatgcatactgggagaaatcctatcagtgtaacagatgtgggaagaccttttacaagtgggcagacctcagtcaacatccaagaacttttattggggaaaaactttttgaatgtcaccactgaggaaaatcttttgcaagaggaagcatcttacatggcatctgatcgtacataccaaagagaaaccccacaagtgtcttcactgtagtaatgaactagtccgtaacttgaaagtatttcgatttcttggctttatatatcttgtggaaaggacgaaatcataatagagccgtagcgata

SEQ ID NO: 536 - DNA, 1985 bp, Homo sapiens
  source 1..1985: mol_type = genomic DNA
accgccaccatggcgatggctttgacggacccggcgcaggtgtctgtgacctttgatgatgtggctgtgactttcacccaggaggagtggggccagctggacctagctcagcggaccctgtaccaggaggtgatgctggaaaactgtgggctcctggtatctctggggtgtcctgttcccagacctgagctgatctaccacctagagcatgggcaggagccatggaccaggaaggaagacctctcccaaggcacctgtccaggtgacaaaggaaaacccaagagcacagaacctaccacctgtgagctagccttgtctgaaggaatctctttttggggacaactaacacaaggagcttcaggggactcccagttggggcaacccaaggatcaggatgggttttcagaaatgcagggagaacgcttgagaccagggttagattcccaaaaggagaagcttcctggaaaaatgagccccaaacatgatggtttagggacagctgatagtgtgtgttcaaggattatacaggatcgagtctccttaggagatgatgtccatgactgtgactcacatggatcaggtaaaaatccagttattcaggaagaggaaaatatctttaaatgcaatgaatgtgaaaaagtgtttaacaagaaacgcctgcttgctcggcatgagaggattcactctggagtgaagccctatgaatgcacagagtgtggaaaaacctttagcaagagtacatacctcctgcagcaccacatggtccacactggggagaagccctataagtgcatggagtgtgggaaggcttttaatcggaagtcacaccttacccagcaccagcggattcacagtggagagaagccttataagtgcagtgaatgtggaaaggccttcacccaccgctccacttttgtcttgcataacaggagccacactggagaaaaaccctttgtgtgcaaagagtgtggcaaagcctttcgagataggccaggtttcattcgacactacatcatccacagtggtgagaatccctacgagtgcttcgaatgtggcaaggtcttcaaacacagatcatacctcatgtggcaccagcagactcataccggggagaagccctatgagtgcagtgaatgtgggaaggccttctgtgagagcgcagcgctgattcaccactatgtcatccacactggagagaagccctttgagtgcctcgagtgtgggaaggctttcaaccaccgatcctacctcaaaaggcaccagcggattcacactggggagaagccatatgtgtgtagtgaatgcggaaaggccttcacccactgctctactttcatcttgcataaaagggcccacactggagaaaaacctttcgagtgcaaagagtgtgggaaagcctttagcaatagggcagacctcattcgccacttcagcatccacactggagagaagccctatgagtgcatggagtgtggaaaggccttcaaccgcaggtcaggcctcacaaggcaccagcggattcatagtggagagaagccctatgaatgcatcgagtgtgggaaaacattttgctggagcacaaacctcattcgacactctatcatccacactggagagaagccgtatgagtgcagtgaatgtggaaaggccttcagtcgcagctcgtccctcactcagcatcaaaggatgcatactgggagaaatcctatcagtgtaacagatgtgggaagaccttttacaagtgggcagacctcagtcaacatccaagaacttttattggggaaaaactttttgaatgtcaccactgaggaaaatcttttgcaagaggaagcatcttacatggcatctgatcgtacataccaaagagaaaccccacaagtgtcttcactgtagtaatgaactagtccgtaacttgaaagtatttcgatttcttggctttatatatcttgtggaaaggacgagtaaatgggacagctggcttaccc

SEQ ID NO: 537 - DNA, 3044 bp, Homo sapiens
  source 1..3044: mol_type = genomic DNA
accgccaccatgataatggcatcagctgctaaggaatttaaaatggacaacttttcacctaaagctggcactagcaaattgcaacagacagtaccagctgatgcatctcctgattctaagtgtcctatatgcttggatagatttgataatgtgtcttacttagatcgctgcttacataagttctgttttcgctgtgtacaggagtggtcaaaaaacaaagctgaatgcccactatgtaaacagccctttgattctattttccattctgtgagggcagaagatgacttcaaggagtatgtcctaaggccttcgtataatggttcttttgtcacccctgatcgacgatttcgctaccgtacaactctgacaagggaacgaaatgcttctgtgtattcacctagtggtcctgtgaacagaagaacaacaactccaccggatagtggagtactgtttgaagggttaggcatttcaacaagacctagagatgttgaaattcctcagtttatgagacagattgcagtaaggaggccaactacggcagatgaaagatctttgcggaaaattcaagaacaagatattattaattttagacgaactctttatcgtgctggtgctcgagttagaaatattgaagatggtggccgctacagggatatttcagctgaatttttccgtagaaatccagcttgccttcacagattagtcccctggttaaaacgtgaacttacagttctttttggagctcatggatctttagtgaatattgtccagcatattatcatgagtaatgttactcgctatgacttggagagtcaggcatttgtgtctgatttaagaccatttttacttaatcgaactgagcattttatacatgaatttatcagttttgcccgatctccttttaacatggcagcctttgaccagcatgccaattatgattgccctgctccttcatacgaagaaggcagccattctgattcttcagtcataacaatatctccagatgaggctgagacccaagagctggatattaatgtagccactgttagtcaggcaccatgggatgatgaaactccaggaccatcttactcaagctcagagcaggtacacgttactatgtcttctcttttaaatacttctgacagttcagatgaagaacttgtcacaggaggagccacgtctcagatacaaggagtacaaaccaatgacgacctaaataatgacagtgatgattcttcagataattgtgtcattgttgggtttgttaaaccactagctgagaggaccccagaacttgttgaactgtcctctgattctgaggacttaggttcttatgagaaaatggagacagtgaagacacaagaacaggagcaatcttacagttctggtgatagcgatgttagtagatgctcatctccacactctgtccttggaaaggatgaacaaataaataaaggtcattgtgattctagtacaagaatcaaatcaaagaaggaagagaaacgatctacatcattgtcatctcccagaaacctgaactcatctgtaagaggagacagagtatattctccatataaccatagacacagaaagaggggaagatcaagaagttcagattcacgttctcagagtagaagtgggcatgatcagaagaatcatagaaagcatcatgggaagaaaagaatgaaaagtaaacgatccagaagcagggaaagtagcagacctagagggagaagagacaaaaagagatcaagaactagagatagcagttggtccagaagaagccaaactctgtctctaagtagtgaaagcacaagcagatcaaggtctcgtagcagtgatcatggtaaaagaagatcacggagcagaaatagagatcgttattatttaagaaataattatggaagcagatacaaatgggagtatacttattacagtagaaacaaggacagggatgggtacgaatcatcttacaggaggaggactctgtccagagctcattattctagacagtcttcaagtccagaatttagagttcagtccttttctgaaagaacaaatgctaggaaaaaaaataatcacagtgagaggaagtattactactatgaaaggcacagatcaaggagcctgtctagtaacagatcaaggactgcatctaccgggactgaccgggtgagaaatgaaaagcctggagggaaacgaaaatacaaaacacggcatttggagggtactaacgaagtggctcagccatctcgtgaatttgcttctaaagcaaaggacagtcattaccaaaaatcttcatcaaaattggatggaaactacaaaaatgagagtgataccttttcagacagccgatcatcagacagagagacaaaacacaaaaggagaaaaaggaagacccggagcctaagtgtagagatagtttatgaaggaaaagctactgatacaactaaacaccataaaaagaaaaagaagaaacataagaagaagcataagaaacaccatggagataatgcttcacgttccccagttgtaattaccattgacagtgacagtgataaggattctgaagtaaaggaggatacagaatgtgacaatagtggtcctcaagaccctctacaaaatgagtttttggctccttccttggaaccatttgaaactaaagatgtagttacaatagaagctgaatttggtgtgctggacaaggaatgtgatattgccacacttagtaacaacttgaataatgccaacaaaactgtagataatattccacctctggcagcttcagttgaacaaactctcgatgtaagagaagagagcacctttgtttctgatttggagaaccagcccagtaacattgtgtctcttcaaactgagccatcaaggcaattgccatcgccacggacatcattaatgtcagtatgtcttggtagagactgtgatatgtcttagtaatgaactagtccgtaacttgaaagtatttcgatttcttggctttatatatcttgtggaaaggacgacctggtgcaagttagactaggcta

SEQ ID NO: 538 - DNA, 3239 bp, Homo sapiens
  source 1..3239: mol_type = genomic DNA
accgccaccatggggtcgcagccgccgctggggtctccgctgtctcgcgaggagggtgaagcgcccccgcctgctcccgcttcggagggtaggcggagaagtcgccgggtacgccttcgcggatcctgccgacaccgacctagctttctgggctgccgggagctcgcggcgagcgccccagccaggcctgcgccggcatcctccgagataatggcatcagctgctaaggaatttaaaatggacaacttttcacctaaagctggcactagcaaattgcaacagacagtaccagctgatgcatctcctgattctaagtgtcctatatgcttggatagatttgataatgtgtcttacttagatcgctgcttacataagttctgttttcgctgtgtacaggagtggtcaaaaaacaaagctgaatgcccactatgtaaacagccctttgattctattttccattctgtgagggcagaagatgacttcaaggagtatgtcctaaggccttcgtataatggttcttttgtcacccctgatcgacgatttcgctaccgtacaactctgacaagggaacgaaatgcttctgtgtattcacctagtggtcctgtgaacagaagaacaacaactccaccggatagtggagtactgtttgaagggttaggcatttcaacaagacctagagatgttgaaattcctcagtttatgagacagattgcagtaaggaggccaactacggcagatgaaagatctttgcggaaaattcaagaacaagatattattaattttagacgaactctttatcgtgctggtgctcgagttagaaatattgaagatggtggccgctacagggatatttcagctgaatttttccgtagaaatccagcttgccttcacagattagtcccctggttaaaacgtgaacttacagttctttttggagctcatggatctttagtgaatattgtccagcatattatcatgagtaatgttactcgctatgacttggagagtcaggcatttgtgtctgatttaagaccatttttacttaatcgaactgagcattttatacatgaatttatcagttttgcccgatctccttttaacatggcagcctttgaccagcatgccaattatgattgccctgctccttcatacgaagaaggcagccattctgattcttcagtcataacaatatctccagatgaggctgagacccaagagctggatattaatgtagccactgttagtcaggcaccatgggatgatgaaactccaggaccatcttactcaagctcagagcaggtacacgttactatgtcttctcttttaaatacttctgacagttcagatgaagaacttgtcacaggaggagccacgtctcagatacaaggagtacaaaccaatgacgacctaaataatgacagtgatgattcttcagataattgtgtcattgttgggtttgttaaaccactagctgagaggaccccagaacttgttgaactgtcctctgattctgaggacttaggttcttatgagaaaatggagacagtgaagacacaagaacaggagcaatcttacagttctggtgatagcgatgttagtagatgctcatctccacactctgtccttggaaaggatgaacaaataaataaaggtcattgtgattctagtacaagaatcaaatcaaagaaggaagagaaacgatctacatcattgtcatctcccagaaacctgaactcatctgtaagaggagacagagtatattctccatataaccatagacacagaaagaggggaagatcaagaagttcagattcacgttctcagagtagaagtgggcatgatcagaagaatcatagaaagcatcatgggaagaaaagaatgaaaagtaaacgatccagaagcagggaaagtagcagacctagagggagaagagacaaaaagagatcaagaactagagatagcagttggtccagaagaagccaaactctgtctctaagtagtgaaagcacaagcagatcaaggtctcgtagcagtgatcatggtaaaagaagatcacggagcagaaatagagatcgttattatttaagaaataattatggaagcagatacaaatgggagtatacttattacagtagaaacaaggacagggatgggtacgaatcatcttacaggaggaggactctgtccagagctcattattctagacagtcttcaagtccagaatttagagttcagtccttttctgaaagaacaaatgctaggaaaaaaaataatcacagtgagaggaagtattactactatgaaaggcacagatcaaggagcctgtctagtaacagatcaaggactgcatctaccgggactgaccgggtgagaaatgaaaagcctggagggaaacgaaaatacaaaacacggcatttggagggtactaacgaagtggctcagccatctcgtgaatttgcttctaaagcaaaggacagtcattaccaaaaatcttcatcaaaattggatggaaactacaaaaatgagagtgataccttttcagacagccgatcatcagacagagagacaaaacacaaaaggagaaaaaggaagacccggagcctaagtgtagagatagtttatgaaggaaaagctactgatacaactaaacaccataaaaagaaaaagaagaaacataagaagaagcataagaaacaccatggagataatgcttcacgttccccagttgtaattaccattgacagtgacagtgataaggattctgaagtaaaggaggatacagaatgtgacaatagtggtcctcaagaccctctacaaaatgagtttttggctccttccttggaaccatttgaaactaaagatgtagttacaatagaagctgaatttggtgtgctggacaaggaatgtgatattgccacacttagtaacaacttgaataatgccaacaaaactgtagataatattccacctctggcagcttcagttgaacaaactctcgatgtaagagaagagagcacctttgtttctgatttggagaaccagcccagtaacattgtgtctcttcaaactgagccatcaaggcaattgccatcgccacggacatcattaatgtcagtatgtcttggtagagactgtgatatgtcttagtaatgaactagtccgtaacttgaaagtatttcgatttcttggctttatatatcttgtggaaaggacgaagactcagagcgtccgagcgtatg

SEQ ID NO: 539 - DNA, 5000 bp, Homo sapiens
  source 1..5000: mol_type = genomic DNA
accgccaccatgccggcgcgtaccgccccagcccgggtgcccacactggccgtcccggccatctcgctgcccgacgatgtccgcaggcggctcaaagatttggaaagagacagcttaacagaaaaggaatgtgtgaaggagaaattgaatctcttgcacgaatttctgcaaacagaaataaagaatcagttatgtgacttggaaaccaaattacgtaaagaagaattatccgaggagggctacctggctaaagtcaaatcccttttaaataaagatttgtccttggagaacggtgctcatgcttacaaccgggaagtgaatggacgtctagaaaacgggaaccaagcaagaagtgaagcccgtagagtgggaatggcagatgccaacagcccccccaaacccctttccaaacctcgcacgcccaggaggagcaagtccgatggagaggctaagcgttcaagagaccctcctgcctcagcctcccaagtaactgggattagagctgaaccttcacctagccccaggattacaaggaaaagcaccaggcaaaccaccatcacatctcattttgcaaagggccctgccaaacggaaacctcaggaagagtctgaaagagccaaatcggatgagtccatcaaggaagaagacaaagaccaggatgagaagagacgtagagttacatccagagaacgagttgctagaccgcttcctgcagaagaacctgaaagagcaaaatcaggaacgcgcactgaaaaggaagaagaaagagatgaaaaagaagaaaagagactccgaagtcaaaccaaagaaccaacacccaaacagaaactgaaggaggagccggacagagaagccagggcaggcgtgcaggctgacgaggacgaagatggagacgagaaagatgagaagaagcacagaagtcaacccaaagatctagctgccaaacggaggcccgaagaaaaagaacctgaaaaagtaaatccacagatttctgatgaaaaagacgaggatgaaaaggaggagaagagacgcaaaacgacccccaaagaaccaacggagaaaaaaatggctcgcgccaaaacagtcatgaactccaagacccaccctcccaagtgcattcagtgcgggcagtacctggacgaccctgacctcaaatatgggcagcacccaccagacgcggtggatgagccacagatgctgacaaatgagaagctgtccatctttgatgccaacgagtctggctttgagagttatgaggcgcttccccagcacaaactgacctgcttcagtgtgtactgtaagcacggtcacctgtgtcccatcgacaccggcctcatcgagaagaatatcgaactcttcttttctggttcagcaaaaccaatctatgatgatgacccatctcttgaaggtggtgttaatggcaaaaatcttggccccataaatgaatggtggatcactggctttgatggaggtgaaaaggccctcatcggcttcagcacctcatttgccgaatacattctgatggatcccagtcccgagtatgcgcccatatttgggctgatgcaggagaagatctacatcagcaagattgtggtggagttcctgcagagcaattccgactcgacctatgaggacctgatcaacaagatcgagaccacggttcctccttctggcctcaacttgaaccgcttcacagaggactccctcctgcgacacgcgcagtttgtggtggagcaggtggagagttatgacgaggccggggacagtgatgagcagcccatcttcctgacaccctgcatgcgggacctgatcaagctggctggggtcacgctgggacagaggcgagcccaggcgaggcggcagaccatcaggcattctaccagggagaaggacaggggacccacgaaagccaccaccaccaagctggtctaccagatcttcgatactttcttcgcagagcaaattgaaaaggatgacagagaagacaaggagaacgcctttaagcgccggcgatgtggcgtctgtgaggtgtgtcagcagcctgagtgtgggaaatgtaaagcctgcaaggacatggttaaatttggtggcagtggacggagcaagcaggcttgccaagagcggaggtgtcccaatatggccatgaaggaggcagatgacgatgaggaagtcgatgataacatcccagagatgccgtcacccaaaaaaatgcaccaggggaagaagaagaaacagaacaagaatcgcatctcttgggtcggagaagccgtcaagactgatgggaagaagagttactataagaaggtgtgcattgatgcggaaaccctggaagtgggggactgtgtctctgttattccagatgattcctcaaaaccgctgtatctagcaagggtcacggcgctgtgggaggacagcagcaacgggcagatgtttcacgcccactggttctgcgctgggacagacacagtcctcggggccacgtcggaccctctggagctgttcttggtggatgaatgtgaggacatgcagctttcatatatccacagcaaagtgaaagtcatctacaaagccccctccgaaaactgggccatggagggaggcatggatcccgagtccctgctggagggggacgacgggaagacctacttctaccagctgtggtatgatcaagactacgcgagattcgagtcccctccaaaaacccagccaacagaggacaacaagttcaaattctgtgtgagctgtgcccgtctggctgagatgaggcaaaaagaaatccccagggtcctggagcagctcgaggacctggatagccgggtcctctactactcagccaccaagaacggcatcctgtaccgagttggtgatggtgtgtacctgccccctgaggccttcacgttcaacatcaagctgtccagtcccgtgaaacgcccacggaaggagcccgtggatgaggacctgtacccagagcactaccggaaatactccgactacatcaaaggcagcaacctggatgcccctgagccctaccgaattggccggatcaaagagatcttctgtcccaagaagagcaacggcaggcccaatgagactgacatcaaaatccgggtcaacaagttctacaggcctgagaacacccacaagtccactccagcgagctaccacgcagacatcaacctgctctactggagcgacgaggaggccgtggtggacttcaaggctgtgcagggccgctgcaccgtggagtatggggaggacctgcccgagtgcgtccaggtgtactccatgggcggccccaaccgcttctacttcctcgaggcctataatgcaaagagcaaaagctttgaagatcctcccaaccatgcccgtagccctggaaacaaagggaagggcaagggaaaagggaagggcaagcccaagtcccaagcctgtgagccgagcgagccagagatagagatcaagctgcccaagctgcggaccctggatgtgttttctggctgcggggggttgtcggagggattccaccaagcaggcatctctgacacgctgtgggccatcgagatgtgggaccctgcggcccaggcgttccggctgaacaaccccggctccacagtgttcacagaggactgcaacatcctgctgaagctggtcatggctggggagaccaccaactcccgcggccagcggctgccccagaagggagacgtggagatgctgtgcggcgggccgccctgccagggcttcagcggcatgaaccgcttcaattcgcgcacctactccaagttcaaaaactctctggtggtttccttcctcagctactgcgactactaccggccccggttcttcctcctggagaatgtcaggaactttgtctccttcaagcgctccatggtcctgaagctcaccctccgctgcctggtccgcatgggctatcagtgcaccttcggcgtgctgcaggccggtcagtacggcgtggcccagactaggaggcgggccatcatcctggccgcggcccctggagagaagctccctctgttcccggagccactgcacgtgtttgctccccgggcctgccagctgagcgtggtggtggatgacaagaagtttgtgagcaacataaccaggttgagctcgggtcctttccggaccatcacggtgcgagacacgatgtccgacctgccggaggtgcggaatggagcctcggcactggagatctcctacaacggggagcctcagtcctggttccagaggcagctccggggcgcacagtaccagcccatcctcagggaccacatctgtaaggacatgagtgcattggtggctgcccgcatgcggcacatccccttggccccagggtcagactggcgcgatctgcccaacatcgaggtgcggctctcagacggcaccatggccaggaagctgcggtatacccaccatgacaggaagaacggccgcagcagctctggggccctccgtggggtctgctcctgcgtggaagccggcaaagcctgcgaccccgcagccaggcagttcaacaccctcatcccctggtgcctgccccacaccgggaaccggcacaaccactgggctggcctctatggaaggctcgagtgggacggcttcttcagcacaaccgtcaccaaccccgagcccatgggcaagcagggccgcgtgctccacccagagcagcaccgtgtggtgagcgtgcgggagtgtgcccgctcccagggcttccctgacacctaccggctcttcggcaacatcctggacaagcaccggcaggtgggcaatgccgtgccaccgcccctggccaaagccattggcttggagatcaagctttgtatgttggccaaagcccgagagagtgcctcagctaaaataaaggaggaggaagctgctaaggactagtaatgaactagtccgtaacttgaaagtatttcgatttcttggctttatatatcttgtggaaaggacgaacctatgcatggtgtgcttcattt

SEQ ID NO: 540 - DNA, 4952 bp, Homo sapiens
  source 1..4952: mol_type = genomic DNA
accgccaccatgccggcgcgtaccgccccagcccgggtgcccacactggccgtcccggccatctcgctgcccgacgatgtccgcaggcggctcaaagatttggaaagagacagcttaacagaaaaggaatgtgtgaaggagaaattgaatctcttgcacgaatttctgcaaacagaaataaagaatcagttatgtgacttggaaaccaaattacgtaaagaagaattatccgaggagggctacctggctaaagtcaaatcccttttaaataaagatttgtccttggagaacggtgctcatgcttacaaccgggaagtgaatggacgtctagaaaacgggaaccaagcaagaagtgaagcccgtagagtgggaatggcagatgccaacagcccccccaaacccctttccaaacctcgcacgcccaggaggagcaagtccgatggagaggctaagcctgaaccttcacctagccccaggattacaaggaaaagcaccaggcaaaccaccatcacatctcattttgcaaagggccctgccaaacggaaacctcaggaagagtctgaaagagccaaatcggatgagtccatcaaggaagaagacaaagaccaggatgagaagagacgtagagttacatccagagaacgagttgctagaccgcttcctgcagaagaacctgaaagagcaaaatcaggaacgcgcactgaaaaggaagaagaaagagatgaaaaagaagaaaagagactccgaagtcaaaccaaagaaccaacacccaaacagaaactgaaggaggagccggacagagaagccagggcaggcgtgcaggctgacgaggacgaagatggagacgagaaagatgagaagaagcacagaagtcaacccaaagatctagctgccaaacggaggcccgaagaaaaagaacctgaaaaagtaaatccacagatttctgatgaaaaagacgaggatgaaaaggaggagaagagacgcaaaacgacccccaaagaaccaacggagaaaaaaatggctcgcgccaaaacagtcatgaactccaagacccaccctcccaagtgcattcagtgcgggcagtacctggacgaccctgacctcaaatatgggcagcacccaccagacgcggtggatgagccacagatgctgacaaatgagaagctgtccatctttgatgccaacgagtctggctttgagagttatgaggcgcttccccagcacaaactgacctgcttcagtgtgtactgtaagcacggtcacctgtgtcccatcgacaccggcctcatcgagaagaatatcgaactcttcttttctggttcagcaaaaccaatctatgatgatgacccatctcttgaaggtggtgttaatggcaaaaatcttggccccataaatgaatggtggatcactggctttgatggaggtgaaaaggccctcatcggcttcagcacctcatttgccgaatacattctgatggatcccagtcccgagtatgcgcccatatttgggctgatgcaggagaagatctacatcagcaagattgtggtggagttcctgcagagcaattccgactcgacctatgaggacctgatcaacaagatcgagaccacggttcctccttctggcctcaacttgaaccgcttcacagaggactccctcctgcgacacgcgcagtttgtggtggagcaggtggagagttatgacgaggccggggacagtgatgagcagcccatcttcctgacaccctgcatgcgggacctgatcaagctggctggggtcacgctgggacagaggcgagcccaggcgaggcggcagaccatcaggcattctaccagggagaaggacaggggacccacgaaagccaccaccaccaagctggtctaccagatcttcgatactttcttcgcagagcaaattgaaaaggatgacagagaagacaaggagaacgcctttaagcgccggcgatgtggcgtctgtgaggtgtgtcagcagcctgagtgtgggaaatgtaaagcctgcaaggacatggttaaatttggtggcagtggacggagcaagcaggcttgccaagagcggaggtgtcccaatatggccatgaaggaggcagatgacgatgaggaagtcgatgataacatcccagagatgccgtcacccaaaaaaatgcaccaggggaagaagaagaaacagaacaagaatcgcatctcttgggtcggagaagccgtcaagactgatgggaagaagagttactataagaaggtgtgcattgatgcggaaaccctggaagtgggggactgtgtctctgttattccagatgattcctcaaaaccgctgtatctagcaagggtcacggcgctgtgggaggacagcagcaacgggcagatgtttcacgcccactggttctgcgctgggacagacacagtcctcggggccacgtcggaccctctggagctgttcttggtggatgaatgtgaggacatgcagctttcatatatccacagcaaagtgaaagtcatctacaaagccccctccgaaaactgggccatggagggaggcatggatcccgagtccctgctggagggggacgacgggaagacctacttctaccagctgtggtatgatcaagactacgcgagattcgagtcccctccaaaaacccagccaacagaggacaacaagttcaaattctgtgtgagctgtgcccgtctggctgagatgaggcaaaaagaaatccccagggtcctggagcagctcgaggacctggatagccgggtcctctactactcagccaccaagaacggcatcctgtaccgagttggtgatggtgtgtacctgccccctgaggccttcacgttcaacatcaagctgtccagtcccgtgaaacgcccacggaaggagcccgtggatgaggacctgtacccagagcactaccggaaatactccgactacatcaaaggcagcaacctggatgcccctgagccctaccgaattggccggatcaaagagatcttctgtcccaagaagagcaacggcaggcccaatgagactgacatcaaaatccgggtcaacaagttctacaggcctgagaacacccacaagtccactccagcgagctaccacgcagacatcaacctgctctactggagcgacgaggaggccgtggtggacttcaaggctgtgcagggccgctgcaccgtggagtatggggaggacctgcccgagtgcgtccaggtgtactccatgggcggccccaaccgcttctacttcctcgaggcctataatgcaaagagcaaaagctttgaagatcctcccaaccatgcccgtagccctggaaacaaagggaagggcaagggaaaagggaagggcaagcccaagtcccaagcctgtgagccgagcgagccagagatagagatcaagctgcccaagctgcggaccctggatgtgttttctggctgcggggggttgtcggagggattccaccaagcaggcatctctgacacgctgtgggccatcgagatgtgggaccctgcggcccaggcgttccggctgaacaaccccggctccacagtgttcacagaggactgcaacatcctgctgaagctggtcatggctggggagaccaccaactcccgcggccagcggctgccccagaagggagacgtggagatgctgtgcggcgggccgccctgccagggcttcagcggcatgaaccgcttcaattcgcgcacctactccaagttcaaaaactctctggtggtttccttcctcagctactgcgactactaccggccccggttcttcctcctggagaatgtcaggaactttgtctccttcaagcgctccatggtcctgaagctcaccctccgctgcctggtccgcatgggctatcagtgcaccttcggcgtgctgcaggccggtcagtacggcgtggcccagactaggaggcgggccatcatcctggccgcggcccctggagagaagctccctctgttcccggagccactgcacgtgtttgctccccgggcctgccagctgagcgtggtggtggatgacaagaagtttgtgagcaacataaccaggttgagctcgggtcctttccggaccatcacggtgcgagacacgatgtccgacctgccggaggtgcggaatggagcctcggcactggagatctcctacaacggggagcctcagtcctggttccagaggcagctccggggcgcacagtaccagcccatcctcagggaccacatctgtaaggacatgagtgcattggtggctgcccgcatgcggcacatccccttggccccagggtcagactggcgcgatctgcccaacatcgaggtgcggctctcagacggcaccatggccaggaagctgcggtatacccaccatgacaggaagaacggccgcagcagctctggggccctccgtggggtctgctcctgcgtggaagccggcaaagcctgcgaccccgcagccaggcagttcaacaccctcatcccctggtgcctgccccacaccgggaaccggcacaaccactgggctggcctctatggaaggctcgagtgggacggcttcttcagcacaaccgtcaccaaccccgagcccatgggcaagcagggccgcgtgctccacccagagcagcaccgtgtggtgagcgtgcgggagtgtgcccgctcccagggcttccctgacacctaccggctcttcggcaacatcctggacaagcaccggcaggtgggcaatgccgtgccaccgcccctggccaaagccattggcttggagatcaagctttgtatgttggccaaagcccgagagagtgcctcagctaaaataaaggaggaggaagctgctaaggactagtaatgaactagtccgtaacttgaaagtatttcgatttcttggctttatatatcttgtggaaaggacgactgttacttggcgcgttcccggat

SEQ ID NO: 541 - DNA, 1334 bp, Homo sapiens
  source 1..1334: mol_type = genomic DNA
accgccaccatggaacagaagccaagcaaggtggagtgtgggtcagacccagaggagaacagtgccaggtcaccagatggaaagcgaaaaagaaagaacggccaatgttccctgaaaaccagcatgtcagggtatatccctagttacctggacaaagacgagcagtgtgtcgtgtgtggggacaaggcaactggttatcactaccgctgtatcacttgtgagggctgcaagggcttctttcgccgcacaatccagaagaacctccatcccacctattcctgcaaatatgacagctgctgtgtcattgacaagatcacccgcaatcagtgccagctgtgccgcttcaagaagtgcatcgccgtgggcatggccatggacttggttctagatgactcgaagcgggtggccaagcgtaagctgattgagcagaaccgggagcggcggcggaaggaggagatgatccgatcactgcagcagcgaccagagcccactcctgaagagtgggatctgatccacattgccacagaggcccatcgcagcaccaatgcccagggcagccattggaaacagaggcggaaattcctgcccgatgacattggccagtcacccattgtctccatgccggacggagacaaggtggacctggaagccttcagcgagtttaccaagatcatcaccccggccatcacccgtgtggtggactttgccaaaaaactgcccatgttctccgagctgccttgcgaagaccagatcatcctcctgaaggggtgctgcatggagatcatgtccctgcgggcggctgtccgctacgaccctgagagcgacaccctgacgctgagtggggagatggctgtcaagcgggagcagctcaagaatggcggcctgggcgtagtctccgacgccatctttgaactgggcaagtcactctctgcctttaacctggatgacacggaagtggctctgctgcaggctgtgctgctaatgtcaacagaccgctcgggcctgctgtgtgtggacaagatcgagaagagtcaggaggcgtacctgctggcgttcgagcactacgtcaaccaccgcaaacacaacattccgcacttctggcccaagctgctgatgaaggtgactgacctccgcatgatcggggcctgccacgccagccgcttcctccacatgaaagtcgagtgccccaccgaactcttccccccactcttcctcgaggtctttgaggatcaggaagtctagtaatgaactagtccgtaacttgaaagtatttcgatttcttggctttatatatcttgtggaaaggacgaagtaaagattccctcctagatctc

SEQ ID NO: 542 - DNA, 1457 bp, Homo sapiens
  source 1..1457: mol_type = genomic DNA
accgccaccatggaacagaagccaagcaaggtggagtgtgggtcagacccagaggagaacagtgccaggtcaccagatggaaagcgaaaaagaaagaacggccaatgttccctgaaaaccagcatgtcagggtatatccctagttacctggacaaagacgagcagtgtgtcgtgtgtggggacaaggcaactggttatcactaccgctgtatcacttgtgagggctgcaagggcttctttcgccgcacaatccagaagaacctccatcccacctattcctgcaaatatgacagctgctgtgtcattgacaagatcacccgcaatcagtgccagctgtgccgcttcaagaagtgcatcgccgtgggcatggccatggacttggttctagatgactcgaagcgggtggccaagcgtaagctgattgagcagaaccgggagcggcggcggaaggaggagatgatccgatcactgcagcagcgaccagagcccactcctgaagagtgggatctgatccacattgccacagaggcccatcgcagcaccaatgcccagggcagccattggaaacagaggcggaaattcctgcccgatgacattggccagtcacccattgtctccatgccggacggagacaaggtggacctggaagccttcagcgagtttaccaagatcatcaccccggccatcacccgtgtggtggactttgccaaaaaactgcccatgttctccgagctgccttgcgaagaccagatcatcctcctgaaggggtgctgcatggagatcatgtccctgcgggcggctgtccgctacgaccctgagagcgacaccctgacgctgagtggggagatggctgtcaagcgggagcagctcaagaatggcggcctgggcgtagtctccgacgccatctttgaactgggcaagtcactctctgcctttaacctggatgacacggaagtggctctgctgcaggctgtgctgctaatgtcaacagaccgctcgggcctgctgtgtgtggacaagatcgagaagagtcaggaggcgtacctgctggcgttcgagcactacgtcaaccaccgcaaacacaacattccgcacttctggcccaagctgctgatgaagggtccgcaggtccggcagcttgagcagcagcttggtgaagcgggaagtctccaagggccggttcttcagcaccagagcccgaagagcccgcagcagcgtctcctggagctgctccaccgaagcggaattctccatgcccgagcggtctgtggggaagacgacagcagtgaggcggactccccgagctcctctgaggaggaaccggaggtctgcgaggacctggcaggcaatgcagcctctccctagtaatgaactagtccgtaacttgaaagtatttcgatttcttggctttatatatcttgtggaaaggacgaccacattaatttaggtgttatggc

SEQ ID NO: 543 - DNA, 1574 bp, Homo sapiens
  source 1..1574: mol_type = genomic DNA
accgccaccatggaacagaagccaagcaaggtggagtgtgggtcagacccagaggagaacagtgccaggtcaccagatggaaagcgaaaaagaaagaacggccaatgttccctgaaaaccagcatgtcagggtatatccctagttacctggacaaagacgagcagtgtgtcgtgtgtggggacaaggcaactggttatcactaccgctgtatcacttgtgagggctgcaagggcttctttcgccgcacaatccagaagaacctccatcccacctattcctgcaaatatgacagctgctgtgtcattgacaagatcacccgcaatcagtgccagctgtgccgcttcaagaagtgcatcgccgtgggcatggccatggacttggttctagatgactcgaagcgggtggccaagcgtaagctgattgagcagaaccgggagcggcggcggaaggaggagatgatccgatcactgcagcagcgaccagagcccactcctgaagagtgggatctgatccacattgccacagaggcccatcgcagcaccaatgcccagggcagccattggaaacagaggcggaaattcctgcccgatgacattggccagtcacccattgtctccatgccggacggagacaaggtggacctggaagccttcagcgagtttaccaagatcatcaccccggccatcacccgtgtggtggactttgccaaaaaactgcccatgttctccgagctgccttgcgaagaccagatcatcctcctgaaggggtgctgcatggagatcatgtccctgcgggcggctgtccgctacgaccctgagagcgacaccctgacgctgagtggggagatggctgtcaagcgggagcagctcaagaatggcggcctgggcgtagtctccgacgccatctttgaactgggcaagtcactctctgcctttaacctggatgacacggaagtggctctgctgcaggctgtgctgctaatgtcaacagaccgctcgggcctgctgtgtgtggacaagatcgagaagagtcaggaggcgtacctgctggcgttcgagcactacgtcaaccaccgcaaacacaacattccgcacttctggcccaagctgctgatgaaggagagagaagtgcagagttcgattctgtacaagggggcagcggcagaaggccggccgggcgggtcactgggcgtccacccggaaggacagcagcttctcggaatgcatgttgttcagggtccgcaggtccggcagcttgagcagcagcttggtgaagcgggaagtctccaagggccggttcttcagcaccagagcccgaagagcccgcagcagcgtctcctggagctgctccaccgaagcggaattctccatgcccgagcggtctgtggggaagacgacagcagtgaggcggactccccgagctcctctgaggaggaaccggaggtctgcgaggacctggcaggcaatgcagcctctccctagtaatgaactagtccgtaacttgaaagtatttcgatttcttggctttatatatcttgtggaaaggacgactggccgtgctctcgcgggctcaa

SEQ ID NO: 544 - DNA, 2690 bp, Homo sapiens
  source 1..2690: mol_type = genomic DNA
accgccaccatgcccgccggcctcaccgaacccgccggcgccgctcccccggctgctgtgagcgcctcggggaccgtgaccatggccccggccggggcgctgccggtgcgggtggagagcactccggtggccctgggcgccgtgactaaggctcctgtcagcgtctgcgtggagcccacggcgtcccagcccctgcggtcccccgtggggaccctggtgaccaaagtggctccggtcagcgcccctcctaaagtcagcagcggccctaggctgcctgctcctcagatagtcgccgtgaaagcccccaacaccacgacaatccagtttcctgctaatttgcagcttcctccaggaaccgttttgattaaaagtaacagtggtccgttgatgttggtatctcctcagcaaactgtaacaagagccgagaccacaagtaacataacctcaaggccagcagtaccagcgaatcctcaaacagtcaaaatctgtacagtgccgaactctagctcacaattaatcaagaaagtggcagtgacacctgttaaaaaattggcacaaataggaactactgtggtaaccactgttccgaagccttcctcagtacaatctgtggctgtgccaaccagtgtcgtcacagttactcctggaaagccattgaatactgtaactaccctgaagccttcaagtttgggagcatcatccactccttcaaatgagcccaatcttaaagcagagaactcagcagctgttcagattaatctttctccgacaatgctagaaaatgtgaagaaatgcaagaacttccttgcaatgttaataaaactagcatgtagtggatcacagtccccagaaatggggcaaaatgtgaagaagctggtggaacaacttttggatgcaaaaatcgaagcagaagaatttactaggaaactgtatgttgaactcaagtcttcacctcagcctcacctggttccttttcttaagaaaagcgtggttgccttacgacaacttctgcctaactcccagagcttcatccagcaatgtgttcagcagacttctagtgacatggtcattgctacctgtactacaacagtaacaacttctcctgtggtgacaactacagtgtcctcaagccagtctgaaaagtcaattattgtttctggagcaacagcacccagaactgtgtcagtgcaaactttgaacccacttgctggtccagtgggagcaaaagctggagttgtgacacttcattctgtgggcccaactgctgcaacaggaggaacaacagctggaactggtttgcttcagacttcaaaaccacttgtgacatctgtggcaaacacagtgaccacggtctcactgcaacctgaaaagccagttgtctctggaacagcagtaacactgtcccttccagcagtaacttttggagaaacttcaggtgcagctatttgtcttccatctgtgaaacctgttgtttcttctgctgggaccacatctgacaagcctgttattgggactccagttcaaatcaaacttgcccagccgggccctgtcctttcacaaccagctgggattccacaggcagttcaagtcaagcaactagtagttcagcagccttcaggaggcaatgaaaaacaagtgaccacaatttcacattcctcaacattgaccattcagaaatgtggacagaagacgatgccagtgaacaccataatacctactagtcagtttcctccagcttccattctaaagcaaattactctgcctggaaataaaattctgtcacttcaagcatctcctactcagaaaaatagaataaaagagaatgtaacatcatgcttccgagatgaggatgacatcaatgatgtgacttctatggcaggggtcaaccttaatgaagaaaatgcctgcatcttagcaacaaactctgaattggttggcacactcattcagtcatgtaaagatgaaccatttctttttattggagctctacaaaagagaattttagacattggtaaaaagcatgacattacagaacttaactctgatgctgtgaacttgatctcccaagcaacacaggaacgactacgaggccttctagaaaaactgactgcaattgctcagcatcgaatgactacttacaaggcaagtgaaaattacatcctgtgtagtgataccaggtcacagctcaaatttcttgaaaagctggatcaattggagaagcagagaaaggatttggaagaaagagaaatgttacttaaggcagccaagagtcgttctaataaagaagatccagaacagctgagattaaagcagaaagccaaagagttacagcaattggaacttgcacagatacagcatagagacgctaatctcacagctcttgcagctattggaccaaggaagaagagaccactagaatctggaattgagggcttaaaagacaaccttcttgcttctgggacatccagcctgacagccaccaaacagttgcatcgtccaagaatcacgagaatctgcctcagggacttgatattttgtatggaacaggaacgggagatgaagtattctcgagctctatacctggcccttctgaagtagtaatgaactagtccgtaacttgaaagtatttcgatttcttggctttatatatcttgtggaaaggacgacattcgagcccatgtaacgtgctt

SEQ ID NO: 545 - DNA, 2705 bp, Homo sapiens
  source 1..2705: mol_type = genomic DNA
accgccaccatgcccgccggcctcaccgaacccgccggcgccgctcccccggctgctgtgagcgcctcggggaccgtgaccatggccccggccggggcgctgccggtgcgggtggagagcactccggtggccctgggcgccgtgactaaggctcctgtcagcgtctgcgtggagcccacggcgtcccagcccctgcggtcccccgtggggaccctggtgaccaaagtggctccggtcagcgcccctcctaaagtcagcagcggccctaggctgcctgctcctcagatagtcgccgtgaaagcccccaacaccacgacaatccagtttcctgctaatttgcagcttcctccaggaaccgttttgattaaaagtaacagtggtccgttgatgttggtatctcctcagcaaactgtaacaagagccgagaccacaagtaacataacctcaaggccagcagtaccagcgaatcctcaaacagtcaaaatctgtacagtgccgaactctagctcacaattaatcaagaaagtggcagtgacacctgttaaaaaattggcacaaataggaactactgtggtaaccactgttccgaagccttcctcagtacaatctgtggctgtgccaaccagtgtcgtcacagttactcctggaaagccattgaatactgtaactaccctgaagccttcaagtttgggagcatcatccactccttcaaatgagcccaatcttaaagcagagaactcagcagctgttcagattaatctttctccgacaatgctagaaaatgtgaagaaatgcaagaacttccttgcaatgttaataaaactagcatgtagtggatcacagtccccagaaatggggcaaaatgtgaagaagctggtggaacaacttttggatgcaaaaatcgaagcagaagaatttactaggaaactgtatgttgaactcaagtcttcacctcagcctcacctggttccttttcttaagaaaagcgtggttgccttacgacaacttctgcctaactcccagagcttcatccagcaatgtgttcagcagacttctagtgacatggtcattgctacctgtactacaacagtaacaacttctcctgtggtgacaactacagtgtcctcaagccagtctgaaaagtcaattattgtttctggagcaacagcacccagaactgtgtcagtgcaaactttgaacccacttgctggtccagtgggagcaaaagctggagttgtgacacttcattctgtgggcccaactgctgcaacaggaggaacaacagctggaactggtttgcttcagacttcaaaaccacttgtgacatctgtggcaaacacagtgaccacggtctcactgcaacctgaaaagccagttgtctctggaacagcagtaacactgtcccttccagcagtaacttttggagaaacttcaggtgcagctatttgtcttccatctgtgaaacctgttgtttcttctgctgggaccacatctgacaagcctgttattgggactccagttcaaatcaaacttgcccagccgggccctgtcctttcacaaccagctgggattccacaggcagttcaagtcaagcaactattctcattgtttcaggtagttcagcagccttcaggaggcaatgaaaaacaagtgaccacaatttcacattcctcaacattgaccattcagaaatgtggacagaagacgatgccagtgaacaccataatacctactagtcagtttcctccagcttccattctaaagcaaattactctgcctggaaataaaattctgtcacttcaagcatctcctactcagaaaaatagaataaaagagaatgtaacatcatgcttccgagatgaggatgacatcaatgatgtgacttctatggcaggggtcaaccttaatgaagaaaatgcctgcatcttagcaacaaactctgaattggttggcacactcattcagtcatgtaaagatgaaccatttctttttattggagctctacaaaagagaattttagacattggtaaaaagcatgacattacagaacttaactctgatgctgtgaacttgatctcccaagcaacacaggaacgactacgaggccttctagaaaaactgactgcaattgctcagcatcgaatgactacttacaaggcaagtgaaaattacatcctgtgtagtgataccaggtcacagctcaaatttcttgaaaagctggatcaattggagaagcagagaaaggatttggaagaaagagaaatgttacttaaggcagccaagagtcgttctaataaagaagatccagaacagctgagattaaagcagaaagccaaagagttacagcaattggaacttgcacagatacagcatagagacgctaatctcacagctcttgcagctattggaccaaggaagaagagaccactagaatctggaattgagggcttaaaagacaaccttcttgcttctgggacatccagcctgacagccaccaaacagttgcatcgtccaagaatcacgagaatctgcctcagggacttgatattttgtatggaacaggaacgggagatgaagtattctcgagctctatacctggcccttctgaagtagtaatgaactagtccgtaacttgaaagtatttcgatttcttggctttatatatcttgtggaaaggacgaccgttgaaaggttagcttagctct

SEQ ID NO: 546 - DNA, 1160 bp, Homo sapiens
  source 1..1160: mol_type = genomic DNA
accgccaccatgttgggtgggagtgcgggacgcctcaaaatgtcttccagtggcaccctcagcaactactacgtggactcgcttataggccatgagggcgacgaggtgttcgcggcgcgcttcgggccgccggggccaggcgcgcagggccggcctgcaggtgtggctgatggcccggccgccaccgccgccgagttcgcctcgtgtagttttgcccccagatcggccgtgttctctgcctcgtggtccgcggtgccctcccagcccccggcagcggcggcgatgagcggcctctaccacccgtacgttcccccgccgcccctggccgcctctgcctccgagcccggccgctacgtgcgctcctggatggagccgctgcccggcttcccgggcggtgcgggcggtggcggtggtggtggaggcggcggtccgggccgcggtcccagccctggccccagcggcccagccaacgggcgccactacgggattaagcctgaaacccgagcggccccggcccccgccacggccgcctccaccacctcctcctcctccacttccttatcctcctcctccaaacggactgagtgctccgtggcccgggagtcccaggggagcagcggccccgagttctcgtgcaactcgttcctgcaggagaaggcggcagcggcgacggggggaaccgggcctggggcagggatcggggccgcgactgggacgggcggctcgtcggagccctcagcttgcagcgaccacccgatcccaggctgttcgctgaaggaggaggagaagcagcattcgcagccgcagcagcagcaacttgacccaaacaaccccgccgcgaactggatccacgctcgctccacccggaaaaagcgctgtccctacaccaaataccagacgcttgagctggagaaagaattcctcttcaacatgtacctcacccgggaccggcgctacgaggtggccaggattctcaacctaacagagagacaggtcaaaatctggtttcagaaccgtaggatgaaaatgaaaaagatgagcaaggagaaatgccccaaaggagactagtaatgaactagtccgtaacttgaaagtatttcgatttcttggctttatatatcttgtggaaaggacgactaactaacgacggactacattga

SEQ ID NO: 547 - DNA, 3254 bp, Homo sapiens
  source 1..3254: mol_type = genomic DNA
accgccaccatggaggtggcggtggagaaggcggtggcggcggcggcagcggcctcggctgcggcctccggggggccctcggcggcgccgagcggggagaacgaggccgagagtcggcagggcccggactcggagcgcggcggcgaggcggcccggctcaacctgttggacacttgcgccgtgtgccaccagaacatccagagccgggcgcccaagctgctgccctgcctgcactctttctgccagcgctgcctgcccgcgccccagcgctacctcatgctgcccgcgcccatgctgggctcggccgagaccccgccacccgtccctgcccccggctcgccggtcagcggctcgtcgccgttcgccacccaagttggagtcattcgttgcccagtttgcagccaagaatgtgcagagagacacatcatagataacttttttgtgaaggacactactgaggttcccagcagtacagtagaaaagtcaaatcaggtatgtacaagctgtgaggacaacgcagaagccaatgggttttgtgtagagtgtgttgaatggctctgcaagacgtgtatcagagctcatcagagggtaaagttcacaaaagaccacactgtcagacagaaagaggaagtatctccagaggcagttggtgtcaccagccagcgaccagtgttttgtccttttcataaaaaggagcagctgaagctgtactgtgagacatgtgacaaactgacatgtcgagactgtcagttgttagaacataaagagcatagataccaatttatagaagaagcttttcagaatcagaaagtgatcatagatacactaatcaccaaactgatggaaaaaacaaaatacataaaattcacaggaaatcagatccaaaacagaattattgaagtaaatcaaaatcaaaagcaggtggaacaggatattaaagttgctatatttacactgatggtagaaataaataaaaaaggaaaagctctactgcatcagttagagagccttgcaaaggaccatcgcatgaaacttatgcaacaacaacaggaagtggctggactctctaaacaattggagcatgtcatgcatttttctaaatgggcagtttccagtggcagcagtacagcattactttatagcaaacgactgattacataccggttacggcacctccttcgtgcaaggtgtgatgcatccccagtgaccaacaacaccatccaatttcactgtgatcctagtttctgggctcaaaatatcatcaacttaggttctttagtaatcgaggataaagagagccagccacaaatgcctaagcagaatcctgtcgtggaacagaattcacagccaccaagtggtttatcatcaaaccagttatccaagttcccaacacagatcagcctagctcaattacggctccagcatatgcagcaacaggtaatggctcagaggcaacaggtgcaacggaggccagcacctgtgggtttaccaaaccctagaatgcaggggcccatccagcaaccttccatctctcatcagcaaccgcctccacgtttgataaactttcagaatcacagccccaaacccaatggaccagttcttcctcctcatcctcaacaactgagatatccaccaaaccagaacataccacgacaagcaataaagccaaaccccctacagatggctttcttggctcaacaagccataaaacagtggcagatcagcagtggacagggaaccccatcaactaccaacagcacatcctctactccttccagccccacgattactagtgcagcaggatatgatggaaaggcttttggttcacctatgatcgatttgagctcaccagtgggagggtcttataatcttccctctcttccggatattgactgttcaagtactattatgctggacaatattgtgaggaaagatactaatatagatcatggccagccaagaccaccctcaaacagaacggtccagtcaccaaattcatcagtgccatctccaggccttgcaggacctgttactatgactagtgtacaccccccaatacgttcacctagtgcctccagcgttggaagccgaggaagctctggctcttccagcaaaccagcaggagctgactctacacacaaagtcccagtggtcatgctggagccaattcgaataaaacaagaaaacagtggaccaccggaaaattatgatttccctgttgttatagtgaagcaagaatcagatgaagaatctaggcctcaaaatgccaattatccaagaagcatactcacctccctgctcttaaatagcagtcagagctctacttctgaggagactgtgctaagatcagatgcccctgatagtacaggagatcaacctggacttcaccaggacaattcctcaaatggaaagtctgaatggttggatccttcccagaagtcacctcttcatgttggagagacaaggaaagaggatgaccccaatgaggactggtgtgcagtttgtcaaaacggaggggaactcctctgctgtgaaaagtgccccaaagtattccatctttcttgtcatgtgcccacattgacaaattttccaagtggagagtggatttgcactttctgccgagacttatctaaaccagaagttgaatatgattgtgatgctcccagtcacaactcagaaaaaaagaaaactgaaggccttgttaagttaacacctatagataaaaggaagtgtgagcgcctacttttatttctttactgccatgaaatgagcctggcttttcaagaccctgttcctctaactgtgcctgattattacaaaataattaaaaatccaatggatttgtcaaccatcaagaaaagactacaagaagattattccatgtactcaaaacctgaagattttgtagctgattttagattgatctttcaaaactgtgctgaattcaatgagcctgattcagaagtagccaatgctggtataaaacttgaaaattattttgaagaacttctaaagaacctctatccagaaaaaaggtttcccaaaccagaattcaggaatgaatcagaagataataaatttagtgatgattcagatgatgactttgtacagccccggaagaaacgcctcaaaagcattgaagaacgccagttgcttaaatagtaatgaactagtccgtaacttgaaagtatttcgatttcttggctttatatatcttgtggaaaggacgatttgcttcgccagaactgaacgac

SEQ ID NO: 548 - DNA, 3152 bp, Homo sapiens
  source 1..3152: mol_type = genomic DNA
accgccaccatggaggtggcggtggagaaggcggtggcggcggcggcagcggcctcggctgcggcctccggggggccctcggcggcgccgagcggggagaacgaggccgagagtcggcagggcccggactcggagcgcggcggcgaggcggcccggctcaacctgttggacacttgcgccgtgtgccaccagaacatccagagccgggcgcccaagctgctgccctgcctgcactctttctgccagcgctgcctgcccgcgccccagcgctacctcatgctgcccgcgcccatgctgggctcggccgagaccccgccacccgtccctgcccccggctcgccggtcagcggctcgtcgccgttcgccacccaagttggagtcattcgttgcccagtttgcagccaagaatgtgcagagagacacatcatagataacttttttgtgaaggacactactgaggttcccagcagtacagtagaaaagtcaaatcaggtatgtacaagctgtgaggacaacgcagaagccaatgggttttgtgtagagtgtgttgaatggctctgcaagacgtgtatcagagctcatcagagggtaaagttcacaaaagaccacactgtcagacagaaagaggaagtatctccagaggcagttggtgtcaccagccagcgaccagtgttttgtccttttcataaaaaggagcagctgaagctgtactgtgagacatgtgacaaactgacatgtcgagactgtcagttgttagaacataaagagcatagataccaatttatagaagaagcttttcagaatcagaaagtgatcatagatacactaatcaccaaactgatggaaaaaacaaaatacataaaattcacaggaaatcagatccaaaacagaattattgaagtaaatcaaaatcaaaagcaggtggaacaggatattaaagttgctatatttacactgatggtagaaataaataaaaaaggaaaagctctactgcatcagttagagagccttgcaaaggaccatcgcatgaaacttatgcaacaacaacaggaagtggctggactctctaaacaattggagcatgtcatgcatttttctaaatgggcagtttccagtggcagcagtacagcattactttatagcaaacgactgattacataccggttacggcacctccttcgtgcaaggtgtgatgcatccccagtgaccaacaacaccatccaatttcactgtgatcctagtttctgggctcaaaatatcatcaacttaggttctttagtaatcgaggataaagagagccagccacaaatgcctaagcagaatcctgtcgtggaacagaattcacagccaccaagtggtttatcatcaaaccagttatccaagttcccaacacagatcagcctagctcaattacggctccagcatatgcagcaacagcaaccgcctccacgtttgataaactttcagaatcacagccccaaacccaatggaccagttcttcctcctcatcctcaacaactgagatatccaccaaaccagaacataccacgacaagcaataaagccaaaccccctacagatggctttcttggctcaacaagccataaaacagtggcagatcagcagtggacagggaaccccatcaactaccaacagcacatcctctactccttccagccccacgattactagtgcagcaggatatgatggaaaggcttttggttcacctatgatcgatttgagctcaccagtgggagggtcttataatcttccctctcttccggatattgactgttcaagtactattatgctggacaatattgtgaggaaagatactaatatagatcatggccagccaagaccaccctcaaacagaacggtccagtcaccaaattcatcagtgccatctccaggccttgcaggacctgttactatgactagtgtacaccccccaatacgttcacctagtgcctccagcgttggaagccgaggaagctctggctcttccagcaaaccagcaggagctgactctacacacaaagtcccagtggtcatgctggagccaattcgaataaaacaagaaaacagtggaccaccggaaaattatgatttccctgttgttatagtgaagcaagaatcagatgaagaatctaggcctcaaaatgccaattatccaagaagcatactcacctccctgctcttaaatagcagtcagagctctacttctgaggagactgtgctaagatcagatgcccctgatagtacaggagatcaacctggacttcaccaggacaattcctcaaatggaaagtctgaatggttggatccttcccagaagtcacctcttcatgttggagagacaaggaaagaggatgaccccaatgaggactggtgtgcagtttgtcaaaacggaggggaactcctctgctgtgaaaagtgccccaaagtattccatctttcttgtcatgtgcccacattgacaaattttccaagtggagagtggatttgcactttctgccgagacttatctaaaccagaagttgaatatgattgtgatgctcccagtcacaactcagaaaaaaagaaaactgaaggccttgttaagttaacacctatagataaaaggaagtgtgagcgcctacttttatttctttactgccatgaaatgagcctggcttttcaagaccctgttcctctaactgtgcctgattattacaaaataattaaaaatccaatggatttgtcaaccatcaagaaaagactacaagaagattattccatgtactcaaaacctgaagattttgtagctgattttagattgatctttcaaaactgtgctgaattcaatgagcctgattcagaagtagccaatgctggtataaaacttgaaaattattttgaagaacttctaaagaacctctatccagaaaaaaggtttcccaaaccagaattcaggaatgaatcagaagataataaatttagtgatgattcagatgatgactttgtacagccccggaagaaacgcctcaaaagcattgaagaacgccagttgcttaaatagtaatgaactagtccgtaacttgaaagtatttcgatttcttggctttatatatcttgtggaaaggacgagtgtgttactcaccgagcctcatg

SEQ ID NO: 549 - DNA, 1529 bp, Homo sapiens
  source 1..1529: mol_type = genomic DNA
accgccaccatgattcataggcacaaacatgaaatgactttgaagtttccttcaataaaaacagacaatatgttatcagatcaaactccgaccccaacgagattcctgaagaactgcgaggaggtgggcctcttcagcgagctggactgctccctggagcacgagttcaggaaggctcaggaagaggagagcagcaagcggaatatctcgatgcataatgcagttggtggggccatgacggggcccggaactcaccagcttagcagcgctcggctgcccaaccatgacaccaacgttgtgattcagcaagccatgccgtcgcctcagtccagctctgtcatcactcaggcaccttccaccaaccgccagatcgggcctgtcccaggctctctatcttctctgctacatctccacaacagacagagacagcccatgccagcctccatgcctgggaccctgcccaaccctacaatgccaggatcttccgccgtcttgatgccaatggagcgacaaatgtcagtgaactccagcatcatggggatgcaaggtccaaatctcagcaacccctgtgcttctccccaggtccagccaatgcattcagaagccaaaatgaggttgaaggctgcattgactcaccaccctgctgccatgtcaaatgggaacatgaacaccatgggacacatgatggagatgatgggctcccggcaggaccagacgccacaccatcacatgcactcgcacccgcatcagcaccagacactgccaccccatcacccttacccacaccagcaccagcacccagcacaccatcctcaccctcaaccccatcaccagcagaaccatccacatcaccactcccattcccaccttcatgcacacccagcacatcaccagacctcgccacatccgcccctgcacaccggcaaccaagcacaggtttcaccagcaacacaacagatgcagccaacccagacaatacagccaccccagcccacaggggggcgccggcgaagggtggtagacgaggatccggacgagaggcggcggaaatttctggaacggaaccgggcagctgccacccgctgcagacagaagaggaaggtctgggtgatgtcattggaaaagaaagcagaagaactcacccagacaaacatgcagcttcagaatgaagtgtctatgttgaaaaatgaggtggcccagctgaaacagttgttgttaacacataaagactgcccaataacagccatgcagaaagaatcacaaggatatctaagtccagagagtagccctcctgctagtcctgtcccagcttgctcccagcaacaagtcatccagcataataccatcactacttcctcatcggtcagcgaggtggtaggaagctccaccctcagccagctcaccactcacagaacagacctgaatccgattctttagtaatgaactagtccgtaacttgaaagtatttcgatttcttggctttatatatcttgtggaaaggacgagcgaagactccggaatgtcaaggg

SEQ ID NO: 550 - DNA, 1628 bp, Homo sapiens
  source 1..1628: mol_type = genomic DNA
accgccaccatgatttatgaggaatccaagatgaatttggagcaggagaggccgtttgtctgcagtgccccaggctgctcccagcgcttcccaacagaggaccatctgatgattcataggcacaaacatgaaatgactttgaagtttccttcaataaaaacagacaatatgttatcagatcaaactccgaccccaacgagattcctgaagaactgcgaggaggtgggcctcttcagcgagctggactgctccctggagcacgagttcaggaaggctcaggaagaggagagcagcaagcggaatatctcgatgcataatgcagttggtggggccatgacggggcccggaactcaccagcttagcagcgctcggctgcccaaccatgacaccaacgttgtgattcagcaagccatgccgtcgcctcagtccagctctgtcatcactcaggcaccttccaccaaccgccagatcgggcctgtcccaggctctctatcttctctgctacatctccacaacagacagagacagcccatgccagcctccatgcctgggaccctgcccaaccctacaatgccaggatcttccgccgtcttgatgccaatggagcgacaaatgtcagtgaactccagcatcatggggatgcaaggtccaaatctcagcaacccctgtgcttctccccaggtccagccaatgcattcagaagccaaaatgaggttgaaggctgcattgactcaccaccctgctgccatgtcaaatgggaacatgaacaccatgggacacatgatggagatgatgggctcccggcaggaccagacgccacaccatcacatgcactcgcacccgcatcagcaccagacactgccaccccatcacccttacccacaccagcaccagcacccagcacaccatcctcaccctcaaccccatcaccagcagaaccatccacatcaccactcccattcccaccttcatgcacacccagcacatcaccagacctcgccacatccgcccctgcacaccggcaaccaagcacaggtttcaccagcaacacaacagatgcagccaacccagacaatacagccaccccagcccacaggggggcgccggcgaagggtggtagacgaggatccggacgagaggcggcggaaatttctggaacggaaccgggcagctgccacccgctgcagacagaagaggaaggtctgggtgatgtcattggaaaagaaagcagaagaactcacccagacaaacatgcagcttcagaatgaagtgtctatgttgaaaaatgaggtggcccagctgaaacagttgttgttaacacataaagactgcccaataacagccatgcagaaagaatcacaaggatatctaagtccagagagtagccctcctgctagtcctgtcccagcttgctcccagcaacaagtcatccagcataataccatcactacttcctcatcggtcagcgaggtggtaggaagctccaccctcagccagctcaccactcacagaacagacctgaatccgattctttagtaatgaactagtccgtaacttgaaagtatttcgatttcttggctttatatatcttgtggaaaggacgattagtagtcccaaggcgtcgtgtg

SEQ ID NO: 551 - DNA, 1607 bp, Homo sapiens
  source 1..1607: mol_type = genomic DNA
accgccaccatgaatttggagcaggagaggccgtttgtctgcagtgccccaggctgctcccagcgcttcccaacagaggaccatctgatgattcataggcacaaacatgaaatgactttgaagtttccttcaataaaaacagacaatatgttatcagatcaaactccgaccccaacgagattcctgaagaactgcgaggaggtgggcctcttcagcgagctggactgctccctggagcacgagttcaggaaggctcaggaagaggagagcagcaagcggaatatctcgatgcataatgcagttggtggggccatgacggggcccggaactcaccagcttagcagcgctcggctgcccaaccatgacaccaacgttgtgattcagcaagccatgccgtcgcctcagtccagctctgtcatcactcaggcaccttccaccaaccgccagatcgggcctgtcccaggctctctatcttctctgctacatctccacaacagacagagacagcccatgccagcctccatgcctgggaccctgcccaaccctacaatgccaggatcttccgccgtcttgatgccaatggagcgacaaatgtcagtgaactccagcatcatggggatgcaaggtccaaatctcagcaacccctgtgcttctccccaggtccagccaatgcattcagaagccaaaatgaggttgaaggctgcattgactcaccaccctgctgccatgtcaaatgggaacatgaacaccatgggacacatgatggagatgatgggctcccggcaggaccagacgccacaccatcacatgcactcgcacccgcatcagcaccagacactgccaccccatcacccttacccacaccagcaccagcacccagcacaccatcctcaccctcaaccccatcaccagcagaaccatccacatcaccactcccattcccaccttcatgcacacccagcacatcaccagacctcgccacatccgcccctgcacaccggcaaccaagcacaggtttcaccagcaacacaacagatgcagccaacccagacaatacagccaccccagcccacaggggggcgccggcgaagggtggtagacgaggatccggacgagaggcggcggaaatttctggaacggaaccgggcagctgccacccgctgcagacagaagaggaaggtctgggtgatgtcattggaaaagaaagcagaagaactcacccagacaaacatgcagcttcagaatgaagtgtctatgttgaaaaatgaggtggcccagctgaaacagttgttgttaacacataaagactgcccaataacagccatgcagaaagaatcacaaggatatctaagtccagagagtagccctcctgctagtcctgtcccagcttgctcccagcaacaagtcatccagcataataccatcactacttcctcatcggtcagcgaggtggtaggaagctccaccctcagccagctcaccactcacagaacagacctgaatccgattctttagtaatgaactagtccgtaacttgaaagtatttcgatttcttggctttatatatcttgtggaaaggacgatcttatgatagtaccagtaagaaa

SEQ ID NO: 552 - DNA, 1211 bp, Homo sapiens
  source 1..1211: mol_type = genomic DNA
accgccaccatgttctgcacctcaggagggaattcagcctcagtgatgtccatgaggcctgtcccaggctctctatcttctctgctacatctccacaacagacagagacagcccatgccagcctccatgcctgggaccctgcccaaccctacaatgccaggatcttccgccgtcttgatgccaatggagcgacaaatgtcagtgaactccagcatcatggggatgcaaggtccaaatctcagcaacccctgtgcttctccccaggtccagccaatgcattcagaagccaaaatgaggttgaaggctgcattgactcaccaccctgctgccatgtcaaatgggaacatgaacaccatgggacacatgatggagatgatgggctcccggcaggaccagacgccacaccatcacatgcactcgcacccgcatcagcaccagacactgccaccccatcacccttacccacaccagcaccagcacccagcacaccatcctcaccctcaaccccatcaccagcagaaccatccacatcaccactcccattcccaccttcatgcacacccagcacatcaccagacctcgccacatccgcccctgcacaccggcaaccaagcacaggtttcaccagcaacacaacagatgcagccaacccagacaatacagccaccccagcccacaggggggcgccggcgaagggtggtagacgaggatccggacgagaggcggcggaaatttctggaacggaaccgggcagctgccacccgctgcagacagaagaggaaggtctgggtgatgtcattggaaaagaaagcagaagaactcacccagacaaacatgcagcttcagaatgaagtgtctatgttgaaaaatgaggtggcccagctgaaacagttgttgttaacacataaagactgcccaataacagccatgcagaaagaatcacaaggatatctaagtccagagagtagccctcctgctagtcctgtcccagcttgctcccagcaacaagtcatccagcataataccatcactacttcctcatcggtcagcgaggtggtaggaagctccaccctcagccagctcaccactcacagaacagacctgaatccgattctttagtaatgaactagtccgtaacttgaaagtatttcgatttcttggctttatatatcttgtggaaaggacgaggcgggagggttgctgcacttacg

SEQ ID NO: 553 - DNA, 1088 bp, Homo sapiens
  source 1..1088: mol_type = genomic DNA
accgccaccatgagctcctacctggagtacgtgtcatgcagcagcagcggcggggtcggcggcgacgtgctcagcttggcacccaagttctgccgctccgacgcccggcccgtggctctgcagcccgccttccctctgggcaacggcgacggcgccttcgtcagctgtctgcccctggccgccgcccgaccctcgccttcgcccccggccgcccccgcgcggccgtccgtaccgcctccggccgcgccccagtacgcgcagtgcaccctggagggggcctacgaacctggtgccgcacctgccgcggcagctgggggcgcggactacggcttcctggggtccgggccggcgtacgacttcccgggcgtgctggggcgggcggccgacgacggcgggtctcacgtccactacgccacctcggccgtcttctcgggcggcggctctttcctcctcagcggccaggtggattacgcggccttcggcgaacccggcccttttccggcttgtctcaaagcgtcagccgacggccaccctggtgctttccagaccgcatccccggccccaggcacctaccccaagtccgtctctcccgcctccggcctccctgccgccttcagcacgttcgagtggatgaaagtgaagaggaatgcctctaagaaaggcaaactcgccgagtatggggccgctagcccctccagcgcgatccgcacgaatttcagcaccaagcaactgacagaactggaaaaagagtttcatttcaataagtacttaactcgagcccggcgcatcgagatagccaactgcttgcacctgaatgacacgcaagtcaaaatctggttccagaaccgcaggatgaaacagaagaaaagggaacgagaagggcttctggccacggccattcctgtggctcccctccaacttcccctctctggaacaacccccactaagtttatcaagaaccccggcagcccttctcagtcccaagagccttcgtagtaatgaactagtccgtaacttgaaagtatttcgatttcttggctttatatatcttgtggaaaggacgatctggacatttattgatccatctc

SEQ ID NO: 554 - DNA, 1598 bp, Homo sapiens
  source 1..1598: mol_type = genomic DNA
accgccaccatggatttctcagtaaaggtagacatagagaaggaggtgacctgccccatctgcctggagctcctgacagaacctctgagcctagattgtggccacagcttctgccaagcctgcatcactgcaaagatcaaggagtcagtgatcatctcaagaggggaaagcagctgtcctgtgtgtcagaccagattccagcctgggaacctccgacctaatcggcatctggccaacatagttgagagagtcaaagaggtcaagatgagcccacaggaggggcagaagagagatgtctgtgagcaccatggaaaaaaactccagatcttctgtaaggaggatggaaaagtcatttgctgggtttgtgaactgtctcaggaacaccaaggtcaccaaacattccgcataaacgaggtggtcaaggaatgtcaggaaaagctgcaggtagccctgcagaggctgataaaggaggatcaagaggctgagaagctggaagatgacatcagacaagagagaaccgcctggaagaattatatccagatcgagagacagaagattctgaaagggttcaatgaaatgagagtcatcttggacaatgaggagcagagagagctgcaaaagctggaggaaggtgaggtgaatgtgctggataacctggcagcagctacagaccagctggtccagcagaggcaggatgccagcacgctcatctcagatctccagcggaggttgaggggatcgtcagtagagatgctgcaggatgtgattgacgtcatgaaaaggagtgaaagctggacattgaagaagccaaaatctgtttccaagaaactaaagagtgtattccgagtaccagatctgagtgggatgctgcaagttcttaaagagctgacagatgtccagtactactgggtggacgtgatgctgaatccaggcagtgccacttcgaatgttgctatttctgtggatcagagacaagtgaaaactgtacgcacctgcacatttaagaattcaaatccatgtgatttttctgcttttggtgtcttcggctgccaatatttctcttcggggaaatattactgggaagtagatgtgtctggaaagattgcctggatcctgggcgtacacagtaaaataagtagtctgaataaaaggaagagctctgggtttgcttttgatccaagtgtaaattattcaaaagtttactccagatatagacctcaatatggctactgggttataggattacagaatacatgtgaatataatgcttttgaggactcctcctcttctgatcccaaggttttgactctctttatggctgtgcctccctgtcgtattggggttttcctagactatgaggcaggcattgtctcatttttcaatgtcacaaaccacggagcactcatctacaagttctctggatgtcgcttttctcgacctgcttatccgtatttcaatccttggaactgcctagtccccatgactgtgtgcccaccgagctcctagtaatgaactagtccgtaacttgaaagtatttcgatttcttggctttatatatcttgtggaaaggacgaaatcggcgctaccatgcaataccg

SEQ ID NO: 555 - DNA, 1448 bp, Homo sapiens
  source 1..1448: mol_type = genomic DNA
accgccaccatgagcgctagcggccccgaggctcctggggacattcccgcgctaccgccgcctccccagccaggttcggggcccgcaccgcccgctcccgccgccgctgcccaggaagctatggacgggcgcgccgagctgccggcctttccccgcgctggagccccgccgctcgcggccagcgacactgtgcctgcggcgcccgagggggctggagcggcccggcccgcagcgcccctgcgccccacctccttctcggtactggacatcctggaccccaacaagttcaacagcaggaggcgtcgttgcgtgctgctgggcccagtggctcccgctgcgtgcgccccttgcgcttcggccccatgcgcccctgcacccgccgcctcgggacgcccgccacgcgcggaggagctggagcgccgcgccctcgccggcgccgggggagtcggagccgccggagctgagccgccgaacgccggcgaccccttcaaggcaggggaggccgagaccaacgacaccaacggctacagcagcggcggcggcggccacagcccgagcgcggacagcggggacgaggttcccgacgacgaggacgacgacgaggacgaagcgcccgagacggaggcggcgcgaggcgcggaggaggcgcggggaggcggcggcggcctcggggcccgcgggtcgggttgccagggcgcggctgagaccgacgcgtcccccggagccaccgtcgacgaggcagcggcccccggaccccgcgagaactcgcccgttgcccagggcccaccgggaggtgcagcggcgccggggggcgcggggaccaccccgcagggcacggcgacggcggcgaagcccaagcggaagcgcacggggtccgactccaagtccgggaagccgcggcgagcgcgcaccgccttcacctacgagcagctcgtggcgctggagaacaagttcaaggccacgcgctacctgtcggtgtgcgagcgcctcaacctggcgctgtcgctcagcctcaccgagacgcaggtgaagatctggttccagaaccgccgaaccaagtggaagaagcagaacccgggcgccgacaccagcgctccgaccggcggcgggggcggaccgggaccgggggccgggcctggcacggggctgcccggcggcctcagcccgctcagcccctcgccgcccatgggcgccccgctcggcatgcacggcccggccgggtacccggcgcacggccccggaggcctggtgtgcgccgcgcagctgccgttcctgtcgagcccggcggtgctctcgcccttcgtgctgggctcgcagacctacggggcgcccgccttctacgcgccgcacctctagtaatgaactagtccgtaacttgaaagtatttcgatttcttggctttatatatcttgtggaaaggacgacccgaggttggttccaactttagg

SEQ ID NO: 556 - DNA, 2228 bp, Homo sapiens
  source 1..2228: mol_type = genomic DNA
accgccaccatgggaatgtccaaatcacacagtttctttggttatcccctgagcatcttcttcatcgtggtcaatgagttttgcgaaagattttcctactatggaatgcgagcaatcctgattctgtacttcacaaatttcatcagctgggatgataacctgtccaccgccatctaccatacgtttgtggctctgtgctacctgacgccaattctcggagctcttatcgccgactcgtggctgggaaagttcaagaccattgtgtcgctctccattgtctacacaattggacaagcagtcacctcagtaagctccattaatgacctcacagaccacaaccatgatggcacccccgacagccttcctgtgcacgtggtgctgtccttgatcggcctggccctgatagctctcgggactggaggaatcaaaccctgtgtgtctgcgtttggtggagatcagtttgaagagggccaggagaaacaaagaaacagatttttttccatcttttacttggctattaatgctggaagtttgctttccacaatcatcacacccatgctcagagttcaacaatgtggaattcacagtaaacaagcttgttacccactggcctttggggttcctgctgctctcatggctgtagccctgattgtgtttgtccttggcagtgggatgtacaagaagttcaagccacagggcaacatcatgggtaaagtggccaagtgcatcggttttgccatcaaaaatagatttaggcatcggagtaaggcatttcccaagagggagcactggctggactgggctaaagagaaatacgatgagcggctcatctcccaaattaagatggttacgagggtgatgttcctgtatattccactcccaatgttctgggccttgtttgaccagcagggctccaggtggacactgcaggcaacaactatgtccgggaaaatcggagctcttgaaattcagcccgatcagatgcagaccgtgaacgccatcctgatcgtgatcatggtcccgatcttcgatgctgtgctgtaccctctcattgcaaaatgtggcttcaatttcacctccttgaagaagatggcagttggcatggtcctggcctccatggcctttgtggtggctgccatcgtgcaggtggaaatcgataaaactcttccagtcttccccaaaggaaacgaagtccaaattaaagttttgaatataggaaacaataccatgaatatatctcttcctggagagatggtgacacttggcccaatgtctcaaacaaatgcatttatgacttttgatgtaaacaaactgacaaggataaacatttcttctcctggatcaccagtcactgctgtaactgacgacttcaagcagggccaacgccacacgcttctagtgtgggcccccaatcactaccaggtggtaaaggatggtcttaaccagaagccagaaaaaggggaaaatggaatcagatttgtaaatacttttaacgagctcatcaccatcacaatgagtgggaaagtttatgcaaacatcagcagctacaatgccagcacataccagttttttccttctggcataaaaggcttcacaataagctcaacagagattccgccacaatgtcaacctaatttcaatactttctaccttgaatttggtagtgcttatacctatatagtccaaaggaagaatgacagctgccctgaagtgaaggtgtttgaagatatttcagccaacacagttaacatggctctgcaaatcccgcagtattttcttctcacctgtggcgaagtggtcttctctgtcacgggattggaattctcatattctcaggctccttccaacatgaagtcggtgcttcaggcaggatggctgctgaccgtggctgttggcaacatcattgtgctcatcgtggcaggggcaggccagttcagcaaacagtgggccgagtacattctatttgccgcgttgcttctggtcgtctgtgtaatttttgccatcatggctcggttctatacttacatcaacccagcggagatcgaagctcaatttgatgaggatgaaaagaaaaacagactggaaaagagtaacccatatttcatgtcaggggccaattcacagaaacagatgtagtaatgaactagtccgtaacttgaaagtatttcgatttcttggctttatatatcttgtggaaaggacgatctgtaatgctcaccgaactacat

SEQ ID NO: 557 - DNA, 545 bp, Homo sapiens
  source 1..545: mol_type = genomic DNA
accgccaccatgtcatctgagcctcccccaccaccacagccccccacccatcaagcttcagtcgggctgctggacacccctcggagccgtgagcgctcaccatcccctctgcggggcaacgtggtcccaagcccactgcccactcgccggacgaggaccttctcggcgacggtgcgggcttcacagggccccgtctacaaaggagtctgcaaatgcttctgccggtccaagggccatggcttcattactccagctgatggcggccccgacatcttcctgcacatctctgatgtggaaggggagtatgtcccagtggaaggcgacgaggtcacctataaaatgtgctccatcccacccaagaatgagaagctgcaggccgtggaggtcgtcatcactcacctggcaccaggcaccaagcatgagacctggtctggacatgtcatcagctcctagtaatgaactagtccgtaacttgaaagtatttcgatttcttggctttatatatcttgtggaaaggacgacctcatttgcaactgttcgaagcc

SEQ ID NO: 558 - DNA, 1430 bp, Homo sapiens
  source 1..1430: mol_type = genomic DNA
accgccaccatgccgcgaaggaagaggaatgcaggcagtagttcagatggaaccgaagattccgatttttctacagatctcgagcacacagacagttcagaaagtgatggcacatcccgacgatctgctcgagtcacccgctcctcagccaggctaagccagagttctcaaggacaccttacaggaaaacatgagagacatttctccatctcaggatgcccactgtatcataacctctcagctgacgaatgcaaggcaccaacggagagacagcttcgatataaggaaaaagtggctgaactcaggaagaaaagaaattctggactgagcaaagaacagaaagagaaatatatggaacacagacagacctatgggaacacacgggaacctcttttagaaaacctgacaagcgagtatgacttggatcttttccgaagagcacaagcccgggcttcagaggatttggagaagttaaggctgcaaggccaaatcacagagggaagcaacatgattaaaacaattgcttttggccgctatgagcttgatacctggtatcattctccatatcctgaagaatatgcacggctgggacgtctctatatgtgtgaattctgtttaaaatatatgaagagccaaacgatactccgccggcacatggccaaatgtgtgtggaaacacccacctggtgatgagatatatcgcaaaggttcaatctctgtgtttgaagtggatggcaagaaaaacaagatctactgccaaaacctgtgcctgttggccaaactttttctggaccacaagacattatattatgatgtggagcccttcctgttctatgttatgacagaggcggacaacactggctgtcacctgattggatatttttctaaggaaaagaattcattcctcaactacaacgtctcctgtatccttactatgcctcagtacatgagacagggctatggcaagatgcttattgatttcagttatttgctttccaaagtcgaagaaaaagttggctccccagaacgtccactctcagatctggggcttataagctatcgcagttactggaaagaagtacttctccgctacctgcataattttcaaggcaaagagatttctatcaaagaaatcagtcaggagacggctgtgaatcctgtggacattgtcagcactctgcaagcccttcagatgctcaaatactggaagggaaaacacctagttttaaagagacaggacctgattgatgagtggatagccaaagaggccaaaaggtccaactccaataaaaccatggatcccagctgcttaaaatggacccctcccaagggcacttagtaatgaactagtccgtaacttgaaagtatttcgatttcttggctttatatatcttgtggaaaggacgatcctcttcgtgtcgtatcccaaga

SEQ ID NO: 559 - DNA, 1607 bp, Homo sapiens
  source 1..1607: mol_type = genomic DNA
accgccaccatgccgcgaaggaagaggaatgcaggcagtagttcagatggaaccgaagattccgatttttctacagatctcgagcacacagacagttcagaaagtgatggcacatcccgacgatctgctcgagtcacccgctcctcagccaggctaagccagagttctcaagattccagtcctgttcgaaatctgcagtcttttggcactgaggagcctgcttactctaccagaagagtgacccgtagtcagcagcagcctaccccagtgacaccgaaaaaataccctcttcggcagactcgttcatctggttcagaaactgagcaagtggttgatttttcagatagaggacaccttacaggaaaacatgagagacatttctccatctcaggatgcccactgtatcataacctctcagctgacgaatgcaaggcaccaacggagagacagcttcgatataaggaaaaagtggctgaactcaggaagaaaagaaattctggactgagcaaagaacagaaagagaaatatatggaacacagacagacctatgggaacacacgggaacctcttttagaaaacctgacaagcgagtatgacttggatcttttccgaagagcacaagcccgggcttcagaggatttggagaagttaaggctgcaaggccaaatcacagagggaagcaacatgattaaaacaattgcttttggccgctatgagcttgatacctggtatcattctccatatcctgaagaatatgcacggctgggacgtctctatatgtgtgaattctgtttaaaatatatgaagagccaaacgatactccgccggcacatggccaaatgtgtgtggaaacacccacctggtgatgagatatatcgcaaaggttcaatctctgtgtttgaagtggatggcaagaaaaacaagatctactgccaaaacctgtgcctgttggccaaactttttctggaccacaagacattatattatgatgtggagcccttcctgttctatgttatgacagaggcggacaacactggctgtcacctgattggatatttttctaaggaaaagaattcattcctcaactacaacgtctcctgtatccttactatgcctcagtacatgagacagggctatggcaagatgcttattgatttcagttatttgctttccaaagtcgaagaaaaagttggctccccagaacgtccactctcagatctggggcttataagctatcgcagttactggaaagaagtacttctccgctacctgcataattttcaaggcaaagagatttctatcaaagaaatcagtcaggagacggctgtgaatcctgtggacattgtcagcactctgcaagcccttcagatgctcaaatactggaagggaaaacacctagttttaaagagacaggacctgattgatgagtggatagccaaagaggccaaaaggtccaactccaataaaaccatggatcccagctgcttaaaatggacccctcccaagggcacttagtaatgaactagtccgtaacttgaaagtatttcgatttcttggctttatatatcttgtggaaaggacgaggagtcgcccacgtgctgtggatt

SEQ ID NO: 560 - DNA, 1847 bp, Homo sapiens
  source 1..1847: mol_type = genomic DNA
accgccaccatgccgcgaaggaagaggaatgcaggcagtagttcagatggaaccgaagattccgatttttctacagatctcgagcacacagacagttcagaaagtgatggcacatcccgacgatctgctcgagtcacccgctcctcagccaggctaagccagagttctcaagattccagtcctgttcgaaatctgcagtcttttggcactgaggagcctgcttactctaccagaagagtgacccgtagtcagcagcagcctaccccagtgacaccgaaaaaataccctcttcggcagactcgttcatctggttcagaaactgagcaagtggttgatttttcagatagagaaactaaaaatacagctgatcatgatgagtcaccgcctcgaactccaactggaaatgcgccttcttctgagtctgacatagacatctccagccccaatgtatctcacgatgagagcattgccaaggacatgtccctgaaggactcaggcagtgatctctctcatcgccccaagcgccgtcgcttccatgaaagctacaacttcaatatgaagtgtcctacaccaggctgtaactctctaggacaccttacaggaaaacatgagagacatttctccatctcaggatgcccactgtatcataacctctcagctgacgaatgcaaggcaccaacggagagacagcttcgatataaggaaaaagtggctgaactcaggaagaaaagaaattctggactgagcaaagaacagaaagagaaatatatggaacacagacagacctatgggaacacacgggaacctcttttagaaaacctgacaagcgagtatgacttggatcttttccgaagagcacaagcccgggcttcagaggatttggagaagttaaggctgcaaggccaaatcacagagggaagcaacatgattaaaacaattgcttttggccgctatgagcttgatacctggtatcattctccatatcctgaagaatatgcacggctgggacgtctctatatgtgtgaattctgtttaaaatatatgaagagccaaacgatactccgccggcacatggccaaatgtgtgtggaaacacccacctggtgatgagatatatcgcaaaggttcaatctctgtgtttgaagtggatggcaagaaaaacaagatctactgccaaaacctgtgcctgttggccaaactttttctggaccacaagacattatattatgatgtggagcccttcctgttctatgttatgacagaggcggacaacactggctgtcacctgattggatatttttctaaggaaaagaattcattcctcaactacaacgtctcctgtatccttactatgcctcagtacatgagacagggctatggcaagatgcttattgatttcagttatttgctttccaaagtcgaagaaaaagttggctccccagaacgtccactctcagatctggggcttataagctatcgcagttactggaaagaagtacttctccgctacctgcataattttcaaggcaaagagatttctatcaaagaaatcagtcaggagacggctgtgaatcctgtggacattgtcagcactctgcaagcccttcagatgctcaaatactggaagggaaaacacctagttttaaagagacaggacctgattgatgagtggatagccaaagaggccaaaaggtccaactccaataaaaccatggatcccagctgcttaaaatggacccctcccaagggcacttagtaatgaactagtccgtaacttgaaagtatttcgatttcttggctttatatatcttgtggaaaggacgagaagatgaggtctgaaatcatgct

SEQ ID NO: 561 - DNA, 1520 bp, Homo sapiens
  source 1..1520: mol_type = genomic DNA
accgccaccatgccgcgaaggaagaggaatgcaggcagtagttcagatggaaccgaagattccgatttttctacagatctcgagcacacagacagttcagaaagtgatggcacatcccgacgatctgctcgagtcacccgctcctcagccaggctaagccagagttctcaaggacaccttacaggaaaacatgagagacatttctccatctcaggatgcccactgtatcataacctctcagctgacgaatgcaaggtgagagcacagagccgggataagcagatagaagaaaggatgctgtctcacaggcaagatgacaacaacaggcatgcaaccaggcaccaggcaccaacggagagacagcttcgatataaggaaaaagtggctgaactcaggaagaaaagaaattctggactgagcaaagaacagaaagagaaatatatggaacacagacagacctatgggaacacacgggaacctcttttagaaaacctgacaagcgagtatgacttggatcttttccgaagagcacaagcccgggcttcagaggatttggagaagttaaggctgcaaggccaaatcacagagggaagcaacatgattaaaacaattgcttttggccgctatgagcttgatacctggtatcattctccatatcctgaagaatatgcacggctgggacgtctctatatgtgtgaattctgtttaaaatatatgaagagccaaacgatactccgccggcacatggccaaatgtgtgtggaaacacccacctggtgatgagatatatcgcaaaggttcaatctctgtgtttgaagtggatggcaagaaaaacaagatctactgccaaaacctgtgcctgttggccaaactttttctggaccacaagacattatattatgatgtggagcccttcctgttctatgttatgacagaggcggacaacactggctgtcacctgattggatatttttctaaggaaaagaattcattcctcaactacaacgtctcctgtatccttactatgcctcagtacatgagacagggctatggcaagatgcttattgatttcagttatttgctttccaaagtcgaagaaaaagttggctccccagaacgtccactctcagatctggggcttataagctatcgcagttactggaaagaagtacttctccgctacctgcataattttcaaggcaaagagatttctatcaaagaaatcagtcaggagacggctgtgaatcctgtggacattgtcagcactctgcaagcccttcagatgctcaaatactggaagggaaaacacctagttttaaagagacaggacctgattgatgagtggatagccaaagaggccaaaaggtccaactccaataaaaccatggatcccagctgcttaaaatggacccctcccaagggcacttagtaatgaactagtccgtaacttgaaagtatttcgatttcttggctttatatatcttgtggaaaggacgactactctcgtgggaatgataggac

SEQ ID NO: 562 - DNA, 1955 bp, Homo sapiens
  source 1..1955: mol_type = genomic DNA
accgccaccatgatttcaccttcacttgaactgcttcattcaggactctgcaaattccctgaagtagaaggaaaaatgaccacattcaaagaggcagtgacattcaaggatgtggctgtggtcttcactgaggaggagctggggctgctggaccctgcccagaggaagctgtaccgagatgtgatgctagagaacttcaggaacctgctctcagtagggaatcaaccattccaccaagatactttccacttcttagggaaggaaaagttttggaagatgaagacaacaagccaaagagaagggaattcaggaggcaagatccaaattgagatggagactgttccagaagcaggaccacatgaagagtggtcctgtcagcaaatatgggaacaaattgcaagtgacctaaccaggtctcaaaactccataaggaacagctctcagttcttcaaagaaggtgatgtcccctgccagattgaggcaagactatctataagtcacgtgcaacagaaaccttaccgttgtaatgaatgtaaacagtccttcagtgatgtttctgtctttgatcttcatcaacaatcacactcaggagagaaatctcatacatgtggtgagtgtggaaaaagcttctgttacagcccagcccttcatattcatcagagagtccatatgggagaaaaatgctataagtgtgatgtgtgtggtaaggaatttaatcagagctcacatctgcaaactcatcagagagtccatactggagagaaaccattcaaatgtgggcaatgtgggaaaggcttccatagtagatcagcacttaatgttcattgcaaattgcacacaggagagaaaccttataattgtgaggaatgtgggaaagccttcattcatgattcacagcttcaagaacatcagagaatccatactggggagaagccattcaaatgtgatatatgtggtaagagcttccgtgttagatcaagacttaataggcattccatggttcacacaggagaaaaaccattcagatgtgatacatgtggcaagaactttcgtcagagatcagcacttaatagtcattccatggtccacatagaagagaagccatacaaatgtgagcaatgtggaaaaggcttcatttgtaggcgagatttttgtaagcatcagatggtccacacaggagagaaaccatataattgtaaagaatgtgggaagaccttcagatggtcctcatgtcttttgaaccatcagcaagtccacagtggacaaaaatccttcaaatgtgaagaatgtgggaagggattttatacaaattcacgacgatcttcccatcagagatcccacaatggagaaaagccatataactgtgaggagtgtggtaaggactataaaaggaggttggatcttgagtttcaccagagggtccacacgggtgagagaccctataattgtaaggaatgtggcaagagctttggctgggcctcctgtcttttgaaacatcagagactccacagtggggaaaaacctttcaaatgtgaagagtgtggaaagagatttactcagagttcacaacttcattcccatcagacatgccatactggagaaaagctatacaaatgtgagcagtgtgagaaggggtacaacagtaaatttaatcttgacatgcaccagagggtccacgggggagagcgaccctataattgtaaggaatgtggaaagagctttggctgggcttcatgtcttttgaaacatcagagactccacagtggagaaaagccattgaaatctggagtgtgggaagagatctactcagaattcacagcttcatttacatcagtaagtctatgtgggagaaaagccatatagtaatgaactagtccgtaacttgaaagtatttcgatttcttggctttatatatcttgtggaaaggacgagctaggtcagatcccaaagtcaag

SEQ ID NO: 563 - DNA, 2525 bp, Homo sapiens
  source 1..2525: mol_type = genomic DNA
accgccaccatggcccagcagggccagcaggggcagatggcaagtggagacagcaatctcaacttcaggatggtcgcagagatccagaacgtagagggtcagaacctgcaggagcaggtttgccctgagcccattttcaggttcttcagagaaaacaaggtggagattgcaagtgcaataacaaggccatttcctttccttatgggcctccgagaccgctccttcatctccgagcagatgtatgaacattttcaagaagcttttagaaacctggtcccagtgacaagagtgatgtattgtgtactcagtgaactggagaagacatttggctggtcacatctggaagcattgttcagcaggattaacctgatggcctatcctgatttaaacgagatttacagaagcttccagaatgtatgctatgaacactcacctctccaaatgaataatgtaaacgatttagaagatagacccagattactaccatatggtaaacaagagaacagcaatgcctgtcatgaaatggatgatatagcagtgcctcaggaagccttgagctcctcgccaaggtgtgagccaggtttctcttcagagtcttgtgagcagttagctctcccaaaggctggtggaggagatgctgaagatgcacccagcctactaccaggtgggggagttctagaaagcaacgggatgatagatgcggcaaggacatacagcacagcaccaggggagaaacagggagaggaggaaggcaggaacagtcccagaaaaagaaaccaagacaaggagaagtaccaagagagtccagagggaagagacaaagagacctttgatctaaaaactccccaagtcactaatgaaggagaaccagagaaggggctctgtctactaccaggtgaaggagaagagggcagtgatgactgttcagaaatgtgtgatggagaagagccccaggaagcctctagctccctagcaagatgtgggtcagagggcagtgatgactgttcggaaatgtgtgatggagaagagcgccaggaagcctctagctccctagcaagacgtgggtcagtgtctagtgaactagaaaatcacccaatgaatgaagaaggagaatcagaagagcttgcttctagcctgctatatgataatgtaccaggagcggagcaatcagcatatgaaaatgagaagtgttcctgtgtcatgtgtttctcagaagaggtgccaggaagcccagaagcaaggacggaaagtgatcaagcgtgtggcacaatggatactgtggatattgcaaacaactccactttgggaaaacccaagaggaaaagaagaaaaaagagggggcatggctggagcagaatgagaatgagaaggcaggaaaacagccaacaaaatgataatagcaaagccgacggccaggtggtctccagtgaaaagaaggcgaacgtgaatctgaaagacctttccaagattagggggagaaagagaggcaaacctggaacccgcttcactcagagtgacagagctgcacagaaaagagtccgatcaagagcttcaagaaagcacaaagatgaaactgtggattttaaggctcctttgcttccagtgacctgtggtggggtgaagggaattttacataagaagaaattgcagcaaggaatcttggtgaagtgtatacagactgaggatggaaaatggttcacccccacggaatttgaaatcaaaggaggccatgcaagatcaaagaactggaggctgagtgtgcgctgtggcgggtggcccctacgatggctgatggagaatggatttctgcctgatcctccaagaatacgttacaggaaaaaaaagagaatactgaagtctcaaaacaatagctcagttgacccttgtatgagaaacctggatgagtgtgaggtgtgccgggacggaggggagctgttctgttgcgacacttgttcaagagtcttccatgaggactgtcacatcccgcctgtggaagctgagaggaccccgtggaattgcatcttctgcaggatgaaggagtctccgggaagccaacagtgttgtcaggaatctgaggtcctggagaggcagatgtgtcctgaggaacagttgaaatgtgagttcctcctcttgaaagtctattgctgttctgagagctccttttttgccaagattccatactattattatattagagaggcgtgtcaaggcctgaaggagcccatgtggttggataaaatcaagaaaaggctgaatgagcacggttacccccaagtggaggggtttgtacaagacatgcgcctcatcttccagaaccacagggcctcttacaagtacaaggattttggccaaatgggatttagactggaggctgagtttgagaagaatttcaaggaagtgtttgctattcaggaaacaaatgggaacaattagtaatgaactagtccgtaacttgaaagtatttcgatttcttggctttatatatcttgtggaaaggacgattacagtctgctaccggtttaaat

SEQ ID NO: 564 - DNA, 2705 bp, Homo sapiens
  source 1..2705: mol_type = genomic DNA
accgccaccatggcccagcagggccagcaggggcagatggcaagtggagacagcaatctcaacttcaggatggtcgcagagatccagaacgtagagggtcagaacctgcaggagcaggtttgccctgagcccattttcaggttcttcagagaaaacaaggtggagattgcaagtgcaataacaaggccatttcctttccttatgggcctccgagaccgctccttcatctccgagcagatgtatgaacattttcaagaagcttttagaaacctggtcccagtgacaagagtgatgtattgtgtactcagtgaactggagaagacatttggctggtcacatctggaagcattgttcagcaggattaacctgatggcctatcctgatttaaacgagatttacagaagcttccagaatgtatgctatgaacactcacctctccaaatgaataatgtaaacgatttagaagatagacccagattactaccatatggtaaacaagagaacagcaatgcctgtcatgaaatggatgatatagcagtgcctcaggaagccttgagctcctcgccaaggtgtgagccaggtttctcttcagagtcttgtgagcagttagctctcccaaaggctggtggaggagatgctgaagatgcacccagcctactaccaggtgggggagtgtcctgtaaacttgctatacaaatagatgaaggagaatcagaagaaatgcccaagttactgccttatgatacagaagttctagaaagcaacgggatgatagatgcggcaaggacatacagcacagcaccaggggagaaacagggagaggaggaaggcaggaacagtcccagaaaaagaaaccaagacaaggagaagtaccaagagagtccagagggaagagacaaagagacctttgatctaaaaactccccaagtcactaatgaaggagaaccagagaaggggctctgtctactaccaggtgaaggagaagagggcagtgatgactgttcagaaatgtgtgatggagaagagccccaggaagcctctagctccctagcaagatgtgggtcagtttcttgtttatctgcagagacctttgatctaaagactccccaagtcactaatgaaggagaaccagagaaggagctcagtctactaccaggtgaaggagaagagggcagtgatgactgttcggaaatgtgtgatggagaagagcgccaggaagcctctagctccctagcaagacgtgggtcagtgtctagtgaactagaaaatcacccaatgaatgaagaaggagaatcagaagagcttgcttctagcctgctatatgataatgtaccaggagcggagcaatcagcatatgaaaatgagaagtgttcctgtgtcatgtgtttctcagaagaggtgccaggaagcccagaagcaaggacggaaagtgatcaagcgtgtggcacaatggatactgtggatattgcaaacaactccactttgggaaaacccaagaggaaaagaagaaaaaagagggggcatggctggagcagaatgagaatgagaaggcaggaaaacagccaacaaaatgataatagcaaagccgacggccaggtggtctccagtgaaaagaaggcgaacgtgaatctgaaagacctttccaagattagggggagaaagagaggcaaacctggaacccgcttcactcagagtgacagagctgcacagaaaagagtccgatcaagagcttcaagaaagcacaaagatgaaactgtggattttaaggctcctttgcttccagtgacctgtggtggggtgaagggaattttacataagaagaaattgcagcaaggaatcttggtgaagtgtatacagactgaggatggaaaatggttcacccccacggaatttgaaatcaaaggaggccatgcaagatcaaagaactggaggctgagtgtgcgctgtggcgggtggcccctacgatggctgatggagaatggatttctgcctgatcctccaagaatacgttacaggaaaaaaaagagaatactgaagtctcaaaacaatagctcagttgacccttgtatgagaaacctggatgagtgtgaggtgtgccgggacggaggggagctgttctgttgcgacacttgttcaagagtcttccatgaggactgtcacatcccgcctgtggaagctgagaggaccccgtggaattgcatcttctgcaggatgaaggagtctccgggaagccaacagtgttgtcaggaatctgaggtcctggagaggcagatgtgtcctgaggaacagttgaaatgtgagttcctcctcttgaaagtctattgctgttctgagagctccttttttgccaagattccatactattattatattagagaggcgtgtcaaggcctgaaggagcccatgtggttggataaaatcaagaaaaggctgaatgagcacggttacccccaagtggaggggtttgtacaagacatgcgcctcatcttccagaaccacagggcctcttacaagtacaaggattttggccaaatgggatttagactggaggctgagtttgagaagaatttcaaggaagtgtttgctattcaggaaacaaatgggaacaattagtaatgaactagtccgtaacttgaaagtatttcgatttcttggctttatatatcttgtggaaaggacgagccacagtattagcacgactggct

SEQ ID NO: 565 - DNA, 620 bp, Homo sapiens
  source 1..620: mol_type = genomic DNA
accgccaccatggcccagcagggccagcaggggcagatggcaagtggagacagcaatctcaacttcaggatggtcgcagagatccagaacgtagagggtcagaacctgcaggagcaggtttgccctgagcccattttcaggttcttcagagaaaacaaggtggagattgcaagtgcaataacaaggccatttcctttccttatgggcctccgagaccgctccttcatctccgagcagatgtatgaacattttcaagaagcttttagaaacctggtcccagtgacaagagtgatgtattgtgtactcagtgaactggagaagacatttggctggtcacatctggaagcattgttcagcaggattaacctgatggcctatcctgatttaaacgagatttacagaagcttccagaatgaaaatttatcatccagtgcagtcctgtgtcaacttgtttctccaaacaaagactggagaagtcacgaagagagcctagcacatactggtacactgaggaggagctgcatgtagtaatgaactagtccgtaacttgaaagtatttcgatttcttggctttatatatcttgtggaaaggacgacctagcgtctcagtccgaaatacg

SEQ ID NO: 566 - DNA, 2363 bp, Homo sapiens
  source 1..2363: mol_type = genomic DNA
accgccaccatggcccagcagggccagcaggggcagatggcaagtggagacagcaatctcaacttcaggatggtcgcagagatccagaacgtagagggtcagaacctgcaggagcaggtttgccctgagcccattttcaggttcttcagagaaaacaaggtggagattgcaagtgcaataacaaggccatttcctttccttatgggcctccgagaccgctccttcatctccgagcagatgtatgaacattttcaagaagcttttagaaacctggtcccagtgacaagagtgatgtattgtgtactcagtgaactggagaagacatttggctggtcacatctggaagcattgttcagcaggattaacctgatggcctatcctgatttaaacgagatttacagaagcttccagaatgtatgctatgaacactcacctctccaaatgaataatgtaaacgatttagaagatagacccagattactaccatatggtaaacaagagaacagcaatgcctgtcatgaaatggatgatatagcagtgcctcaggaagccttgagctcctcgccaaggtgtgagccaggtttctcttcagagtcttgtgagcagttagctctcccaaaggctggtggaggagatgctgaagatgcacccagcctactaccagtgtcctgtaaacttgctatacaaatagatgaaggagaatcagaagaaatgcccaagttactgccttatgatacagaagagacctttgatctaaaaactccccaagtcactaatgaaggagaaccagagaaggggctctgtctactaccaggtgaaggagaagagggcagtgatgactgttcggaaatgtgtgatggagaagagcgccaggaagcctctagctccctagcaagacgtgggtcagtgtctagtgaactagaaaatcacccaatgaatgaagaaggagaatcagaagagcttgcttctagcctgctatatgataatgtaccaggagcggagcaatcagcatatgaaaatgagaagtgttcctgtgtcatgtgtttctcagaagaggtgccaggaagcccagaagcaaggacggaaagtgatcaagcgtgtggcacaatggatactgtggatattgcaaacaactccactttgggaaaacccaagaggaaaagaagaaaaaagagggggcatggctggagcagaatgagaatgagaaggcaggaaaacagccaacaaaatgataatagcaaagccgacggccaggtggtctccagtgaaaagaaggcgaacgtgaatctgaaagacctttccaagattagggggagaaagagaggcaaacctggaacccgcttcactcagagtgacagagctgcacagaaaagagtccgatcaagagcttcaagaaagcacaaagatgaaactgtggattttaaggctcctttgcttccagtgacctgtggtggggtgaagggaattttacataagaagaaattgcagcaaggaatcttggtgaagtgtatacagactgaggatggaaaatggttcacccccacggaatttgaaatcaaaggaggccatgcaagatcaaagaactggaggctgagtgtgcgctgtggcgggtggcccctacgatggctgatggagaatggatttctgcctgatcctccaagaatacgttacaggaaaaaaaagagaatactgaagtctcaaaacaatagctcagttgacccttgtatgagaaacctggatgagtgtgaggtgtgccgggacggaggggagctgttctgttgcgacacttgttcaagagtcttccatgaggactgtcacatcccgcctgtggaagctgagaggaccccgtggaattgcatcttctgcaggatgaaggagtctccgggaagccaacagtgttgtcaggaatctgaggtcctggagaggcagatgtgtcctgaggaacagttgaaatgtgagttcctcctcttgaaagtctattgctgttctgagagctccttttttgccaagattccatactattattatattagagaggcgtgtcaaggcctgaaggagcccatgtggttggataaaatcaagaaaaggctgaatgagcacggttacccccaagtggaggggtttgtacaagacatgcgcctcatcttccagaaccacagggcctcttacaagtacaaggattttggccaaatgggatttagactggaggctgagtttgagaagaatttcaaggaagtgtttgctattcaggaaacaaatgggaacaattagtaatgaactagtccgtaacttgaaagtatttcgatttcttggctttatatatcttgtggaaaggacgaaccggctttaagggaatgccggaa

SEQ ID NO: 567 - DNA, 2624 bp, Homo sapiens
  source 1..2624: mol_type = genomic DNA
accgccaccatggcccagcagggccagcaggggcagatggcaagtggagacagcaatctcaacttcaggatggtcgcagagatccagaacgtagagggtcagaacctgcaggagcaggtttgccctgagcccattttcaggttcttcagagaaaacaaggtggagattgcaagtgcaataacaaggccatttcctttccttatgggcctccgagaccgctccttcatctccgagcagatgtatgaacattttcaagaagcttttagaaacctggtcccagtgacaagagtgatgtattgtgtactcagtgaactggagaagacatttggctggtcacatctggaagcattgttcagcaggattaacctgatggcctatcctgatttaaacgagatttacagaagcttccagaatgtatgctatgaacactcacctctccaaatgaataatgtaaacgatttagaagatagacccagattactaccatatggtaaacaagagaacagcaatgcctgtcatgaaatggatgatatagcagtgcctcaggaagccttgagctcctcgccaaggtgtgagccaggtttctcttcagagtcttgtgagcagttagctctcccaaaggctggtggaggagatgctgaagatgcacccagcctactaccaggtgggggagtgtcctgtaaacttgctatacaaatagatgaaggagaatcagaagaaatgcccaagttactgccttatgatacagaagttctagaaagcaacgggatgatagatgcggcaaggacatacagcacagcaccaggggagaaacagggagaggaggaaggcaggaacagtcccagaaaaagaaaccaagacaaggagaagtaccaagagagtccagagggaagagacaaagagacctttgatctaaaaactccccaagtcactaatgaaggagaaccagagaaggggctctgtctactaccaggtgaaggagaagagggcagtgatgactgttcagaaatgtgtgatggagaagagccccaggaagcctctagctccctagcaagatgtgggtcagtttcttgtttatctgcagagacctttgatctaaagactccccaagtcactaatgaaggagaaccagagaaggagctcagtctactaccaggtgaaggagaagtgtctagtgaactagaaaatcacccaatgaatgaagaaggagaatcagaagagcttgcttctagcctgctatatgataatgtaccaggagcggagcaatcagcatatgaaaatgagaagtgttcctgtgtcatgtgtttctcagaagaggtgccaggaagcccagaagcaaggacggaaagtgatcaagcgtgtggcacaatggatactgtggatattgcaaacaactccactttgggaaaacccaagaggaaaagaagaaaaaagagggggcatggctggagcagaatgagaatgagaaggcaggaaaacagccaacaaaatgataatagcaaagccgacggccaggtggtctccagtgaaaagaaggcgaacgtgaatctgaaagacctttccaagattagggggagaaagagaggcaaacctggaacccgcttcactcagagtgacagagctgcacagaaaagagtccgatcaagagcttcaagaaagcacaaagatgaaactgtggattttaaggctcctttgcttccagtgacctgtggtggggtgaagggaattttacataagaagaaattgcagcaaggaatcttggtgaagtgtatacagactgaggatggaaaatggttcacccccacggaatttgaaatcaaaggaggccatgcaagatcaaagaactggaggctgagtgtgcgctgtggcgggtggcccctacgatggctgatggagaatggatttctgcctgatcctccaagaatacgttacaggaaaaaaaagagaatactgaagtctcaaaacaatagctcagttgacccttgtatgagaaacctggatgagtgtgaggtgtgccgggacggaggggagctgttctgttgcgacacttgttcaagagtcttccatgaggactgtcacatcccgcctgtggaagctgagaggaccccgtggaattgcatcttctgcaggatgaaggagtctccgggaagccaacagtgttgtcaggaatctgaggtcctggagaggcagatgtgtcctgaggaacagttgaaatgtgagttcctcctcttgaaagtctattgctgttctgagagctccttttttgccaagattccatactattattatattagagaggcgtgtcaaggcctgaaggagcccatgtggttggataaaatcaagaaaaggctgaatgagcacggttacccccaagtggaggggtttgtacaagacatgcgcctcatcttccagaaccacagggcctcttacaagtacaaggattttggccaaatgggatttagactggaggctgagtttgagaagaatttcaaggaagtgtttgctattcaggaaacaaatgggaacaattagtaatgaactagtccgtaacttgaaagtatttcgatttcttggctttatatatcttgtggaaaggacgagcgtgctcagccgctactaaacgt

SEQ ID NO: 568 - DNA, 1457 bp, Homo sapiens
  source 1..1457: mol_type = genomic DNA
accgccaccatggcaaagctctacgaggcagtgaccttcaaggatgtggctgtgatcttcactgaggaggagctggggctgctggaccctgcccagaggaagctgtaccgagatgtgatgcttgagaacttcaggaacctgctctcagtgggaggcaagatccaaactgagatggagactgttccagaagcaggaacacatgaagaattttcctgcaagcaaatttgggaacaaattgcaagtgacttaaccaggtctcaagataccaccataagtaactctcagttatttgaacaagatgacaacccctcccagattaaagcaagactatctacagttcacacaagagaaaaacctttccagggtgaaaattgtaaacagttcttcagtgatgtttccttctttgatcttcctcagcagttatattcaggagagaagtctcatacctgtgatgagtgtggaaaaagcttctgttacatctcagcccttcatattcatcagagggtccacatgggagtgaaatgctataagtgtgatgtgtgtggtaaggaatttagtcagagctcacgtctgcaaactcatcaaagagtccacactggagagaaaccattcaaatgtgagcagtgtgggaaaggcttcagatgtagatcagcacttaaagttcattgcaaattacacatgagagagaaaccttataattgtgagaaatgtgggaaggctttcatgcacaatttccagcttcagaaacatcacagaattcatactggggagaagccattcaaatgtgaaatatgtggtaagagcttctgtcttaggtcaagtcttaataggcattgcatggtccacacagcagagaaactgtacaaatctgaaaagtatggaagaggtttcattgataggctagatttgcataagcatcagatgattcatatgggacagaaaccatataattgtaaagaatgtgggaagagcttcaaatggtcctcatatcttttggtccatcaacgagtccacactggagaaaagccatacaaatgtgaggagtgtgggaagggctacattagtaagtcaggtcttgacttccaccatagaacccacacgggagagagatcttataactgtgataactgcgggaagagctttagacatgcttctagtattttgaatcataagaaactccactgccaaagaaagccattgaaatgtgaagactgtggaaagaggcttgtatgccggtcatactgtaaagaccaacaaagagaccacagtggagaaaacccatccaaatgtgaggactgtgggaagcgctacaagaggcgcttgaatctggatataattttatcattatttttaaatgacatatagtaatgaactagtccgtaacttgaaagtatttcgatttcttggctttatatatcttgtggaaaggacgagtcaacggacatcgagtgatattg

SEQ ID NO: 569 - DNA, 1577 bp, Homo sapiens
  source 1..1577: mol_type = genomic DNA
accgccaccatgatcgattcaggagaaaagaagcctgggcggagagcagaggaggcagtgaccttcaaggatgtggctgtgatcttcactgaggaggagctggggctgctggaccctgcccagaggaagctgtaccgagatgtgatgcttgagaacttcaggaacctgctctcagtggggcatcaaccattccatggagatactttccacttcctaagggaagaaaagttttgggtgatggggacaacaagccaaagagaagggaatttgggaggcaagatccaaactgagatggagactgttccagaagcaggaacacatgaagaattttcctgcaagcaaatttgggaacaaattgcaagtgacttaaccaggtctcaagataccaccataagtaactctcagttatttgaacaagatgacaacccctcccagattaaagcaagactatctacagttcacacaagagaaaaacctttccagggtgaaaattgtaaacagttcttcagtgatgtttccttctttgatcttcctcagcagttatattcaggagagaagtctcatacctgtgatgagtgtggaaaaagcttctgttacatctcagcccttcatattcatcagagggtccacatgggagtgaaatgctataagtgtgatgtgtgtggtaaggaatttagtcagagctcacgtctgcaaactcatcaaagagtccacactggagagaaaccattcaaatgtgagcagtgtgggaaaggcttcagatgtagatcagcacttaaagttcattgcaaattacacatgagagagaaaccttataattgtgagaaatgtgggaaggctttcatgcacaatttccagcttcagaaacatcacagaattcatactggggagaagccattcaaatgtgaaatatgtggtaagagcttctgtcttaggtcaagtcttaataggcattgcatggtccacacagcagagaaactgtacaaatctgaaaagtatggaagaggtttcattgataggctagatttgcataagcatcagatgattcatatgggacagaaaccatataattgtaaagaatgtgggaagagcttcaaatggtcctcatatcttttggtccatcaacgagtccacactggagaaaagccatacaaatgtgaggagtgtgggaagggctacattagtaagtcaggtcttgacttccaccatagaacccacacgggagagagatcttataactgtgataactgcgggaagagctttagacatgcttctagtattttgaatcataagaaactccactgccaaagaaagccattgaaatgtgaagactgtggaaagaggcttgtatgccggtcatactgtaaagaccaacaaagagaccacagtggagaaaacccatccaaatgtgaggactgtgggaagcgctacaagaggcgcttgaatctggatataattttatcattatttttaaatgacatatagtaatgaactagtccgtaacttgaaagtatttcgatttcttggctttatatatcttgtggaaaggacgagggccgactaaatctacggtcacg

SEQ ID NO: 570 - DNA, 2654 bp, Homo sapiens
  source 1..2654: mol_type = genomic DNA
accgccaccatgagctcccaatgtcggagtttggaaaacaaatttgtctttttaaaagaaggtctaggaaactcaaaacctgaagaattggaagaaatcagaatagaaaatggtaggataagttctgaacgtcgaaaagaaaagtctcgagatgcagccagatctcggcgaagtaaagaatctgaagttttttatgagcttgctcatcagttgccacttccacataatgtgagttcgcatcttgataaggcctctgtgatgaggcttaccatcagctatttgcgtgtgaggaaacttctggatgctggtgatttggatattgaagatgacatgaaagcacagatgaattgcttttatttgaaagccttggatggttttgttatggttctcacagatgatggtgacatgatttacatttctgataatgtgaacaaatacatgggattaactcagtttgaactaactggacacagtgtgtttgattttactcatccatgtgaccatgaggaaatgagagaaatgcttacacacagaaatggccttgtgaaaaagggtaaagaacaaaacacacagcgaagcttttttctcagaatgaagtgtaccctaactagccgaggaagaactatgaacataaagtctgcaacatggaaggtattgcactgcacaggccacattcacgtatatgataccaacagtaaccaacctcagtgtgggtataagaaaccacctatgacctgcttggtgctgatttgtgaacccattcctcacccatcaaatattgaaattcctttagatagcaagactttcctcagtcgacacagcctggatatgaaattttcttattgtgatgaaagaattaccgaattgatgggatatgagccagaagaacttttaggccgctcaatttatgaatattatcatgctttggactctgatcatctgaccaaaactcatcatgatatgtttactaaaggacaagtcaccacaggacagtacaggatgcttgccaaaagaggtggatatgtctgggttgaaactcaagcaactgtcatatataacaccaagaattctcaaccacagtgcattgtatgtgtgaattacgttgtgagtggtattattcagcacgacttgattttctcccttcaacaaacagaatgtgtccttaaaccggttgaatcttcagatatgaaaatgactcagctattcaccaaagttgaatcagaagatacaagtagcctctttgacaaacttaagaaggaacctgatgctttaactttgctggccccagccgctggagacacaatcatatctttagattttggcagcaacgacacagaaactgatgaccagcaacttgaggaagtaccattatataatgatgtaatgctcccctcacccaacgaaaaattacagaatataaatttggcaatgtctccattacccaccgctgaaacgccaaagccacttcgaagtagtgctgaccctgcactcaatcaagaagttgcattaaaattagaaccaaatccagagtcactggaactttcttttaccatgccccagattcaggatcagacacctagtccttccgatggaagcactagacaaagttcacctgagcctaatagtcccagtgaatattgtttttatgtggatagtgatatggtcaatgaattcaagttggaattggtagaaaaactttttgctgaagacacagaagcaaagaacccattttctactcaggacacagatttagacttggagatgttagctccctatatcccaatggatgatgacttccagttacgttccttcgatcagttgtcaccattagaaagcagttccgcaagccctgaaagcgcaagtcctcaaagcacagttacagtattccagcagactcaaatacaagaacctactgctaatgccaccactaccactgccaccactgatgaattaaaaacagtgacaaaagaccgtatggaagacattaaaatattgattgcatctccatctcctacccacatacataaagaaactactagtgccacatcatcaccatatagagatactcaaagtcggacagcctcaccaaacagagcaggaaaaggagtcatagaacagacagaaaaatctcatccaagaagccctaacgtgttatctgtcgctttgagtcaaagaactacagttcctgaggaagaactaaatccaaagatactagctttgcagaatgctcagagaaagcgaaaaatggaacatgatggttcactttttcaagcagtaggaattggaacattattacagcagccagacgatcatgcagctactacatcactttcttggaaacgtgtaaaaggatgcaaatctagtgaacagaatggaatggagcaaaagacaattattttaataccctctgatttagcatgtagactgctggggcaatcaatggatgaaagtggattaccacagctgaccagttatgattgtgaagttaatgctcctatacaaggcagcagaaacctactgcagggtgaagaattactcagagctttggatcaagttaactagtaatgaactagtccgtaacttgaaagtatttcgatttcttggctttatatatcttgtggaaaggacgaaaagactacgtgggttagctttag

SEQ ID NO: 571 - DNA, 2309 bp, Homo sapiens
  source 1..2309: mol_type = genomic DNA
accgccaccatggagggcgccggcggcgcgaacgacaagaaaaagataagttctgaacgtcgaaaagaaaagtctcgagatgcagccagatctcggcgaagtaaagaatctgaagttttttatgagcttgctcatcagttgccacttccacataatgtgagttcgcatcttgataaggcctctgtgatgaggcttaccatcagctatttgcgtgtgaggaaacttctggatgctggtgatttggatattgaagatgacatgaaagcacagatgaattgcttttatttgaaagccttggatggttttgttatggttctcacagatgatggtgacatgatttacatttctgataatgtgaacaaatacatgggattaactcagtttgaactaactggacacagtgtgtttgattttactcatccatgtgaccatgaggaaatgagagaaatgcttacacacagaaatggccttgtgaaaaagggtaaagaacaaaacacacagcgaagcttttttctcagaatgaagtgtaccctaactagccgaggaagaactatgaacataaagtctgcaacatggaaggtattgcactgcacaggccacattcacgtatatgataccaacagtaaccaacctcagtgtgggtataagaaaccacctatgacctgcttggtgctgatttgtgaacccattcctcacccatcaaatattgaaattcctttagatagcaagactttcctcagtcgacacagcctggatatgaaattttcttattgtgatgaaagaattaccgaattgatgggatatgagccagaagaacttttaggccgctcaatttatgaatattatcatgctttggactctgatcatctgaccaaaactcatcatgatatgtttactaaaggacaagtcaccacaggacagtacaggatgcttgccaaaagaggtggatatgtctgggttgaaactcaagcaactgtcatatataacaccaagaattctcaaccacagtgcattgtatgtgtgaattacgttgtgagtggtattattcagcacgacttgattttctcccttcaacaaacagaatgtgtccttaaaccggttgaatcttcagatatgaaaatgactcagctattcaccaaagttgaatcagaagatacaagtagcctctttgacaaacttaagaaggaacctgatgctttaactttgctggccccagccgctggagacacaatcatatctttagattttggcagcaacgacacagaaactgatgaccagcaacttgaggaagtaccattatataatgatgtaatgctcccctcacccaacgaaaaattacagaatataaatttggcaatgtctccattacccaccgctgaaacgccaaagccacttcgaagtagtgctgaccctgcactcaatcaagaagttgcattaaaattagaaccaaatccagagtcactggaactttcttttaccatgccccagattcaggatcagacacctagtccttccgatggaagcactagacaaagttcacctgagcctaatagtcccagtgaatattgtttttatgtggatagtgatatggtcaatgaattcaagttggaattggtagaaaaactttttgctgaagacacagaagcaaagaacccattttctactcaggacacagatttagacttggagatgttagctccctatatcccaatggatgatgacttccagttacgttccttcgatcagttgtcaccattagaaagcagttccgcaagccctgaaagcgcaagtcctcaaagcacagttacagtattccagcagactcaaatacaagaacctactgctaatgccaccactaccactgccaccactgatgaattaaaaacagtgacaaaagaccgtatggaagacattaaaatattgattgcatctccatctcctacccacatacataaagaaactactagtgccacatcatcaccatatagagatactcaaagtcggacagcctcaccaaacagagcaggaaaaggagtcatagaacagacagaaaaatctcatccaagaagccctaacgtgttatctgtcgctttgagtcaaagaactacagttcctgaggaagaactaaatccaaagatactagctttgcagaatgctcagagaaagcgaaaaatggaacatgatggttcactttttcaagcagtaggaattatttagtaatgaactagtccgtaacttgaaagtatttcgatttcttggctttatatatcttgtggaaaggacgagacgtttgcaggtgaccgtgctat

SEQ ID NO: 572 - DNA, 1130 bp, Homo sapiens
  source 1..1130: mol_type = genomic DNA
accgccaccatggccgacaaaatggtgcgcacccccaagtgctcgagatgcaggaaccatggcttcctggtgcccgtcaagggacacgcgggcaaatgccgctggaagcagtgcctctgcgagaagtgctacctgatctccgagcgccagaagatcatggccgcgcagaaggtgctcaagacgcaggccgccgaggaggagcaggaggcggccctgtgtgcgcaggggcccaagcaggcctccggggctgcggccgccgcccccgcccccgtccccgtcccggccgcgagcctccgcccgctgtccccggggactccctccggagacgccgacccgggacccgagggccgcgcggccgcttgcttcttcgagcagcccccgcggggccggaaccccggcccgagagccctccagccggttctgggcggccgcagccacgtggagccgagcgagcgagccgccgtggcgatgcccagccttgcgggacccccttttggggcggaggccgcaggcagtggctaccctggccccctagacctgcgcaggccgatgcggaccgtgcccggcccactgttcaccgactttgtgcgccctctgaacatcaacccggaccgtgcactgggccctgagtaccctggtggctccagcatgcacccctactgcccgttcccgctgggctacctggacgcccctcctggcgtccccctgcagcagggcttccggcatgtgtcccgcagccagtaccaaggcggaggcttggtgtcagaaccaggaggagacttccagccaagctactacctgccgccgccgccgccgccactgccgccccttccaccgcttccaccgcagccccagttcctcccgccaggctacctctctgcgctccacttcctccccccgccaccgccaccaccacctccatcatctttctcactgaccgtcctgtttgatactgacaaggagaacactgatgaccaggatgcagaggtactgtcgggtgagcccagccagccatcgtctcaggagcagtccgactagtaatgaactagtccgtaacttgaaagtatttcgatttcttggctttatatatcttgtggaaaggacgatttggtaggtctcgttagctcctc

SEQ ID NO: 573 - DNA, 1550 bp, Homo sapiens
  source 1..1550: mol_type = genomic DNA
accgccaccatgaccatgtccaaggaggcagtgaccttcaaggatgtggcagtggtcttcactgaggaggagctggggctgctggaccttgcccagaggaagctgtatcgagatgtgatgctggagaacttcaggaacctgctgtcagtggggcatcaaccattccaccgagatactttccactttctaagggaggaaaagttttggatgatggatatagcaacccaaagggaagggaattcaggaggcaagatccaacctgagatgaagacttttccagaagcaggaccacatgaagggtggtcctgccagcagatctgggaagaaattgcaagtgatttaaccaggcctcaagactctaccataaagagctctcagttctttgaacagggtgatgcccactcccaggttgaggaaggactatctataatgcacacaggacagaaaccttccaattgtgggaagtgtaaacaatccttcagtgatatgtccatctttgatcttcctcagcaaatacgctcagcagagaagtctcattcctgtgatgagtgtggaaaaagcttctgttacatctcagcgcttcatattcatcagagagtccacctgggagagaaactctttaagtgtgacgtgtgtggtaaggaattcagtcagagtttacatctgcaaactcatcagagagtccatactggagagaaacctttcaaatgtgaacaatgtgggagaggcttcagatgtagatcagcacttacagttcattgcaaattacacatgggagagaaacattataattgtgaggcatgtgggagggccttcattcatgatttccagcttcagaaacatcagagaattcacacaggggagaagccattcaaatgtgagatatgtagtgtgagcttccgtcttaggtcaagtcttaataggcattgtgtggtccacacaggaaagaaaccaaacagcactggggaatatggaaaaggcttcattcgtaggctggatttgtgtaagcatcagacgatccacacaggagagaaaccatataattgtaaagaatgtgggaagagcttcagacggtcctcctatcttttgatccatcagcgagtccacactggagaaaagccatacaaatgtgacaagtgtgggaagagctacattactaagtcaggtcttgacttgcaccatagagcccacacaggagagagaccttataactgtgatgactgtgggaagagctttagacaggcctcaagtattttgaatcataagagactccattgccgaaaaaaaccattcaaatgtgaggattgtggaaagaagcttgtataccggtcataccgtaaagaccaacaaaaaaaccacagtggagaaaatccatccaaatgtgaagactgtgggaagcgctacaagaggcgcttgaatcttgatataattttatcattatttttaaatgacacgtagtaatgaactagtccgtaacttgaaagtatttcgatttcttggctttatatatcttgtggaaaggacgacctacgacggcctggtcatattag

SEQ ID NO: 574 - DNA, 1352 bp, Homo sapiens
  source 1..1352: mol_type = genomic DNA
accgccaccatggcagccattctcctgaccacgagacccaaggtgccagtatcttttgaggatgtgtccgtgtacttcacaaagacagaatggaagcttctggacctcagacaaaaggtcctctacaagcgggtgatgctggagaactatagccatttggtgtcactgggattttccttctccaagcctcacctgatctcccaattggaacgaggggaaggaccctgggtagcagacatccccagaacctgggccaccgcaggattgcacataggtgacagaacacagagcaagacgtcgacttcaacgcagaagcattctggacgacaactccccggggccgatccacaaggtggcaaggaggggcaggcggcgaggtcgtctgtgctccagagaggtgcccagggcttggggcagagttcggctgcggggccgcagggccccaaaggcgcggagaagcggtacctgtgccagcagtgtgggaaggccttcagccgcagctccaacctcatcaagcaccgcatcatccacagtggcgagaagccttacgcgtgccccgagtgcggcaagctgtttcgccgcagcttcgcgctcctggagcaccagcgcatccacagcggcgagaagccctacgcctgccccgagtgcagcaagaccttcacgcgcagctccaacctcatcaagcaccaggtcatccacagcggcgagcggcccttcgcctgcggcgactgcggcaaactgttccgccgcagcttcgcgctcctggagcacgcgcgcgtgcacagcggcgagcggccctacgcgtgcccagagtgcggcaaggccttcagccgcagctccaacctcatcgagcaccagcgcacgcaccgcggcgagaagccctacgcctgcggccagtgcgccaaggccttcaagggcgtctcgcagctcatccaccaccagcgcagccacagcggcgagcggcccttcgcgtgccgcgagtgcggcaaggccttccgtggccgttcgggcctcagccagcaccggcgcgtgcacagcggtgagaagccctacgagtgcagcgactgcggcaaggccttcggccggcgcgccaacctattcaagcaccaggcagtgcacggcgccaggcgccctgcgaaggcggagacggcgcggaggctagcgggccctgggagcaccggccctgggagcgcggtggcggccaccagccccccgcggccgagcacagccgccaggccttccaggcccagccgccgctagtaatgaactagtccgtaacttgaaagtatttcgatttcttggctttatatatcttgtggaaaggacgacaccagcacgcttgcaagatccga

SEQ ID NO: 575 - DNA, 1694 bp, Homo sapiens
  source 1..1694: mol_type = genomic DNA
accgccaccatggtcaggccccaggatactgtggcgtatgaggacctgtctgaggactatactcagaagaaatggaaaggtctcgcactcagtcagagagccctgcactggaacatgatgctggaaaatgaccgtagcatggcttctttgggtaggaacatgatggagagttcagagctgactccgaagcaggaaatttttaaaggatcagagtcatctaatagcacatcagggggactctttggggtggttcctgggggaacagagactggagatgtttgtgaagataccttcaaagagttagaaggacaaccctcaaatgaagaagggagcagactagaaagtgatttcttggaaataatagatgaggataagaaaaaatccacaaaagacagatatgaggaatataaggaagttgaggaacatccacctctgtcttccagtcctgttgaacatgaaggagttttaaagggacagaaatcctatcgatgtgatgaatgtggcaaagctttttattggagttcgcacctcattggtcatcggagaatccacactggagagaaaccctatgagtgtaatgagtgtgggaagaccttcaggcaaacctcccagctcattgttcatctcagaacccacacaggggaaaagccctatgaatgcagtgagtgtggaaaggcctataggcacagctcccatctcattcaacaccagagactccataatggggagaaaccctataaatgtaatgaatgtgcaaaagcttttaatcagagctccaaactcttcgaccaccagagaacccatactggggagaaaccttatgaatgtaaggagtgtggggcggcctttagtcggagtaaaaatcttgttcgacatcagtttctgcacactggtaagaaaccttataagtgtaatgaatgtgggagagcattctgttccaatagaaatctcattgaccatcagagaacccacactggggagaagccttataaatgtaatgaatgtggcaaagccttcagtcggagtaaatgtcttattcgacatcagagcctccacactggggaaaagccatacaaatgtagtgaatgtgggaaagccttcaatcagatctctcaacttgttgaacatgagcgaattcatactggagaaaaaccatttaagtgtagtgagtgtggtaaggcattcggtctgagtaaatgtcttattcggcaccagaggcttcacacaagtgaaaagccctataaatgcaatgagtgtggaaaatccttcaatcaaaactcatacctcattatacaccagagaattcacactggtgagaaaccctatgaatgtaatgagtgtgggaaggtcttcagttataattctagtcttatggtacatcagagaacccatactggggaaaaaccctataaatgcaatagttgtgggaaagcctttagtgacagctcacagcttactgtgcaccagagagtccacactggagaaaaaccttatgaatgtattgagtgtgggaaagcctttagtcagcgttccacttttaatcaccaccagcgaactcatgctggagagaagccctcaggtctggctcggtcatcttcttagtaatgaactagtccgtaacttgaaagtatttcgatttcttggctttatatatcttgtggaaaggacgagtcttaatgaggtgtgtatactgt

SEQ ID NO: 576 - DNA, 443 bp, Homo sapiens
  source 1..443: mol_type = genomic DNA
accgccaccatggccccgaggcctccgaccgccgcgccccaggaatcagtgacattcaaagatgtgtctgtggacttcacccaggaagaatggtaccatgtcgaccctgctcagaggagcttatacagggatgtgatgctggagaactatagccacctggtttctcttggatatcaagtttccaagccagaggtgatcttcaaattggagcaaggagaagagccatggatatcagagggagaaatccaacgacctttctatccaggatttgtctgcctcctgccgctgtcgctaccatctgggagtaagggcgaaagaagacagaaacttccaagaaagaatcctgagtagtaatgaactagtccgtaacttgaaagtatttcgatttcttggctttatatatcttgtggaaaggacgaaacccaaactcagcgaacattgag

SEQ ID NO: 577 - DNA, 2012 bp, Homo sapiens
  source 1..2012: mol_type = genomic DNA
accgccaccatggccccgaggcctccgaccgccgcgccccaggaatcagtgacattcaaagatgtgtctgtggacttcacccaggaagaatggtaccatgtcgaccctgctcagaggagcttatacagggatgtgatgctggagaactatagccacctggtttctcttggatatcaagtttccaagccagaggtgatcttcaaattggagcaaggagaagagccatggatatcagagggagaaatccaacgacctttctatccagactggaagaccaggcctgaagtcaaatcatcacatttgcagcaggatgtatcagaagtatcccactgcacacatgatctcttacatgctacattagaagactcctgggatgttagcagccagttagacaggcaacaggaaaactggaagagacatctgggatcagaggcatccacccagaagaaaataattacaccacaagaaaattttgagcaaaataaatttggtgaaaattctagattgaacaccaatttggttacacaactgaacattcctgcaagaataaggcctagtgaatgtgagacccttggaagcaatttgggacataatgcagacttacttaatgagaataatattcttgcaaaaaagaaaccctataagtgtgataaatgtagaaaagcctttattcatagatcatcgcttactaaacatgagaaaacacataaaggagagggagctttccctaatggaacagatcaaggaatttatcctggaaagaaacaccatgaatgtaccgactgtgggaaaacctttctctggaagacacagcttactgagcatcagagaattcacactggggagaaaccctttgaatgcaatgtatgtggaaaggccttcaggcatagctcatctcttggtcagcatgagaatgctcataccggagagaaaccctatcagtgtagtctctgtgggaaagccttccagcgcagctcctcccttgttcaacaccagcgaattcacactggagagaaaccctatcgatgtaatctatgtgggaggtcctttaggcatggcacatccctcactcaacacgaggtcacacacagtggagagaagcccttccagtgtaaggaatgtgggaaagcctttagtcgatgttcttcccttgtccaacatgagaggactcatactggagagaaaccttttgaatgtagcatatgtgggagggcttttggtcagagcccatccctttataaacatatgaggattcataagagaggcaaaccttaccaaagcagtaactacagcatagatttcaagcacagcacatctctcactcaagatgaaagcactcttaccgaagtgaaatcctaccattgtaatgactgtggggaagactttagtcacattacagactttactgaccatcagaggatccatactgcagagaacccctatgattgtgagcaggcttttagtcagcaagctatttctcatcctggagagaaaccctatcaatgtaatgtatgtgggaaagctttcaaaaggagtacaagtttcatagagcatcacagaattcatactggagagaaaccctatgaatgtaatgagtgtggagaagcctttagtcgacgctcatcgcttactcaacatgagagaacccacactggagagaaaccctatgaatgtattgactgtgggaaagcctttagtcaaagttcatctctcattcagcatgagagaactcatactggagagaagccctatgaatgtaatgaatgtgggagagccttccgaaaaaaaaccaacctgcatgatcatcagagaattcatactggagaaaaaccctattcttgtaaggaatgtgggaaaaacttcagccgaagttcagctcttactaaacaccagagaattcatactcgaaataaactctagtaatgaactagtccgtaacttgaaagtatttcgatttcttggctttatatatcttgtggaaaggacgagtagcccttacgtgcacaattatg

SEQ ID NO: 578 - DNA, 383 bp, Homo sapiens
  source 1..383: mol_type = genomic DNA
accgccaccatggccccgaggcctccgaccgccgcgccccaggaatcagtgacattcaaagatgtgtctgtggacttcacccaggaagaatggtaccatgtcgaccctgctcagaggagcttatacagggatgtgatgctggagaactatagccacctggtttctcttggatatcaagtttccaagccagaggtgatcttcaaattggagcaaggagaagagccatggatatcagagggagaaatccaacgacctttctatccagcagtgtatttcaacaggaaggaatagtaatgaactagtccgtaacttgaaagtatttcgatttcttggctttatatatcttgtggaaaggacgaagattgaggtcctcagctgcgtct

SEQ ID NO: 579 - DNA, 1814 bp, Homo sapiens
  source 1..1814: mol_type = genomic DNA
accgccaccatgccgggggagacggaagagccgagacccccggagcagcaggaccaggaagggggagaggcggccaaggcggctccggaggagccccaacaacggccccctgaggcggtcgcggcggcgcctgcagggaccactagcagccgcgtgctgaggggaggtcgggaccgaggccgggccgctgcggccgccgccgccgcagctgtgtcccgccggaggaaggccgagtatccccgccggcggaggagcagccccagcgccaggcctcccgacgtccccgggcagcagccccaggccgcgaagtccccgtctccagttcagggcaagaagagtccgcgactcctatgcatagaaaaagtaacaactgataaagatcccaaggaagaaaaagaggaagaagacgattctgccctccctcaggaagtttccattgctgcatctagacctagccggggctggcgtagtagtaggacatctgtttctcgccatcgtgatacagagaacacccgaagctctcggtccaagaccggttcattgcagctcatttgcaagtcagaaccaaatacagaccaacttgattatgatgttggagaagagcatcagtctccaggtggcattagtagtgaagaggaagaggaggaggaagaagagatgttaatcagtgaagaggagataccattcaaagatgatccaagagatgagacctacaaaccccacttagaaagggaaaccccaaagccacggagaaaatcagggaaggtaaaagaagagaaggagaagaaggaaattaaagtggaagtagaggtggaggtgaaagaagaggagaatgaaattagagaggatgaggaacctccaaggaagagaggaagaagacgaaaagatgacaaaagtccacgtttacccaaaaggagaaaaaagcctccaatccagtatgtccgttgtgagatggaaggatgtggaactgtccttgcccatcctcgctatttgcagcaccacattaaataccagcatttgctgaagaagaaatatgtatgtccccatccctcctgtggacgactcttcaggcttcagaagcaacttctgcgacatgccaaacatcatacagatcaaagggattatatctgtgaatattgtgctcgggccttcaagagttcccacaatctggcagtgcaccggatgattcacactggcgagaagccattacaatgtgagatctgtggatttacttgtcgacaaaaggcatctcttaattggcacatgaagaaacatgatgcagactccttctaccagttttcttgcaatatctgtggcaaaaaatttgagaagaaggacagcgtagtggcacacaaggcaaaaagccaccctgaggtgctgattgcagaagctctggctgccaatgcaggcgccctcatcaccagcacagatatcttgggcactaacccagagtccctgacgcagccttcagatggtcagggtcttcctcttcttcctgagcccttgggaaactcaacctctggagagtgcctactgttagaagctgaagggatgtcaaagtcatactgcagtgggacggaacgggtgagcctgatggctgatgggaagatctttgtgggaagcggcagcagtggaggcactgaagggctggttatgaactcagatatactcggtgctaccacagaggttctgattgaagattcagactctgccggaccttagtaatgaactagtccgtaacttgaaagtatttcgatttcttggctttatatatcttgtggaaaggacgaacgtgaggaaatgttggtcccagg

SEQ ID NO: 580 - DNA, 1403 bp, Homo sapiens
  source 1..1403: mol_type = genomic DNA
accgccaccatggctttagatctaagaaccatatttcagtgtgaaccatccgagaataatcttggatcagaaaattcagcgtttcaacaaagccaaggacctgctgttcagagagaagaagggatttctgagttctcaagaatggtgctcaattcatttcaagacagcaataattcatatgcaaggcaggaattgcaaagactttataggatctttcactcatggctgcaaccagaaaagcacagcaaggatgaaattatttctctattagtcctggagcagtttatgattggtggccactgcaatgacaaagccagtgtgaaagagaaatggaaatcaagtggcaaaaacttggagagattcatagaagacctgactgatgacagcataaatccacctgccttagtccacgtccacatgcagggacaggaagctctcttttctgaggatatgcccttaagagatgtcattgttcatctcacaaaacaagtgaatgcccaaaccacaagagaagcaaacatggggacaccctcccagacttcccaagatacttccttagaaacaggacaaggatatgaagatgaacaagatggctggaacagttcttcgaaaactactcgagtaaatgaaaatattactaatcaaggcaatcaaatagtttccctaatcatcatccaggaagagaacggtcctaggcctgaagagggaggtgtttcttctgacaacccatacaactcaaaaagagcagagctagtcactgctagatctcaggaagggtccataaatggaatcactttccaaggtgtccctatggtgatgggagcagggtgtatctctcaaccagagcagtcctcccctgagtctgcccttacccaccagagcaatgagggaaattccacatgtgaggtacatcagaaaggatcccatggagtccaaaaatcatacaaatgtgaagaatgccccaaggtctttaagtatctctgtcacttattagctcaccagagaagacacaggaatgagaggccatttgtttgtcccgagtgtcaaaaaggcttcttccagatatcagacctacgggtgcatcagataattcacacaggaaagaagcctttcacatgcagcatgtgtaaaaagtccttcagccacaaaaccaacctgcggtctcatgagagaatccacacaggagaaaagccttatacatgtcccttttgtaagacaagctaccgccagtcatccacataccaccgccatatgaggactcatgagaaaattaccctgccaagtgttccctccacaccagaagcttcctagtaatgaactagtccgtaacttgaaagtatttcgatttcttggctttatatatcttgtggaaaggacgatgatatgtgtacagatcgattgtc

SEQ ID NO: 581 - DNA, 1328 bp, Homo sapiens
  source 1..1328: mol_type = genomic DNA
accgccaccatgcttccacggcccaaagcccctgcctcccccagacgcccccagaccccaaccccgagtgagcaggacgcagaccctgggccagcaagccccagggacaccgaagcccagcgtctgcgcttccggcagttccagtaccacgtggcgagcgggccgcacctcgcgctgggccagctctggacgctgtgccgccagtggctgaggcccgaggcgcgctccaaggagcagatgctggagctgctggtgctggagcagttcctgggcgcgctgcccagcaagatgcggacctgggtgcagtcacagggcccccgaagctgcagggaggccgccagcctggtggaggacctcacacagatgtgccagcaggaagttctggtatctctggactcggtcgaaccccaggactggagtttcggtgaggaggaagatgggaagagtccaaggtcccagaaagaaccatcgcaggcgtctgagctgattctggatgcagtggcagcagccccagcactccccgaggaaagtgagtggctggagactacccagctccagcagagtctgcacaccagggcggaggccgaagcgccccgcgcccctggcttgctggggtcccgggcccgcttgcctctgaagccgagtatctgggacgagcctgaggaccttctcgcagggccctcctcagacctgcgggcagaagggactgtgatctcgagccccaagggtccaagtgctcagagaatcagtccccgaaggagaaacaggaacactgaccagagcggccgccaccagccatccctcaagcacaccaaaggtggtacccaagaggctgttgcaggcatctcggtagtgccgcgtgggccccgaggtgggcggcccttccagtgtgccgactgtgggatggtcttcacctgggtcacccacttcatcgagcaccagaagacccatcgcgaggaagggccctttccgtgccccgagtgtggcaaggtcttcctgcacaactccgtcctcactgagcatggcaagatccacctgctggagccaccgaggaagaaagccccccggagcaagggcccccgggagtccgtcccacccagggatggagcccagggcccagtggcccctcgcagccccaaaagacccttccagtgtagcgtctgcgggaaggccttcccctggatggtccacctcattgaccaccagaagctccacacggcccacggccacatgtagtaatgaactagtccgtaacttgaaagtatttcgatttcttggctttatatatcttgtggaaaggacgaagagctgcagctggtttgtgtcac

SEQ ID NO: 582 - DNA, 542 bp, Homo sapiens
  source 1..542: mol_type = genomic DNA
accgccaccatgatggctgcagacatcccgagagtgaccactccgctgagctccttggtccaggtgcctcaagaggaagatagacaggaggaggaggtcaccaccatgatcctggaggatgactcctgggtgcaagaagctgtgctgcaggaggatggccctgagtctgagccctttccccagagtgctggcaagggcggcccccaggaggaggtgaccaggggaccacagggtgcactcggccgcctccgagagctctgccggcgctggctgagaccagaggtacacaccaaggagcagatgttaaccatgctgccaaaggaaattcaggcttggctgcaagagcatcggcctgaaagcagtgaggaggcagcggccctggtggaagacttgacccagacccttcaggacagtgaaacagcttcctgcgtacatggctgccctgtgtagtaatgaactagtccgtaacttgaaagtatttcgatttcttggctttatatatcttgtggaaaggacgagtgagatgtatttaacggtggcgg

SEQ ID NO: 583 - DNA, 1946 bp, Homo sapiens
  source 1..1946: mol_type = genomic DNA
accgccaccatgatggctgcagacatcccgagagtgaccactccgctgagctccttggtccaggtgcctcaagaggaagatagacaggaggaggaggtcaccaccatgatcctggaggatgactcctgggtgcaagaagctgtgctgcaggaggatggccctgagtctgagccctttccccagagtgctggcaagggcggcccccaggaggaggtgaccaggggaccacagggtgcactcggccgcctccgagagctctgccggcgctggctgagaccagaggtacacaccaaggagcagatgttaaccatgctgccaaaggaaattcaggcttggctgcaagagcatcggcctgaaagcagtgaggaggcagcggccctggtggaagacttgacccagacccttcaggacagtgattttgagatacagagtgaaaatggggagaactgtaatcaagacatgtttgagaatgaatcacgtaagatattctcggaaatgcctgaaggtgaaagtgctcagcactccgatggggaaagtgactttgagagagatgctggcatccagaggctccagggacacagcccaggtgaggaccacggggaggtggtttctcaggacagggaagttggccagctcataggcctgcagggcacctacctaggggagaagccctacgaatgtccccagtgtgggaagaccttcagccggaaatcccacctcatcacacacgagaggacccacacaggagagaaatactacaaatgtgatgaatgtggaaaaagctttagtgatggttcaaattttagtagacaccaaaccactcacaccggggagaagccctacaaatgcagagactgtgggaagagctttagccggagtgccaacctcataacccaccagaggatccacacgggggaaaagcccttccagtgtgccgagtgtggcaagagcttcagcaggagtcccaacctcattgcacatcagcgcacccacacaggagagaaaccctactcgtgccccgagtgtggaaagagctttggcaaccgatccagccttaacacgcatcaggggatccacactggagaaaagccctacgaatgtaaagaatgcggcgaaagctttagttacaactccaatctaatcagacaccagagaatccacacaggagagaaaccctacaaatgtaccgactgtgggcagaggttcagccagagttcagccctcatcacccaccggagaacccacacaggagagaaaccctaccagtgcagcgagtgtgggaaaagcttcagccgcagctctaacctggccacacaccggagaacccacatggtggagaagccctataagtgtggggtgtgtgggaagagcttcagccagagctccagtctgattgcacaccagggcatgcacacaggggagaaaccctacgagtgcctgacatgtggggagagcttcagctggagctccaacctcctcaagcaccagaggatccacacgggagagaaaccctacaaatgcagcgagtgtgggaaatgcttcagccagcgctcccagctcgtagtgcaccagcggacccacacgggcgagaagccctacaaatgcctcatgtgcggcaagagcttcagccggggctccattctggtcatgcaccagagagcccatttgggagacaagccctacaggtgccctgagtgtgggaaaggctttagctggaactcagtcctcattatacatcagcgaatccacactggggagaagccctacaaatgccccgagtgtggcaaaggcttcagcaacagctctaactttatcacacatcagagaactcacatgaaagagaaactttattagtaatgaactagtccgtaacttgaaagtatttcgatttcttggctttatatatcttgtggaaaggacgactcatgcacggaacagaagtcgaa

SEQ ID NO: 584 - DNA, 554 bp, Homo sapiens
  source 1..554: mol_type = genomic DNA
accgccaccatgatggctgcagacatcccgagagtgaccactccgctgagctccttggtccaggtgcctcaagaggaagatagacaggaggaggaggtcaccaccatgatcctggaggatgactcctgggtgcaagaagctgtgctgcaggaggatggccctgagtctgagccctttccccagagtgctggcaagggcggcccccaggaggaggtgaccaggggaccacagggtgcactcggccgcctccgagagctctgccggcgctggctgagaccagaggtacacaccaaggagcagatgttaaccatgctgccaaaggaaattcaggcttggctgcaagagcatcggcctgaaagcagtgaggaggcagcggccctggtggaagacttgacccagacccttcaggacagtgctgtagctgtcgttgcttcccttccggtggaggtgaccagtttgtagtaatgaactagtccgtaacttgaaagtatttcgatttcttggctttatatatcttgtggaaaggacgactcgcgtatactcatcagtcattc

SEQ ID NO: 585 - DNA, 1532 bp, Homo sapiens
  source 1..1532: mol_type = genomic DNA
accgccaccatgatgaccgccaaggccgtagacaaaatcccagtaactctcagtggttttgtgcaccagctgtctgacaacatctacccggtggaggacctcgccgccacgtcggtgaccatctttcccaatgccgaactgggaggcccctttgaccagatgaacggagtggccggagatggcatgatcaacattgacatgactggagagaagaggtcgttggatctcccatatcccagcagctttgctcccgtctctgcacctagaaaccagaccttcacttacatgggcaagttctccattgaccctcagtaccctggtgccagctgctacccagaaggcataatcaatattgtgagtgcaggcatcttgcaaggggtcacttccccagcttcaaccacagcctcatccagcgtcacctctgcctcccccaacccactggccacaggacccctgggtgtgtgcaccatgtcccagacccagcctgacctggaccacctgtactctccgccaccgcctcctcctccttattctggctgtgcaggagacctctaccaggacccttctgcgttcctgtcagcagccaccacctccacctcttcctctctggcctacccaccacctccttcctatccatcccccaagccagccacggacccaggtctcttcccaatgatcccagactatcctggattctttccatctcagtgccagagagacctacatggtacagctggcccagaccgtaagccctttccctgcccactggacaccctgcgggtgccccctccactcactccactctctacaatccgtaactttaccctggggggccccagtgctggggtgaccggaccaggggccagtggaggcagcgagggaccccggctgcctggtagcagctcagcagcagcagcagccgccgccgccgccgcctataacccacaccacctgccactgcggcccattctgaggcctcgcaagtaccccaacagacccagcaagacgccggtgcacgagaggccctacccgtgcccagcagaaggctgcgaccggcggttctcccgctctgacgagctgacacggcacatccgaatccacactgggcataagcccttccagtgtcggatctgcatgcgcaacttcagccgcagtgaccacctcaccacccatatccgcacccacaccggtgagaagcccttcgcctgtgactactgtggccgaaagtttgcccggagtgatgagaggaagcgccacaccaagatccacctgagacagaaagagcggaaaagcagtgccccctctgcatcggtgccagccccctctacagcctcctgctctgggggcgtgcagcctgggggtaccctgtgcagcagtaacagcagcagtcttggcggagggccgctcgccccttgctcctctcggacccggacaccttagtaatgaactagtccgtaacttgaaagtatttcgatttcttggctttatatatcttgtggaaaggacgatccgttccttcataggacctaggg

SEQ ID NO: 586 - DNA, 1382 bp, Homo sapiens
  source 1..1382: mol_type = genomic DNA
accgccaccatgaacggagtggccggagatggcatgatcaacattgacatgactggagagaagaggtcgttggatctcccatatcccagcagctttgctcccgtctctgcacctagaaaccagaccttcacttacatgggcaagttctccattgaccctcagtaccctggtgccagctgctacccagaaggcataatcaatattgtgagtgcaggcatcttgcaaggggtcacttccccagcttcaaccacagcctcatccagcgtcacctctgcctcccccaacccactggccacaggacccctgggtgtgtgcaccatgtcccagacccagcctgacctggaccacctgtactctccgccaccgcctcctcctccttattctggctgtgcaggagacctctaccaggacccttctgcgttcctgtcagcagccaccacctccacctcttcctctctggcctacccaccacctccttcctatccatcccccaagccagccacggacccaggtctcttcccaatgatcccagactatcctggattctttccatctcagtgccagagagacctacatggtacagctggcccagaccgtaagccctttccctgcccactggacaccctgcgggtgccccctccactcactccactctctacaatccgtaactttaccctggggggccccagtgctggggtgaccggaccaggggccagtggaggcagcgagggaccccggctgcctggtagcagctcagcagcagcagcagccgccgccgccgccgcctataacccacaccacctgccactgcggcccattctgaggcctcgcaagtaccccaacagacccagcaagacgccggtgcacgagaggccctacccgtgcccagcagaaggctgcgaccggcggttctcccgctctgacgagctgacacggcacatccgaatccacactgggcataagcccttccagtgtcggatctgcatgcgcaacttcagccgcagtgaccacctcaccacccatatccgcacccacaccggtgagaagcccttcgcctgtgactactgtggccgaaagtttgcccggagtgatgagaggaagcgccacaccaagatccacctgagacagaaagagcggaaaagcagtgccccctctgcatcggtgccagccccctctacagcctcctgctctgggggcgtgcagcctgggggtaccctgtgcagcagtaacagcagcagtcttggcggagggccgctcgccccttgctcctctcggacccggacaccttagtaatgaactagtccgtaacttgaaagtatttcgatttcttggctttatatatcttgtggaaaggacgatagtaggagtgatctggcggctct

SEQ ID NO: 587 - DNA, 1265 bp, Homo sapiens
  source 1..1265: mol_type = genomic DNA
accgccaccatgaccggcaaactcgccgagaagctgccggtgaccatgagcagtttgctaaaccaactgcctgacaatctgtaccccgaggagatccccagcgcgctcaacctcttctccggcagcagcgactcggtagtccattacaatcagatggctacagagaatgtaatggacatcggtctgaccaacgagaagcccaacccggaactctcttactccggctccttccagccagcccccggcaacaagaccgtgacctacttgggaaagttcgccttcgactccccttccaactggtgccaggacaacatcattagcctcatgagcgccggcatcttgggggtgcccccggcttcaggggcgctcagcacgcagacgtccacggccagcatggtgcagccaccgcagggtgacgtggaggccatgtatcccgcgctacccccctactccaactgcggcgacctctactcagagcccgtgtctttccacgacccccagggcaatcccgggctcgcctattccccccaggattaccaatcggccaagccggcgttggacagcaatctcttccccatgattcctgactacaacctctaccaccaccccaacgacatgggctccattccggagcacaagcccttccagggcatggaccccatccgggtcaacccgccccctattacccctctggagaccatcaaggcattcaaagacaagcagatccacccgggctttggcagcctgccccagccgccgctcaccctcaagcccatccggccccgcaagtaccccaaccggcctagcaagacaccgctccacgaacggccccacgcgtgcccggccgagggctgcgaccgccgtttcagccgttcggacgagctgacccggcacctgcgcatccacacgggccacaagcccttccagtgccggatctgcatgcggagcttcagccgcagcgaccacctcaccactcacatccgcactcatacgggcgagaagccctttgcctgcgagttctgcgggcgcaagtttgcgcgcagcgacgagcgcaagcgccacgccaagatccacctcaagcaaaaggagaagaaggcggagaagggcggtgcaccctctgcatcctcggcgccccccgtgtcgctggcccccgtggtcaccacctgcgcctagtaatgaactagtccgtaacttgaaagtatttcgatttcttggctttatatatcttgtggaaaggacgaaattcgtgtatccattccatatta

SEQ ID NO: 588 - DNA, 1151 bp, Homo sapiens
  source 1..1151: mol_type = genomic DNA
accgccaccatggagccatgtgcggcgtggagtccccgcggtgggagagagaatgtaatggacatcggtctgaccaacgagaagcccaacccggaactctcttactccggctccttccagccagcccccggcaacaagaccgtgacctacttgggaaagttcgccttcgactccccttccaactggtgccaggacaacatcattagcctcatgagcgccggcatcttgggggtgcccccggcttcaggggcgctcagcacgcagacgtccacggccagcatggtgcagccaccgcagggtgacgtggaggccatgtatcccgcgctacccccctactccaactgcggcgacctctactcagagcccgtgtctttccacgacccccagggcaatcccgggctcgcctattccccccaggattaccaatcggccaagccggcgttggacagcaatctcttccccatgattcctgactacaacctctaccaccaccccaacgacatgggctccattccggagcacaagcccttccagggcatggaccccatccgggtcaacccgccccctattacccctctggagaccatcaaggcattcaaagacaagcagatccacccgggctttggcagcctgccccagccgccgctcaccctcaagcccatccggccccgcaagtaccccaaccggcctagcaagacaccgctccacgaacggccccacgcgtgcccggccgagggctgcgaccgccgtttcagccgttcggacgagctgacccggcacctgcgcatccacacgggccacaagcccttccagtgccggatctgcatgcggagcttcagccgcagcgaccacctcaccactcacatccgcactcatacgggcgagaagccctttgcctgcgagttctgcgggcgcaagtttgcgcgcagcgacgagcgcaagcgccacgccaagatccacctcaagcaaaaggagaagaaggcggagaagggcggtgcaccctctgcatcctcggcgccccccgtgtcgctggcccccgtggtcaccacctgcgcctagtaatgaactagtccgtaacttgaaagtatttcgatttcttggctttatatatcttgtggaaaggacgagcaaacatgtgtaggtgtagtgag

SEQ ID NO: 589 - DNA, 2117 bp, Homo sapiens
  source 1..2117: mol_type = genomic DNA
accgccaccatgcctgacggcacccctccaccccaggaggcagaagagccgtctctacttaagaagctcttactggcaccagccaacactcagctaagttataatgaatgcagtggtctcagtacccagaaccatgcaaatcacaatcacaggatcagaacaaaccctgcaattgttaagactgagaattcatggagcaataaagcgaagagtatttgtcaacagcaaaagccacaaagacgtccctgctcggagcttctcaaatatctgaccacaaacgatgaccctcctcacaccaaacccacagagaacagaaacagcagcagagacaaatgcacctccaaaaagaagtcccacacacagtcgcagtcacaacacttacaagccaaaccaacaactttatctcttcctctgaccccagagtcaccaaatgaccccaagggttccccatttgagaacaagactattgaacgcaccttaagtgtggaactctctggaactgcaggcctaactccacccaccactcctcctcataaagccaaccaagataacccttttagggcttctccaaagctgaagtcctcttgcaagactgtggtgccaccaccatcaaagaagcccaggtacagtgagtcttctggtacacaaggcaataactccaccaagaaagggccggagcaatccgagttgtatgcacaactcagcaagtcctcagtcctcactggtggacacgaggaaaggaagaccaagcggcccagtctgcggctgtttggtgaccatgactattgccagtcaattaattccaaaacagaaatactcattaatatatcacaggagctccaagactctagacaactagaaaataaagatgtctcctctgattggcaggggcagatttgttcttccacagattcagaccagtgctacctgagagagactttggaggcaagcaagcaggtctctccttgcagcacaagaaaacagctccaagaccaggaaatccgagccgagctgaacaagcacttcggtcatcccagtcaagctgtttttgacgacgaagcagacaagaccggtgaactgagggacagtgatttcagtaatgaacaattctccaaactacctatgtttataaattcaggactagccatggatggcctgtttgatgacagcgaagatgaaagtgataaactgagctacccttgggatggcacgcaatcctattcattgttcaatgtgtctccttcttgttcttcttttaactctccatgtagagattctgtgtcaccacccaaatccttattttctcaaagaccccaaaggatgcgctctcgttcaaggtccttttctcgacacaggtcgtgttcccgatcaccatattccaggtcaagatcaaggtctccaggcagtagatcctcttcaagatcctgctattactatgagtcaagccactacagacaccgcacgcaccgaaattctcccttgtatgtgagatcacgttcaagatcgccctacagccgtcggcccaggtatgacagctacgaggaatatcagcacgagaggctgaagagggaagaatatcgcagagagtatgagaagcgagagtctgagagggccaagcaaagggagaggcagaggcagaaggcaattgaagagcgccgtgtgatttatgtcggtaaaatcagacctgacacaacacggacagaactgagggaccgttttgaagtttttggtgaaattgaggagtgcacagtaaatctgcgggatgatggagacagctatggtttcattacctaccgttatacctgtgatgcttttgctgctcttgaaaatggatacactttgcgcaggtcaaacgaaactgactttgagctgtacttttgtggacgcaagcaatttttcaagtctaactatgcagacctagattcaaactcagatgactttgaccctgcttccaccaagagcaagtatgactctctggattttgatagtttactgaaagaagctcagagaagcttgcgcaggtagtaatgaactagtccgtaacttgaaagtatttcgatttcttggctttatatatcttgtggaaaggacgaggacgtttcaattagtacgttgag

SEQ ID NO: 590 - DNA, 2498 bp, Homo sapiens
  source 1..2498: mol_type = genomic DNA
accgccaccatggcgtgggacatgtgcaaccaggactctgagtctgtatggagtgacatcgagtgtgctgctctggttggtgaagaccagcctctttgcccagatcttcctgaacttgatctttctgaactagatgtgaacgacttggatacagacagctttctgggtggactcaagtggtgcagtgaccaatcagaaataatatccaatcagtacaacaatgagccttcaaacatatttgagaagatagatgaagagaatgaggcaaacttgctagcagtcctcacagagacactagacagtctccctgtggatgaagacggattgccctcatttgatgcgctgacagatggagacgtgaccactgacaatgaggctagtccttcctccatgcctgacggcacccctccaccccaggaggcagaagagccgtctctacttaagaagctcttactggcaccagccaacactcagctaagttataatgaatgcagtggtctcagtacccagaaccatgcaaatcacaatcacaggatcagaacaaaccctgcaattgttaagactgagaattcatggagcaataaagcgaagagtatttgtcaacagcaaaagccacaaagacgtccctgctcggagcttctcaaatatctgaccacaaacgatgaccctcctcacaccaaacccacagagaacagaaacagcagcagagacaaatgcacctccaaaaagaagtcccacacacagtcgcagtcacaacacttacaagccaaaccaacaactttatctcttcctctgaccccagagtcaccaaatgaccccaagggttccccatttgagaacaagactattgaacgcaccttaagtgtggaactctctggaactgcaggcctaactccacccaccactcctcctcataaagccaaccaagataacccttttagggcttctccaaagctgaagtcctcttgcaagactgtggtgccaccaccatcaaagaagcccaggtacagtgagtcttctggtacacaaggcaataactccaccaagaaagggccggagcaatccgagttgtatgcacaactcagcaagtcctcagtcctcactggtggacacgaggaaaggaagaccaagcggcccagtctgcggctgtttggtgaccatgactattgccagtcaattaattccaaaacagaaatactcattaatatatcacaggagctccaagactctagacaactagaaaataaagatgtctcctctgattggcaggggcagatttgttcttccacagattcagaccagtgctacctgagagagactttggaggcaagcaagcaggtctctccttgcagcacaagaaaacagctccaagaccaggaaatccgagccgagctgaacaagcacttcggtcatcccagtcaagctgtttttgacgacgaagcagacaagaccggtgaactgagggacagtgatttcagtaatgaacaattctccaaactacctatgtttataaattcaggactagccatggatggcctgtttgatgacagcgaagatgaaagtgataaactgagctacccttgggatggcacgcaatcctattcattgttcaatgtgtctccttcttgttcttcttttaactctccatgtagagattctgtgtcaccacccaaatccttattttctcaaagaccccaaaggatgcgctctcgttcaaggtccttttctcgacacaggtcgtgttcccgatcaccatattccaggtcaagatcaaggtctccaggcagtagatcctcttcaagatcctgctattactatgagtcaagccactacagacaccgcacgcaccgaaattctcccttgtatgtgagatcacgttcaagatcgccctacagccgtcggcccaggtatgacagctacgaggaatatcagcacgagaggctgaagagggaagaatatcgcagagagtatgagaagcgagagtctgagagggccaagcaaagggagaggcagaggcagaaggcaattgaagagcgccgtgtgatttatgtcggtaaaatcagacctgacacaacacggacagaactgagggaccgttttgaagtttttggtgaaattgaggagtgcacagtaaatctgcgggatgatggagacagctatggtttcattacctaccgttatacctgtgatgcttttgctgctcttgaaaatggatacactttgcgcaggtcaaacgaaactgactttgagctgtacttttgtggacgcaagcaatttttcaagtctaactatgcagacctagattcaaactcagatgactttgaccctgcttccaccaagagcaagtatgactctctggattttgatagtttactgaaagaagctcagagaagcttgcgcaggtagtaatgaactagtccgtaacttgaaagtatttcgatttcttggctttatatatcttgtggaaaggacgattcccggagtgtgaggcgcattgg

SEQ ID NO: 591 - DNA, 1871 bp, Homo sapiens
  source 1..1871: mol_type = genomic DNA
accgccaccatggcagtggcccggggagtcggaagcccggagccagcgccgccgcagctatataagtgggggggctgtgggctgggggagcccggcagcgctttggagaggcgaggagccgccgcccgaggccggtgcgggcgagcgagggcgccgcggctccccgactcctttcccagaggtgagtgcccgaagccaggagcccgggcgcctaggtctgtgcgctgcggggaacccctaccgccagcctccccgccacccgcgcgcccccaagcccagcgggcgaggccccgggcgccccacagccggcgccgcgccatgctccaccttagcgagttttccgaacccgacgcgctcctcgtcaagtccactgaaggctgttgcgccgaacccagcgctgaattgccccggctgcctgccagggacgctcccgcggccaccggctaccctggagcaggcgacttcttgagctgggctttgaacagctgcggcgcaagtggggacttagccgactcctgcttcctggaggggcctgcgcccacaccccctcccggcctcagctacagcggtagcttcttcattcaggcagtgcccgaacacccgcacgacccggaggcactcttcaacctcatgtcgggcatcttaggcctggcacccttccccggtccagaggcagcagcgtccagatccccgctggatgccccttttcctgcggggtccgatgccttgctgccgggtccgccggacctttactccccggatctgggcgctgcccctttcccagaggcgttctgggaggcctcgccttgcgcgggtgccccctcgcagtgcctgtatgagcctcagctctccccgcccgacgtcaagcccggcctccgggcgcctcccgcctcgccagcgctggacgctgtctctgccttcaagggtccctacgcgccctgggagctgctttctgtgggggccccagggaactgtgggtcacagggagactaccaggccgccccggaggctcgttttcccgtaatagggaccaagattgaggacttgctgtccatcagctgccctgcggaactgccggccgtcccagccaacagactctatcccagcggggcctatgacgctttcccgctggccccgggtgacttaggggagggggctgagggcctccctgggctcctgacccctcctagtggggagggagggagtagcggcgacggcggagagtttctggccagtacgcagcctcagctttccccgctgggccttcgcagcgccgccgcggcggacttccctaaacctctggtggcggacatccctggaagcagtggcgtggctgcaccacccgtgccgccgccgccgcccacccctttcccccaggccaaggcgcgacgcaaggggcgccgcggcggcaaatgcagcacgcgctgcttctgcccgcggccgcacgccaaggccttcgcttgcccggtggagagttgtgtgcggagctttgcgcgctccgacgagctcaatcgccacctgcgcatccacacgggccacaaacccttccagtgccgcatctgcctccgcaacttcagccgcagcgaccacctcaccacgcacgtgcgcacccacaccggcgagaagccttttgcttgcgacgtgtgcggccgccgcttcgcgcgcagcgatgagaagaaacggcacagcaaggtgcacctcaagcagaaggcgcgcgccgaggagcggctcaagggcctcggcttttactcgctgggcctctccttcgcttctctctagtaatgaactagtccgtaacttgaaagtatttcgatttcttggctttatatatcttgtggaaaggacgaggacacgcatgaatccatggacaa

SEQ ID NO: 592 - DNA, 641 bp, Homo sapiens
  source 1..641: mol_type = genomic DNA
accgccaccctgcctcgtgttgtctgttggcacactctcaagagtttgaacggatacaagaatctttcatctggtgccgaaacccgggaggggctccggtcttcgtcccccgtggacctacccctccgccccagaaagcaggccacagcagccggacaaaggaagctcctcagcctccagttgcttctctgtgcatgcacatcagtcactgatctcacctactggggccctgcaggccatggggccacagctccacacagaagcctcctagcaatccacctccacctggtgcctgcttcaagtgcggcaatgaaggccactggcccacacaatgcccaaacccaggtaaacccacgaggccatgccccctctgcggaggaccccactggaagttggactgtgagcggcccctgcaaggaccacccccatcccttcctgagccaatcaaaccctcctactcggatctcgtcagccttgccgctgaagactgatagtgccttggaacagacaccccagcaactaccatcgcttcatctgagccaagggtagtaatgaactagtccgtaacttgaaagtatttcgatttcttggctttatatatcttgtggaaaggacgattgaaacactacatgcgtgattgg

SEQ ID NO: 593 - DNA, 557 bp, Homo sapiens
  source 1..557: mol_type = genomic DNA
accgccaccatggccgaggacctctctgcggccacgtcctacaccgaagatgatttctactgccccgtctgtcaggaggtgctcaaaacgcccgtgcggaccacggcctgtcagcacgtcaataggagtgaaacatccacatctgataacacagaaacttaccaagagaatacaagttcttctggtcatcctacttttaagtgtcccctgtgtcaagaatcaaattttaccagacagcgtttactggatcactgtaacagtaatcacctatttcagatagttcctgtgacatgtcctatttgtgtgtctcttccttggggagatcctagccagattaccagaaatttcgttagtcatctaaatcagagacatcaatttgattatggagaatttgtgaatcttcagctagatgaagaaacccaataccaaactgctgttgaagaatcttttcaagtaaacatctagtaatgaactagtccgtaacttgaaagtatttcgatttcttggctttatatatcttgtggaaaggacgatccgaacctgtagaaccgaaggtt

SEQ ID NO: 594 - DNA, 1661 bp, Homo sapiens
  source 1..1661: mol_type = genomic DNA
accgccaccatggctcgtgatttggtgatgttcagagatgtggctgtagacttttctcaggaagaatgggaatgcctgaactcatatcagaggaatttgtacagagatgtgatattagagaactatagcaacttggtgtcactggcaggatgttctatttctaagccagatgtgatcaccctattggaacaagggaaagagccctggatggttgtgagggatgagaaaagaagatggactctagatttggaatccagatatgacactaaaaagttatttcaaggaaaggatatttatgaaatgaacttatctcagtggaaggtaatggaaagaattaaaagctgtggacttgaagaacaagaaagtcctcatgaggtgtgtttcaggcaagtgacaaaaaccacctctgaaaaaatgcctacttacagaaaactcacatctcttcctctgtatcagaaaagtcataacagagagaaaccctacgaatgtggggaatgtgggaaggcttttagagtacgacaacaacttactttccatcaaagaattcatactggtgagaaaccctatgaatgtaaagaatgtggaaaagcctttagacagtgtgcccacctcagtcgacatcagagaattcatacttctgacaaactctatgaatgtaaaaaatgtggaaagatcttcacatgtggctcagaccttcgagtacatcagagaattcatattggtgagaagccgtatgaatgtaaagaatgtgggaaagcctttagagttagaggacaacttaatctccatcaaaggattcacacgggtgagaaaccctatgaatgtaaagaatgtgggaaggcctttaggcagtatgcacaccttactcgacatcagagactgaacattgctgagaagtgctatgagtgtaaggaatgtggtcaggcctttctgtgtagtacaggccttcgactacatcacaaacttcatactggagaaaaaccctatgaatgtaaggagtgtggaaaggcctttagagtgcggcagcaacttactctccatcagagaattcacactggtgagaagccttatgattgtaaggaatgtgggaagactttcagtcgtggctatcatctaactctccatcagagaatacatactggtgaaaagccctatgaatgtaaggaatgtcagaagttctttcgtcgttactcagaacttatttcacatcagggtattcacattggagagaaaccttatgaatgtaaggaatgtgggaaggcatttaggctgttctcacagcttactcaacatcagagtattcattttggtgagaaaccctttaagtgtaaggaatgtgagaagacttttagactgctttcacaacttacccaacatcaaagtattcatactggtgaaaagccctatgactgtaaggaatgtggaaaggcctttagacttcattcatcactgattcaacatcagagaattcattctggtgagaaaccatacaaatgtaaggaatgtaaaaaggcatttagacaacattcacatcttacttaccatcagcgaattcataatgtaacttagtaatgaactagtccgtaacttgaaagtatttcgatttcttggctttatatatcttgtggaaaggacgaacaaacgctttggaggattcagac

SEQ ID NO: 595 - DNA, 818 bp, Homo sapiens
  source 1..818: mol_type = genomic DNA
accgccaccatggagaacttccaaaaggtggaaaagatcggagagggcacgtacggagttgtgtacaaagccagaaacaagttgacgggagaggtggtggcgcttaagaaaatccgcctggacacgctgctggatgtcattcacacagaaaataaactctacctggtttttgaatttctgcaccaagatctcaagaaattcatggatgcctctgctctcactggcattcctcttcccctcatcaagagctatctgttccagctgctccagggcctagctttctgccattctcatcgggtcctccaccgagaccttaaacctcagaatctgcttattaacacagagggggccatcaagctagcagactttggactagccagagcttttggagtccctgttcgtacttacacccatgaggtgactcgccgggccctattccctggagattctgagattgaccagctcttccggatctttcggactctggggaccccagatgaggtggtgtggccaggagttacttctatgcctgattacaagccaagtttccccaagtgggcccggcaagattttagtaaagttgtacctcccctggatgaagatggacggagcttgttatcgcaaatgctgcactacgaccctaacaagcggatttcggccaaggcagccctggctcaccctttcttccaggatgtgaccaagccagtaccccatcttcgactctagtaatgaactagtccgtaacttgaaagtatttcgatttcttggctttatatatcttgtggaaaggacgattactctggtggtgaaagacgcat

SEQ ID NO: 596 - DNA, 896 bp, Homo sapiens
  source 1..896: mol_type = genomic DNA
accgccaccatggagaacttccaaaaggtggaaaagatcggagagggcacgtacggagttgtgtacaaagccagaaacaagttgacgggagaggtggtggcgcttaagaaaatccgcctggacactgagactgagggtgtgcccagtactgccatccgagagatctctctgcttaaggagcttaaccatcctaatattgtcaagctgctggatgtcattcacacagaaaataaactctacctggtttttgaatttctgcaccaagatctcaagaaattcatggatgcctctgctctcactggcattcctcttcccctcatcaagagctatctgttccagctgctccagggcctagctttctgccattctcatcgggtcctccaccgagaccttaaacctcagaatctgcttattaacacagagggggccatcaagctagcagactttggactagccagagcttttggagtccctgttcgtacttacacccatgaggtgactcgccgggccctattccctggagattctgagattgaccagctcttccggatctttcggactctggggaccccagatgaggtggtgtggccaggagttacttctatgcctgattacaagccaagtttccccaagtgggcccggcaagattttagtaaagttgtacctcccctggatgaagatggacggagcttgttatcgcaaatgctgcactacgaccctaacaagcggatttcggccaaggcagccctggctcaccctttcttccaggatgtgaccaagccagtaccccatcttcgactctagtaatgaactagtccgtaacttgaaagtatttcgatttcttggctttatatatcttgtggaaaggacgataacgggctcattcaaatctgatc

SEQ ID NO: 597 - DNA, 1142 bp, Homo sapiens
  source 1..1142: mol_type = genomic DNA
accgccaccatggagaacttccaaaaggtggaaaagatcggagagggcacgtacggagttgtgtacaaagccagaaacaagttgacgggagaggtggtggcgcttaagaaaatccgcctggacactgagactgagggtgtgcccagtactgccatccgagagatctctctgcttaaggagcttaaccatcctaatattgtcaagctgctggatgtcattcacacagaaaataaactctacctggtttttgaatttctgcaccaagatctcaagaaattcatggatgcctctgctctcactggcattcctcttcccctcatcaagagctatctgttccagctgctccagggcctagctttctgccattctcatcgggtcctccaccgagaccttaaacctcagaatctgcttattaacacagagggggccatcaagctagcagactttggactagccagagcttttggagtccctgttcgtacttacacccatgaggtggtgaccctgtggtaccgagctcctgaaatcctcctgggctgcaaatattattccacagctgtggacatctggagcctgggctgcatctttgctgagatgcacctagtgggtacccagcaccatgctaggtgctgtggggaacacagaagaaatggaagacagagtctctgcccgctgtgctcgtatctagaagtggctgcatcacaaggttgggggatgaccgcagtgtctaccccctaccccgtgactcgccgggccctattccctggagattctgagattgaccagctcttccggatctttcggactctggggaccccagatgaggtggtgtggccaggagttacttctatgcctgattacaagccaagtttccccaagtgggcccggcaagattttagtaaagttgtacctcccctggatgaagatggacggagcttgttatcgcaaatgctgcactacgaccctaacaagcggatttcggccaaggcagccctggctcaccctttcttccaggatgtgaccaagccagtaccccatcttcgactctagtaatgaactagtccgtaacttgaaagtatttcgatttcttggctttatatatcttgtggaaaggacgagatacttgctcgaacatctctatc

SEQ ID NO: 598 - DNA, 3197 bp, Homo sapiens
  source 1..3197: mol_type = genomic DNA
accgccaccatgatggctgctgcgttgctccattatacaggctacgcccaggaggaacagctgaaagaagaggaggaaataaaagaagaggaggaggaggaggacagcggttcagtagctcaactgcagggtggcaatgacacagggacggacgaggagctagaaacgggcccagagcaaaaaggctgcttcagctaccagaactctccaggaagtcatttgtccaatcaggatgccgagaacgagtctctgctgagtgacgccagtgatcaggtgtcggacatcaagagtgtctgcggcagagatgcctcagacaagaaagcacacactcacgtcaggcttccaaacgaagcacacaattgcatggataaaatgaccgctgtctacgccaacatcctgtcggattcctactggtcaggcctgggccttggcttcaagctgtccaatagtgagaggaggaactgtgacacccgaaacggcagcaacaagagtgattttgattggcaccaagacgctctgtccaaaagcctgcagcagaacttgccttctcggtccgtctcgaaacccagcctgttcagctcggtgcagttgtaccgacagagcagcaagatgtgcgggactgtgttcacaggggccagcagattccgatgccgacagtgcagcgcggcctatgacaccctagtcgagctgactgtgcacatgaatgaaacgggccactatcaagatgacaaccgcaaaaaggacaagctcagacccacgagctattcaaagcccaggaaaagggctttccaggatatggacaaagaggatgctcaaaaggttctgaaatgtatgttttgtggcgactcctttgattccctccaagatttgagcgtccacatgattaaaacaaaacattaccaaaaagtgcctttgaaggagccagtcccaaccatttcctcgaaaatggtcaccccggctaagaaacgcgtttttgatgtcaatcggccgtgttcccccgattcaaccacaggatcttttgcagattctttttcttctcagaagaacgccaacttgcagttgtcctccaacaaccgctatggctaccaaaatggagccagctacacctggcagtttgaggcctgcaagtcccagatcttaaagtgcatggagtgtgggagctcccatgacaccttgcagcagctcaccacccacatgatggtcacaggtcactttctcaaggtcaccagctctgcctccaagaaagggaagcagctggtattagacccgttagcagtggagaaaatgcagtcgttgtctgaggccccaaacagtgattctctggctcccaagccatccagtaactcagcatcagattgtacagcctctacaactgagttaaagaaagagagtaaaaaagaaaggccagaggaaaccagcaaggatgagaaagtcgtgaaaagcgaggactatgaagatcctctacaaaaacctttagaccctacaatcaaatatcaatacctaagggaggaagacttggaagatggctcaaagggtggaggggacattttgaaatctttggaaaatactgtcaccacagccatcaacaaagcccaaaacggggcccccagctggagtgcctaccccagcatccacgcagcctaccagctgtctgagggcaccaagccgcctttgcctatgggatcccaggtactgcagatccggcctaatctcaccaacaagctgaggcccattgcaccaaagtggaaagtgatgccactggtttctatgcccacacacctggccccttacactcaagtcaagaaagagtcagaagacaaagatgaagcggtgaaggagtgtgggaaagaaagtccccacgaagaggcctcatctttcagccacagtgagggcgattctttccgcaaaagtgaaacacctccagaagccaaaaagaccgagctgggtcccctgaaggaggaggagaagctgatgaaagagggcagcgagaaggagaaaccccagcccctggagcccacatctgctctgagcaatgggtgcgccctcgccaaccacgccccggccctgccatgcatcaacccactcagcgccctgcagtccgtcctgaacaatcacttgggcaaagccacggagcccttgcgctcaccttcctgctccagcccaagttcaagcacaatttccatgttccacaagtcgaatctcaatgtcatggacaagccggtcttgagtcctgcctccacaaggtcagccagcgtgtccaggcgctacctgtttgagaacagcgatcagcccattgacctgaccaagtccaaaagcaagaaagccgagtcctcgcaagcacaatcttgtatgtccccacctcagaagcacgctctgtctgacatcgccgacatggtcaaagtcctccccaaagccaccaccccaaagccagcctcctcctccagggtcccccccatgaagctggaaatggatgtcaggcgctttgaggatgtctccagtgaagtctcaactttgcataaaagaaaaggccggcagtccaactggaatcctcagcatcttctgattctacaagcccagtttgcctcgagcctcttccagacatcagagggcaaatacctgctgtctgatctgggcccacaagagcgtatgcaaatctctaagtttacgggactctcaatgaccactatcagtcactggctggccaacgtcaagtaccagcttaggaaaacgggcgggacaaaatttctgaaaaacatggacaaaggccaccccatcttttattgcagtgactgtgcctcccagttcagaaccccttctacctacatcagtcacttagaatctcacctgggtttccaaatgaaggacatgacccgcttgtcagtggaccagcaaagcaaggtggagcaagagatctcccgggtatcgtcggctcagaggtctccagaaacaatagctgccgaagaggacacagactctaaattcaagtgtaagttgtgctgtcggacatttgtgagcaaacatgcggtaaaactccacctaagcaaaacgcacagcaagtcacccgaacaccattcacagtttgtaacagacgtggatgaagaatagtaatgaactagtccgtaacttgaaagtatttcgatttcttggctttatatatcttgtggaaaggacgacaatttccaacagtcgtcctgcga

SEQ ID NO: 599 - DNA, 3206 bp, Homo sapiens
  source 1..3206: mol_type = genomic DNA
accgccaccatgccgaggagaaaacagcaggcacccaagcgggcggcaggctacgcccaggaggaacagctgaaagaagaggaggaaataaaagaagaggaggaggaggaggacagcggttcagtagctcaactgcagggtggcaatgacacagggacggacgaggagctagaaacgggcccagagcaaaaaggctgcttcagctaccagaactctccaggaagtcatttgtccaatcaggatgccgagaacgagtctctgctgagtgacgccagtgatcaggtgtcggacatcaagagtgtctgcggcagagatgcctcagacaagaaagcacacactcacgtcaggcttccaaacgaagcacacaattgcatggataaaatgaccgctgtctacgccaacatcctgtcggattcctactggtcaggcctgggccttggcttcaagctgtccaatagtgagaggaggaactgtgacacccgaaacggcagcaacaagagtgattttgattggcaccaagacgctctgtccaaaagcctgcagcagaacttgccttctcggtccgtctcgaaacccagcctgttcagctcggtgcagttgtaccgacagagcagcaagatgtgcgggactgtgttcacaggggccagcagattccgatgccgacagtgcagcgcggcctatgacaccctagtcgagctgactgtgcacatgaatgaaacgggccactatcaagatgacaaccgcaaaaaggacaagctcagacccacgagctattcaaagcccaggaaaagggctttccaggatatggacaaagaggatgctcaaaaggttctgaaatgtatgttttgtggcgactcctttgattccctccaagatttgagcgtccacatgattaaaacaaaacattaccaaaaagtgcctttgaaggagccagtcccaaccatttcctcgaaaatggtcaccccggctaagaaacgcgtttttgatgtcaatcggccgtgttcccccgattcaaccacaggatcttttgcagattctttttcttctcagaagaacgccaacttgcagttgtcctccaacaaccgctatggctaccaaaatggagccagctacacctggcagtttgaggcctgcaagtcccagatcttaaagtgcatggagtgtgggagctcccatgacaccttgcagcagctcaccacccacatgatggtcacaggtcactttctcaaggtcaccagctctgcctccaagaaagggaagcagctggtattagacccgttagcagtggagaaaatgcagtcgttgtctgaggccccaaacagtgattctctggctcccaagccatccagtaactcagcatcagattgtacagcctctacaactgagttaaagaaagagagtaaaaaagaaaggccagaggaaaccagcaaggatgagaaagtcgtgaaaagcgaggactatgaagatcctctacaaaaacctttagaccctacaatcaaatatcaatacctaagggaggaagacttggaagatggctcaaagggtggaggggacattttgaaatctttggaaaatactgtcaccacagccatcaacaaagcccaaaacggggcccccagctggagtgcctaccccagcatccacgcagcctaccagctgtctgagggcaccaagccgcctttgcctatgggatcccaggtactgcagatccggcctaatctcaccaacaagctgaggcccattgcaccaaagtggaaagtgatgccactggtttctatgcccacacacctggccccttacactcaagtcaagaaagagtcagaagacaaagatgaagcggtgaaggagtgtgggaaagaaagtccccacgaagaggcctcatctttcagccacagtgagggcgattctttccgcaaaagtgaaacacctccagaagccaaaaagaccgagctgggtcccctgaaggaggaggagaagctgatgaaagagggcagcgagaaggagaaaccccagcccctggagcccacatctgctctgagcaatgggtgcgccctcgccaaccacgccccggccctgccatgcatcaacccactcagcgccctgcagtccgtcctgaacaatcacttgggcaaagccacggagcccttgcgctcaccttcctgctccagcccaagttcaagcacaatttccatgttccacaagtcgaatctcaatgtcatggacaagccggtcttgagtcctgcctccacaaggtcagccagcgtgtccaggcgctacctgtttgagaacagcgatcagcccattgacctgaccaagtccaaaagcaagaaagccgagtcctcgcaagcacaatcttgtatgtccccacctcagaagcacgctctgtctgacatcgccgacatggtcaaagtcctccccaaagccaccaccccaaagccagcctcctcctccagggtcccccccatgaagctggaaatggatgtcaggcgctttgaggatgtctccagtgaagtctcaactttgcataaaagaaaaggccggcagtccaactggaatcctcagcatcttctgattctacaagcccagtttgcctcgagcctcttccagacatcagagggcaaatacctgctgtctgatctgggcccacaagagcgtatgcaaatctctaagtttacgggactctcaatgaccactatcagtcactggctggccaacgtcaagtaccagcttaggaaaacgggcgggacaaaatttctgaaaaacatggacaaaggccaccccatcttttattgcagtgactgtgcctcccagttcagaaccccttctacctacatcagtcacttagaatctcacctgggtttccaaatgaaggacatgacccgcttgtcagtggaccagcaaagcaaggtggagcaagagatctcccgggtatcgtcggctcagaggtctccagaaacaatagctgccgaagaggacacagactctaaattcaagtgtaagttgtgctgtcggacatttgtgagcaaacatgcggtaaaactccacctaagcaaaacgcacagcaagtcacccgaacaccattcacagtttgtaacagacgtggatgaagaatagtaatgaactagtccgtaacttgaaagtatttcgatttcttggctttatatatcttgtggaaaggacgaatatcacacagatccacaaactgt

SEQ ID NO: 600 - DNA, 3347 bp, Homo sapiens
  source 1..3347: mol_type = genomic DNA
accgccaccatgccgaggaggaagcagcaggcgccccggcgcgcagcagcctatgtttccgaagagttaaaggctgctgccctggtggacgaaggtttagacccagaggagcatacggcagatggagagccctcggccaagtacatgtgcccggagaaggagctcgccagggcctgccccagctaccagaactccccggccgccgagttttcctgccatgaaatggacagcgagtcacacatcagtgagaccagtgaccgaatggctgactttgaaagcggctccatcaagaacgaagaggagaccaaggaggtcacggtcccactggaagacacgactgtgtcggatagcctggagcagatgaaggccgtgtacaacaacttcctctccaactcctactggtccaacctcaacctcaacctgcaccagccctcctcggagaagaacaacggcagcagcagcagcagcagtagcagcagcagcagctgtggcagcgggagcttcgactggcaccagagcgccatggctaagacgctgcagcaggtgtcacagagccgcatgctcccggagcccagcctcttcagcaccgtgcagctgtaccggcagagcagcaagctctatggctccatcttcacgggggccagcaagttccgctgtaaggactgcagcgctgcctacgacaccctggtggagttgacggtgcacatgaacgagacggggcattaccgcgacgacaaccatgagaccgataacaacaaccccaagcgctggtccaagcctcgcaaacgctccttgctggaaatggaagggaaggaagacgcccagaaggtgctgaagtgcatgtactgtggccactcctttgagtccctgcaggatttgagtgtccatatgatcaaaacaaaacactaccaaaaagtgcctctgaaggaacccgtcactcctgtcgccgccaaaatcatccctgccactcggaagaaagcttccctggagctggagctccccagctccccagattccacaggtggaacccccaaagccaccatctcagacaccaacgatgcacttcagaagaactccaacccttacatcacgccaaataatcggtacggccaccagaatggggccagctatgcatggcactttgaggcccggaagtcgcagatcctgaagtgcatggagtgtgggagctcgcatgacaccctgcaggagctcactgcccacatgatggtcactggccacttcatcaaggtcaccaactctgctatgaaaaaggggaagcccattgtggagacgcctgtcacacctaccatcacaaccctgctggatgagaaggtccagtccgtgcccctggcagccaccaccttcacgtccccctccaatacacctgccagcatctccccaaaactgaatgtggaggtcaagaaggaagtcgacaaggagaaagcggtcactgacgagaaacctaagcaaaaagacaagcctggcgaagaagaggagaagtgtgacatctcttccaaataccattacttgactgaaaatgacttagaagagagtcccaagggggggcttgatatcctcaaatccttggaaaacacagtgacatccgcaatcaacaaggcccagaacggcactcctagctgggggggctatcccagcatccatgccgcctaccaacttcccaacatgatgaagttgtccctgggctcgtcggggaagagcacgcccctgaaacccatgtttggcaacagtgagattgtctccccgacgaaaaaccagaccctggtctctccacccagcagccagacgtcccccatgcccaagacaaactttcatgccatggaggagctggtgaaaaaggtcactgagaaagttgccaaagtggaggagaagatgaaggagccggatgggaagctttccccgcccaagcgggccactccctccccatgtagcagcgaagtcggggaacccatcaagatggaggcatccagcgatgggggcttccgcagccaggagaacagccccagccccccgcgggatgggtgcaaggatgggagccccctcgctgagccggtggagaatggcaaggagctggtgaagcccctagccagcagtttgagtggcagcacggccatcatcaccgaccacccgcctgaacagccttttgttaaccctttgagcgccctgcagtcagtcatgaacattcacctgggcaaggccgccaagccctccctgcctgccctggaccccatgagcatgcttttcaagatgagcaacagcctggcggagaaggctgctgtggccaccccgccgcccctgcagtccaagaaggcagaccacctcgaccgctatttctaccacgtcaacaacgaccagcccatagacttgacaaaagggaagagtgacaaaggctgctccttgggttcagtgcttctgtcacccacgtccacagccccggcaacctcctcatccacggtgacaacggcaaagacatctgccgtcgtatcattcatgtcaaactcgccgctacgcgagaatgccttgtcagatatatccgatatgctgaagaacttgacagagagccacacgtcaaaatcctccactccttccagcatctccgagaagtctgacattgacggggccactctggaggaggctgaggagtcgacgcccgcccagaagaggaagggccgccagtcaaactggaacccccagcacctcctgatcctccaggcccagtttgccgccagcctccggcagacctcagaagggaagtacatcatgtcagacctgagcccccaggagcggatgcatatctccaggttcaccgggctgtccatgaccaccatcagccactggctggccaacgtgaaataccagcttcgaaggacaggtggaacaaagttcctcaaaaacttggacactggccaccccgtcttcttttgtaacgattgtgcgtcccaaatcaggactccttccacgtacatcagtcacctagagtcacacttaggcttccggctacgggacttatccaaactgtccaccgaacagattaacagtcagatagcacaaaccaagtcaccgtcagaaaaaatggtgacgtcctcccccgaggaagacctggggacttcctatcagtgcaaactttgcaatcggacctttgccagcaagcacgctgttaaacttcaccttagcaaaacacacgggaaatctccggaagaccaccttctgtatgtctctgagttagagaagcagtagtaatgaactagtccgtaacttgaaagtatttcgatttcttggctttatatatcttgtggaaaggacgactcaggtcatcgaagcagaacaat

SEQ ID NO: 601 - DNA, 3200 bp, Homo sapiens
  source 1..3200: mol_type = genomic DNA
accgccaccatgtgcaatgaagagacggagatcaaagaggcgcagagctaccagaactccccagtcagctctgcgactaaccaggacgccggctacgggtcgcccttcagtgagagcagcgaccagctagcccatttcaaaggctcttcctctcgagaagagaaggaggatccgcagtgtcccgacagcgtctcgtacccccaggacagcctggcacagatcaaagctgtgtatgcaaacttgttctccgagtcctgctggtccagcttagctctggatttaaagaagtcgggttccaccaccagcaccaacgatgccagccagaaggagagctccgcccccacccccacaccccccacctgccccgtcagcaccactggccccaccacgagcacgcccagcaccagctgcagctccagcaccagccacagcagtaccaccagtaccagcagcagctccgggtacgactggcaccaggctgcactggccaagacgctgcagcagacgtcctcgtatgggctgcttcctgagcccagcctgttcagcaccgtgcagctctaccgccagaacaacaagctctacggctccgtcttcacgggcgccagcaagttccggtgcaaagactgcagtgccgcgtacgacacgctggtggaactgacggtgcacatgaacgagacaggccactaccgtgacgacaacagggacaaggactccgagaagaccaagaggtggtccaagcccaggaagcgctccctgatggagatggaggggaaggaggatgcccagaaggtgctgaagtgcatgtactgtggacactcctttgagtccttgcaggacctcagcgtccacatgatcaaaaccaagcattaccagaaagtgcctctgaaggagccagtgccagccatcaccaaactggtcccctccaccaaaaagcgggcgcttcaggacctggcgcccccctgctcccctgagccagcaggaatggccgcagaggtggccctgagtgagtcagccaaggatcagaaagcagcgaacccgtacgtcacgcccaataaccgctatggctaccagaatggcgccagctacacctggcagtttgaggcccgcaaggcgcagatcctcaagtgcatggagtgtggcagctcccacgacacgctgcagcagctcaccgcccacatgatggtcaccgggcacttcctgaaagtgaccacctcggcttctaagaagggcaagcagttggtgctggaccctgtggtggaagagaagatccagtccatcccactaccgcccaccacccacacgcggctgccggcctccagcatcaaaaagcagcccgactctcccgcggggtccacgacttctgaagaaaagaaagagccagagaaggagaagccgcctgtggctggcgacgcggagaagatcaaggaggagagtgaggacagcttggagaaatttgagcccagcaccctgtacccgtacctgcgtgaggaggacctggacgacagccccaagggagggctggacattctcaagtccctggagaataccgtctccacggccattagcaaagctcagaatggtgcgccctcatggggtggctaccccagcatccatgcagcctaccagctcccgggcaccgtgaagccactgccggcggccgtgcagagcgtgcaggtgcagccgtcctatgctggcggcgtgaagtcgctgtcttccgccgagcacaacgccctcctgcactccccagggagcctcacgcccccaccgcacaagagcaacgtgtctgccatggaggagctggtggagaaggtcacgggcaaggtcaacatcaagaaggaggagagaccccctgagaaggagaagagctccctggccaaggctgcgtcccccatagcaaaagagaataaagatttcccgaaaacggaggaagtcagcggcaaaccacagaagaagggccctgaggccgagactgggaaggccaaaaaggagggaccgctggacgttcacaccccaaatggcacagagcctctcaaagcaaaggtcaccaacggctgtaacaacctggggatcatcatggaccactcaccggagccttccttcatcaacccgctgagcgctttgcagtccatcatgaacacccacctgggcaaggtgtccaagcccgtgagtccctcgctggacccgctggcgatgctgtacaagatcagcaacagcatgctggacaagccggtgtaccccgccacccctgtgaagcaggccgatgccatcgaccgctactattatgaaaacagcgaccagcccattgacttaaccaagtccaagaacaagccgctggtgtccagcgtggctgattcggtggcatcacctctgcgggagagcgcactcatggacatctccgacatggtgaaaaacctcacaggccgcctgacgcccaagtcctccacgccctccacagtttcagagaagtccgatgctgatggcagcagctttgaggaggcgttggacgagctgtcaccggtccacaagaggaagggccggcagtccaactggaacccgcagcaccttctcatcctgcaggcccagttcgcctcgagcttgcgggagaccacagagggcaagtacatcatgtcggacttgggcccgcaggagagggtgcacatctcgaagtttactgggctctccatgaccaccatcagccactggctggccaatgtgaagtaccagttgaggaggacagggggaacgaaattcctaaagaacctggacacagggcatcctgttttcttttgcaacgattgtgcctctcagttcagaactgcttctacatacataagtcatttggagacacacttgggcttcagcctgaaggatctctccaagctgccactcaatcagattcaagaacagcagaatgtttcgaaagtcctcaccaacaaaactctgggcccactgggggccaccgaggaagacttgggctccacattccaatgtaagctctgcaaccggacttttgcgagcaagcacgcagtcaaactgcaccttagtaagacccacggcaagtctcccgaggaccacctgatctatgtgactgagttggagaaacagtagtaatgaactagtccgtaacttgaaagtatttcgatttcttggctttatatatcttgtggaaaggacgatatggtatgtattcagcgtaacaa

SEQ ID NO: 602 - DNA, 3335 bp, Homo sapiens
  source 1..3335: mol_type = genomic DNA
accgccaccatgccgaggaggaagcagcaggccccccggcgctcggcagcttatgttcctgaggaagaattgaaggcagcagaaatagatgaagagcacgtggaggatgacgggctgtctttggacattcaggaaagtgagtacatgtgcaatgaagagacggagatcaaagaggcgcagagctaccagaactccccagtcagctctgcgactaaccaggacgccggctacgggtcgcccttcagtgagagcagcgaccagctagcccatttcaaaggctcttcctctcgagaagagaaggaggatccgcagtgtcccgacagcgtctcgtacccccaggacagcctggcacagatcaaagctgtgtatgcaaacttgttctccgagtcctgctggtccagcttagctctggatttaaagaagtcgggttccaccaccagcaccaacgatgccagccagaaggagagctccgcccccacccccacaccccccacctgccccgtcagcaccactggccccaccacgagcacgcccagcaccagctgcagctccagcaccagccacagcagtaccaccagtaccagcagcagctccgggtacgactggcaccaggctgcactggccaagacgctgcagcagacgtcctcgtatgggctgcttcctgagcccagcctgttcagcaccgtgcagctctaccgccagaacaacaagctctacggctccgtcttcacgggcgccagcaagttccggtgcaaagactgcagtgccgcgtacgacacgctggtggaactgacggtgcacatgaacgagacaggccactaccgtgacgacaacagggacaaggactccgagaagaccaagaggtggtccaagcccaggaagcgctccctgatggagatggaggggaaggaggatgcccagaaggtgctgaagtgcatgtactgtggacactcctttgagtccttgcaggacctcagcgtccacatgatcaaaaccaagcattaccagaaagtgcctctgaaggagccagtgccagccatcaccaaactggtcccctccaccaaaaagcgggcgcttcaggacctggcgcccccctgctcccctgagccagcaggaatggccgcagaggtggccctgagtgagtcagccaaggatcagaaagcagcgaacccgtacgtcacgcccaataaccgctatggctaccagaatggcgccagctacacctggcagtttgaggcccgcaaggcgcagatcctcaagtgcatggagtgtggcagctcccacgacacgctgcagcagctcaccgcccacatgatggtcaccgggcacttcctgaaagtgaccacctcggcttctaagaagggcaagcagttggtgctggaccctgtggtggaagagaagatccagtccatcccactaccgcccaccacccacacgcggctgccggcctccagcatcaaaaagcagcccgactctcccgcggggtccacgacttctgaagaaaagaaagagccagagaaggagaagccgcctgtggctggcgacgcggagaagatcaaggaggagagtgaggacagcttggagaaatttgagcccagcaccctgtacccgtacctgcgtgaggaggacctggacgacagccccaagggagggctggacattctcaagtccctggagaataccgtctccacggccattagcaaagctcagaatggtgcgccctcatggggtggctaccccagcatccatgcagcctaccagctcccgggcaccgtgaagccactgccggcggccgtgcagagcgtgcaggtgcagccgtcctatgctggcggcgtgaagtcgctgtcttccgccgagcacaacgccctcctgcactccccagggagcctcacgcccccaccgcacaagagcaacgtgtctgccatggaggagctggtggagaaggtcacgggcaaggtcaacatcaagaaggaggagagaccccctgagaaggagaagagctccctggccaaggctgcgtcccccatagcaaaagagaataaagatttcccgaaaacggaggaagtcagcggcaaaccacagaagaagggccctgaggccgagactgggaaggccaaaaaggagggaccgctggacgttcacaccccaaatggcacagagcctctcaaagcaaaggtcaccaacggctgtaacaacctggggatcatcatggaccactcaccggagccttccttcatcaacccgctgagcgctttgcagtccatcatgaacacccacctgggcaaggtgtccaagcccgtgagtccctcgctggacccgctggcgatgctgtacaagatcagcaacagcatgctggacaagccggtgtaccccgccacccctgtgaagcaggccgatgccatcgaccgctactattatgaaaacagcgaccagcccattgacttaaccaagtccaagaacaagccgctggtgtccagcgtggctgattcggtggcatcacctctgcgggagagcgcactcatggacatctccgacatggtgaaaaacctcacaggccgcctgacgcccaagtcctccacgccctccacagtttcagagaagtccgatgctgatggcagcagctttgaggaggcgttggacgagctgtcaccggtccacaagaggaagggccggcagtccaactggaacccgcagcaccttctcatcctgcaggcccagttcgcctcgagcttgcgggagaccacagagggcaagtacatcatgtcggacttgggcccgcaggagagggtgcacatctcgaagtttactgggctctccatgaccaccatcagccactggctggccaatgtgaagtaccagttgaggaggacagggggaacgaaattcctaaagaacctggacacagggcatcctgttttcttttgcaacgattgtgcctctcagttcagaactgcttctacatacataagtcatttggagacacacttgggcttcagcctgaaggatctctccaagctgccactcaatcagattcaagaacagcagaatgtttcgaaagtcctcaccaacaaaactctgggcccactgggggccaccgaggaagacttgggctccacattccaatgtaagctctgcaaccggacttttgcgagcaagcacgcagtcaaactgcaccttagtaagacccacggcaagtctcccgaggaccacctgatctatgtgactgagttggagaaacagtagtaatgaactagtccgtaacttgaaagtatttcgatttcttggctttatatatcttgtggaaaggacgagggaggtgttaccatgtatcttgc

SEQ ID NO: 603 - DNA, 989 bp, Homo sapiens
  source 1..989: mol_type = genomic DNA
accgccaccatggatttagagaaaaattatccgactcctcggaccagcaggacaggacatggaggagtgaatcagcttgggggggtttttgtgaatggacggccactcccggatgtagtccgccagaggatagtggaacttgctcatcaaggtgtcaggccctgcgacatctccaggcagcttcgggtcagccatggttgtgtcagcaaaattcttggcaggtattatgagacaggaagcatcaagcctggggtaattggaggatccaaaccaaaggtcgccacacccaaagtggtggaaaaaatcgctgaatataaacgccaaaatcccaccatgtttgcctgggagatcagggaccggctgctggcagagcgggtgtgtgacaatgacaccgtgcctagcgtcagttccatcaacaggatcatccggacaaaagtacagcagccacccaaccaaccagtcccagcttccagtcacagcatagtgtccactggctccgtgacgcaggtgtcctcggtgagcacggattcggccggctcgtcgtactccatcagcggcatcctgggcatcacgtcccccagcgccgacaccaacaagcgcaagagagacgaaggtattcaggagtctccggtgccgaacggccactcgcttccgggcagagacttcctccggaagcagatgcggggagacttgttcacacagcagcagctggaggtgctggaccgcgtgtttgagaggcagcactactcagacatcttcaccaccacagagcccatcaagcccgagcaggctccccctactattatagcgctgccgcccgaggagccgccccacctgcagccgccactgcctatgaccgtcactgacccttggagccaggcgggcaccaaacactagtaatgaactagtccgtaacttgaaagtatttcgatttcttggctttatatatcttgtggaaaggacgagtaggtccaacttatctccctctg

SEQ ID NO: 604 - DNA, 1061 bp, Homo sapiens
  source 1..1061: mol_type = genomic DNA
accgccaccatggatttagagaaaaattatccgactcctcggaccagcaggacaggacatggaggagtgaatcagcttgggggggtttttgtgaatggacggccactcccggatgtagtccgccagaggatagtggaacttgctcatcaaggtgtcaggccctgcgacatctccaggcagcttcgggtcagccatggttgtgtcagcaaaattcttggcaggtattatgagacaggaagcatcaagcctggggtaattggaggatccaaaccaaaggtcgccacacccaaagtggtggaaaaaatcgctgaatataaacgccaaaatcccaccatgtttgcctgggagatcagggaccggctgctggcagagcgggtgtgtgacaatgacaccgtgcctagcgtcagttccatcaacaggatcatccggacaaaagtacagcagccacccaaccaaccagtcccagcttccagtcacagcataggtattcaggagtctccggtgccgaacggccactcgcttccgggcagagacttcctccggaagcagatgcggggagacttgttcacacagcagcagctggaggtgctggaccgcgtgtttgagaggcagcactactcagacatcttcaccaccacagagcccatcaagcccgagcagaccacagagtattcagccatggcctcgctggctggtgggctggacgacatgaaggccaatctggccagccccacccctgctgacatcgggagcagtgtgccaggcccgcagtcctaccccattgtgacaggccgtgacttggcgagcacgaccctccccgggtaccctccacacgtcccccccgctggacagggcagctactcagcaccgacgctgacagggatggtgcctggctccccctactattatagcgctgccgcccgaggagccgccccacctgcagccgccactgcctatgaccgtcactagtaatgaactagtccgtaacttgaaagtatttcgatttcttggctttatatatcttgtggaaaggacgatggaacatccgagaaccaccattt

SEQ ID NO: 605 - DNA, 1190 bp, Homo sapiens
  source 1..1190: mol_type = genomic DNA
accgccaccatggatttagagaaaaattatccgactcctcggaccagcaggacaggacatggaggagtgaatcagcttgggggggtttttgtgaatggacggccactcccggatgtagtccgccagaggatagtggaacttgctcatcaaggtgtcaggccctgcgacatctccaggcagcttcgggtcagccatggttgtgtcagcaaaattcttggcaggtattatgagacaggaagcatcaagcctggggtaattggaggatccaaaccaaaggtcgccacacccaaagtggtggaaaaaatcgctgaatataaacgccaaaatcccaccatgtttgcctgggagatcagggaccggctgctggcagagcgggtgtgtgacaatgacaccgtgcctagcgtcagttccatcaacaggatcatccggacaaaagtacagcagccacccaaccaaccagtcccagcttccagtcacagcatagtgtccactggctccgtgacgcaggtgtcctcggtgagcacggattcggccggctcgtcgtactccatcagcggcatcctgggcatcacgtcccccagcgccgacaccaacaagcgcaagagagacgaaggtattcaggagtctccggtgccgaacggccactcgcttccgggcagagacttcctccggaagcagatgcggggagacttgttcacacagcagcagctggaggtgctggaccgcgtgtttgagaggcagcactactcagacatcttcaccaccacagagcccatcaagcccgagcagaccacagagtattcagccatggcctcgctggctggtgggctggacgacatgaaggccaatctggccagccccacccctgctgacatcgggagcagtgtgccaggcccgcagtcctaccccattgtgacaggccgtgacttggcgagcacgaccctccccgggtaccctccacacgtcccccccgctggacagggcagctactcagcaccgacgctgacagggatggtgcctggctccccctactattatagcgctgccgcccgaggagccgccccacctgcagccgccactgcctatgaccgtcactagtaatgaactagtccgtaacttgaaagtatttcgatttcttggctttatatatcttgtggaaaggacgacggtgcgcgttattcgaggagata

SEQ ID NO: 606 - DNA, 1076 bp, Homo sapiens
  source 1..1076: mol_type = genomic DNA
accgccaccatggatttagagaaaaattatccgactcctcggaccagcaggacaggacatggaggagtgaatcagcttgggggggtttttgtgaatggacggccactcccggatgtagtccgccagaggatagtggaacttgctcatcaaggtgtcaggccctgcgacatctccaggcagcttcgggtcagccatggttgtgtcagcaaaattcttggcaggtattatgagacaggaagcatcaagcctggggtaattggaggatccaaaccaaaggtcgccacacccaaagtggtggaaaaaatcgctgaatataaacgccaaaatcccaccatgtttgcctgggagatcagggaccggctgctggcagagcgggtgtgtgacaatgacaccgtgcctagcgtcagttccatcaacaggatcatccggacaaaagtacagcagccacccaaccaaccagtcccagcttccagtcacagcatagtgtccactggctccgtgacgcaggtgtcctcggtgagcacggattcggccggctcgtcgtactccatcagcggcatcctgggcatcacgtcccccagcgccgacaccaacaagcgcaagagagacgaaggtattcaggagtctccggtgccgaacggccactcgcttccgggcagagacttcctccggaagcagatgcggggagacttgttcacacagcagcagctggaggtgctggaccgcgtgtttgagaggcagcactactcagacatcttcaccaccacagagcccatcaagcccgagcagggagtgagttttccgggagtccctacagccaccctcagtattcctcgtacaacgactcctggaggttccccaacccggggctgcttggctccccctactattatagcgctgccgcccgaggagccgccccacctgcagccgccactgcctatgaccgtcactgacccttggagccaggcgggcaccaaacactagtaatgaactagtccgtaacttgaaagtatttcgatttcttggctttatatatcttgtggaaaggacgatcacacaatcgtctttaggtgtaa

SEQ ID NO: 607 - DNA, 1277 bp, Homo sapiens
  source 1..1277: mol_type = genomic DNA
accgccaccatggatttagagaaaaattatccgactcctcggaccagcaggacaggacatggaggagtgaatcagcttgggggggtttttgtgaatggacggccactcccggatgtagtccgccagaggatagtggaacttgctcatcaaggtgtcaggccctgcgacatctccaggcagcttcgggtcagccatggttgtgtcagcaaaattcttggcaggtattatgagacaggaagcatcaagcctggggtaattggaggatccaaaccaaaggtcgccacacccaaagtggtggaaaaaatcgctgaatataaacgccaaaatcccaccatgtttgcctgggagatcagggaccggctgctggcagagcgggtgtgtgacaatgacaccgtgcctagcgtcagttccatcaacaggatcatccggacaaaagtacagcagccacccaaccaaccagtcccagcttccagtcacagcatagtgtccactggctccgtgacgcaggtgtcctcggtgagcacggattcggccggctcgtcgtactccatcagcggcatcctgggcatcacgtcccccagcgccgacaccaacaagcgcaagagagacgaaggtattcaggagtctccggtgccgaacggccactcgcttccgggcagagacttcctccggaagcagatgcggggagacttgttcacacagcagcagctggaggtgctggaccgcgtgtttgagaggcagcactactcagacatcttcaccaccacagagcccatcaagcccgagcagaccacagagtattcagccatggcctcgctggctggtgggctggacgacatgaaggccaatctggccagccccacccctgctgacatcgggagcagtgtgccaggcccgcagtcctaccccattgtgacaggccgtgacttggcgagcacgaccctccccgggtaccctccacacgtcccccccgctggacagggcagctactcagcaccgacgctgacagggatggtgcctgggagtgagttttccgggagtccctacagccaccctcagtattcctcgtacaacgactcctggaggttccccaacccggggctgcttggctccccctactattatagcgctgccgcccgaggagccgccccacctgcagccgccactgcctatgaccgtcactagtaatgaactagtccgtaacttgaaagtatttcgatttcttggctttatatatcttgtggaaaggacgacactccggcccgaggtagactcat

SEQ ID NO: 608 - DNA, 1175 bp, Homo sapiens
  source 1..1175: mol_type = genomic DNA
accgccaccatggatttagagaaaaattatccgactcctcggaccagcaggacaggacatggaggagtgaatcagcttgggggggtttttgtgaatggacggccactcccggatgtagtccgccagaggatagtggaacttgctcatcaaggtgtcaggccctgcgacatctccaggcagcttcgggtcagccatggttgtgtcagcaaaattcttggcaggtattatgagacaggaagcatcaagcctggggtaattggaggatccaaaccaaaggtcgccacacccaaagtggtggaaaaaatcgctgaatataaacgccaaaatcccaccatgtttgcctgggagatcagggaccggctgctggcagagcgggtgtgtgacaatgacaccgtgcctagcgtcagttccatcaacaggatcatccggacaaaagtacagcagccacccaaccaaccagtcccagcttccagtcacagcatagtgtccactggctccgtgacgcaggtgtcctcggtgagcacggattcggccggctcgtcgtactccatcagcggcatcctgggcatcacgtcccccagcgccgacaccaacaagcgcaagagagacgaaggtattcaggagtctccggtgccgaacggccactcgcttccgggcagagacttcctccggaagcagatgcggggagacttgttcacacagcagcagctggaggtgctggaccgcgtgtttgagaggcagcactactcagacatcttcaccaccacagagcccatcaagcccgagcagaccacagagtattcagccatggcctcgctggctggtgggctggacgacatgaaggccaatctggccagccccacccctgctgacatcgggagcagtgtgccaggcccgcagtcctaccccattgtgacagggagtgagttttccgggagtccctacagccaccctcagtattcctcgtacaacgactcctggaggttccccaacccggggctgcttggctccccctactattatagcgctgccgcccgaggagccgccccacctgcagccgccactgcctatgaccgtcactagtaatgaactagtccgtaacttgaaagtatttcgatttcttggctttatatatcttgtggaaaggacgagttgacctttcacaacaaggtgat

SEQ ID NO: 609 - DNA, 1148 bp, Homo sapiens
  source 1..1148: mol_type = genomic DNA
accgccaccatggatttagagaaaaattatccgactcctcggaccagcaggacaggacatggaggagtgaatcagcttgggggggtttttgtgaatggacggccactcccggatgtagtccgccagaggatagtggaacttgctcatcaaggtgtcaggccctgcgacatctccaggcagcttcgggtcagccatggttgtgtcagcaaaattcttggcaggtattatgagacaggaagcatcaagcctggggtaattggaggatccaaaccaaaggtcgccacacccaaagtggtggaaaaaatcgctgaatataaacgccaaaatcccaccatgtttgcctgggagatcagggaccggctgctggcagagcgggtgtgtgacaatgacaccgtgcctagcgtcagttccatcaacaggatcatccggacaaaagtacagcagccacccaaccaaccagtcccagcttccagtcacagcataggtattcaggagtctccggtgccgaacggccactcgcttccgggcagagacttcctccggaagcagatgcggggagacttgttcacacagcagcagctggaggtgctggaccgcgtgtttgagaggcagcactactcagacatcttcaccaccacagagcccatcaagcccgagcagaccacagagtattcagccatggcctcgctggctggtgggctggacgacatgaaggccaatctggccagccccacccctgctgacatcgggagcagtgtgccaggcccgcagtcctaccccattgtgacaggccgtgacttggcgagcacgaccctccccgggtaccctccacacgtcccccccgctggacagggcagctactcagcaccgacgctgacagggatggtgcctgggagtgagttttccgggagtccctacagccaccctcagtattcctcgtacaacgactcctggaggttccccaacccggggctgcttggctccccctactattatagcgctgccgcccgaggagccgccccacctgcagccgccactgcctatgaccgtcactagtaatgaactagtccgtaacttgaaagtatttcgatttcttggctttatatatcttgtggaaaggacgacgattaacacgttatctatttaat

SEQ ID NO: 610 - DNA, 977 bp, Homo sapiens
  source 1..977: mol_type = genomic DNA
accgccaccatggatttagagaaaaattatccgactcctcggaccagcaggacaggacatggaggagtgaatcagcttgggggggtttttgtgaatggacggccactcccggatgtagtccgccagaggatagtggaacttgctcatcaaggtgtcaggccctgcgacatctccaggcagcttcgggtcagccatggttgtgtcagcaaaattcttggcaggatcatccggacaaaagtacagcagccacccaaccaaccagtcccagcttccagtcacagcatagtgtccactggctccgtgacgcaggtgtcctcggtgagcacggattcggccggctcgtcgtactccatcagcggcatcctgggcatcacgtcccccagcgccgacaccaacaagcgcaagagagacgaaggtattcaggagtctccggtgccgaacggccactcgcttccgggcagagacttcctccggaagcagatgcggggagacttgttcacacagcagcagctggaggtgctggaccgcgtgtttgagaggcagcactactcagacatcttcaccaccacagagcccatcaagcccgagcagaccacagagtattcagccatggcctcgctggctggtgggctggacgacatgaaggccaatctggccagccccacccctgctgacatcgggagcagtgtgccaggcccgcagtcctaccccattgtgacagggagtgagttttccgggagtccctacagccaccctcagtattcctcgtacaacgactcctggaggttccccaacccggggctgcttggctccccctactattatagcgctgccgcccgaggagccgccccacctgcagccgccactgcctatgaccgtcactagtaatgaactagtccgtaacttgaaagtatttcgatttcttggctttatatatcttgtggaaaggacgatctatagggtcccactcttggact

SEQ ID NO: 611 - DNA, 953 bp, Homo sapiens
  source 1..953: mol_type = genomic DNA
accgccaccatgtttgcctgggagatcagggaccggctgctggcagagcgggtgtgtgacaatgacaccgtgcctagcgtcagttccatcaacaggatcatccggacaaaagtacagcagccacccaaccaaccagtcccagcttccagtcacagcatagtgtccactggctccgtgacgcaggtgtcctcggtgagcacggattcggccggctcgtcgtactccatcagcggcatcctgggcatcacgtcccccagcgccgacaccaacaagcgcaagagagacgaaggtattcaggagtctccggtgccgaacggccactcgcttccgggcagagacttcctccggaagcagatgcggggagacttgttcacacagcagcagctggaggtgctggaccgcgtgtttgagaggcagcactactcagacatcttcaccaccacagagcccatcaagcccgagcagaccacagagtattcagccatggcctcgctggctggtgggctggacgacatgaaggccaatctggccagccccacccctgctgacatcgggagcagtgtgccaggcccgcagtcctaccccattgtgacaggccgtgacttggcgagcacgaccctccccgggtaccctccacacgtcccccccgctggacagggcagctactcagcaccgacgctgacagggatggtgcctgggagtgagttttccgggagtccctacagccaccctcagtattcctcgtacaacgactcctggaggttccccaacccggggctgcttggctccccctactattatagcgctgccgcccgaggagccgccccacctgcagccgccactgcctatgaccgtcactagtaatgaactagtccgtaacttgaaagtatttcgatttcttggctttatatatcttgtggaaaggacgacatgacacaggtgcgccggaatga

SEQ ID NO: 612 - DNA, 764 bp, Homo sapiens
  source 1..764: mol_type = genomic DNA
accgccaccatgtttgcctgggagatcagggaccggctgctggcagagcgggtgtgtgacaatgacaccgtgcctagcgtcagttccatcaacaggatcatccggacaaaagtacagcagccacccaaccaaccagtcccagcttccagtcacagcatagtgtccactggctccgtgacgcaggtgtcctcggtgagcacggattcggccggctcgtcgtactccatcagcggcatcctgggcatcacgtcccccagcgccgacaccaacaagcgcaagagagacgaaggtattcaggagtctccggtgccgaacggccactcgcttccgggcagagacttcctccggaagcagatgcggggagacttgttcacacagcagcagctggaggtgctggaccgcgtgtttgagaggcagcactactcagacatcttcaccaccacagagcccatcaagcccgagcagaccacagagtattcagccatggcctcgctggctggtgggctggacgacatgaaggccaatctggccagccccacccctgctgacatcgggagcagtgtgccaggcccgcagtcctaccccattgtgacaggctccccctactattatagcgctgccgcccgaggagccgccccacctgcagccgccactgcctatgaccgtcactagtaatgaactagtccgtaacttgaaagtatttcgatttcttggctttatatatcttgtggaaaggacgagactcccagaggcgaatgatacga

SEQ ID NO: 613 - DNA, 1088 bp, Homo sapiens
  source 1..1088: mol_type = genomic DNA
accgccaccatggatttagagaaaaattatccgactcctcggaccagcaggacaggacatggaggagtgaatcagcttgggggggtttttgtgaatggacggccactcccggatgtagtccgccagaggatagtggaacttgctcatcaaggtgtcaggccctgcgacatctccaggcagcttcgggtcagccatggttgtgtcagcaaaattcttggcaggtattatgagacaggaagcatcaagcctggggtaattggaggatccaaaccaaaggtcgccacacccaaagtggtggaaaaaatcgctgaatataaacgccaaaatcccaccatgtttgcctgggagatcagggaccggctgctggcagagcgggtgtgtgacaatgacaccgtgcctagcgtcagttccatcaacaggatcatccggacaaaagtacagcagccacccaaccaaccagtcccagcttccagtcacagcatagtgtccactggctccgtgacgcaggtgtcctcggtgagcacggattcggccggctcgtcgtactccatcagcggcatcctgggcatcacgtcccccagcgccgacaccaacaagcgcaagagagacgaaggtattcaggagtctccggtgccgaacggccactcgcttccgggcagagacttcctccggaagcagatgcggggagacttgttcacacagcagcagctggaggtgctggaccgcgtgtttgagaggcagcactactcagacatcttcaccaccacagagcccatcaagcccgagcagaccacagagtattcagccatggcctcgctggctggtgggctggacgacatgaaggccaatctggccagccccacccctgctgacatcgggagcagtgtgccaggcccgcagtcctaccccattgtgacaggctccccctactattatagcgctgccgcccgaggagccgccccacctgcagccgccactgcctatgaccgtcactagtaatgaactagtccgtaacttgaaagtatttcgatttcttggctttatatatcttgtggaaaggacgagaacgagtacacacctcactccca

SEQ ID NO: 614 - DNA, 1157 bp, Homo sapiens
  source 1..1157: mol_type = genomic DNA
accgccaccatgcatcaggacgggatcagcagcatgaaccagcttggggggctctttgtgaatggccggcccctgcctctggatacccggcagcagattgtgcggctagcagtcagtggaatgcggccctgtgacatctcacggatccttaaggtatctaatggctgtgtgagcaagatcctagggcgttactaccgcacaggtgtcttggagccaaagggcattgggggaagcaagccacggctggctacaccccctgtggtggctcgaattgcccagctgaagggtgagtgtccagccctctttgcctgggaaatccaacgccagctttgtgctgaagggctttgcacccaggacaagactcccagtgtctcctccatcaaccgagtcctgcgggcattacaggaggaccagggactaccgtgcacacggctcaggtcaccagctgttttggctccagctgtcctcactccccatagtggctctgagactccccggggtacccacccagggaccggccaccggaatcggactatcttctccccaagccaagcagaggcactggagaaagagttccagcgtgggcagtatcctgattcagtggcccgtggaaagctggctactgccacctctctgcctgaggacacggtgagggtctggttttccaacagaagagccaaatggcgtcggcaagagaagctcaagtgggaaatgcagctgccaggtgcttcccaggggctgactgtaccaagggttgccccaggaatcatctctgcacagcagtcccctggcagtgtgcccacagcagccctgcctgccctggaaccactgggtccctcctgctatcagctgtgctgggcaacagcaccagaaaggtgtctgagtgacaccccacctaaagcctgtctcaagccctgctggggccacttgcccccacagccgaattccctggactcaggactgctttgccttccttgcccttcctcccactgtcacctggccagtcttagtggctctcaggccctgctctggcctggctgcccactactgtatggcttggaatagtaatgaactagtccgtaacttgaaagtatttcgatttcttggctttatatatcttgtggaaaggacgatcactggtatgcgagcattaactg

SEQ ID NO: 615 - DNA, 1133 bp, Homo sapiens
  source 1..1133: mol_type = genomic DNA
accgccaccatgaaccagcttggggggctctttgtgaatggccggcccctgcctctggatacccggcagcagattgtgcggctagcagtcagtggaatgcggccctgtgacatctcacggatccttaaggtatctaatggctgtgtgagcaagatcctagggcgttactaccgcacaggtgtcttggagccaaagggcattgggggaagcaagccacggctggctacaccccctgtggtggctcgaattgcccagctgaagggtgagtgtccagccctctttgcctgggaaatccaacgccagctttgtgctgaagggctttgcacccaggacaagactcccagtgtctcctccatcaaccgagtcctgcgggcattacaggaggaccagggactaccgtgcacacggctcaggtcaccagctgttttggctccagctgtcctcactccccatagtggctctgagactccccggggtacccacccagggaccggccaccggaatcggactatcttctccccaagccaagcagaggcactggagaaagagttccagcgtgggcagtatcctgattcagtggcccgtggaaagctggctactgccacctctctgcctgaggacacggtgagggtctggttttccaacagaagagccaaatggcgtcggcaagagaagctcaagtgggaaatgcagctgccaggtgcttcccaggggctgactgtaccaagggttgccccaggaatcatctctgcacagcagtcccctggcagtgtgcccacagcagccctgcctgccctggaaccactgggtccctcctgctatcagctgtgctgggcaacagcaccagaaaggtgtctgagtgacaccccacctaaagcctgtctcaagccctgctggggccacttgcccccacagccgaattccctggactcaggactgctttgccttccttgcccttcctcccactgtcacctggccagtcttagtggctctcaggccctgctctggcctggctgcccactactgtatggcttggaatagtaatgaactagtccgtaacttgaaagtatttcgatttcttggctttatatatcttgtggaaaggacgactactctctggtttcctgaaagcc

SEQ ID NO: 616 - DNA, 1619 bp, Homo sapiens
  source 1..1619: mol_type = genomic DNA
accgccaccatggcggcccttcccggcacggtaccgagaatgatgcggccggctccggggcagaactacccccgcacgggattccctttggaagtgtccaccccgcttggccaaggccgggtcaatcagctgggaggggtcttcatcaatgggcgacccctgcctaaccacatccgccacaagatagtggagatggcccaccatggcatccggccctgtgtcatctcccgacagctgcgtgtctcccacggctgcgtctccaagattctttgccgctaccaggagaccgggtccatccggcctggggccatcggcggcagcaagcccagacaggtggcgactccggatgtagagaaaaagattgaggagtacaagagggaaaacccaggcatgttcagctgggagatccgggacaggctgctgaaggatgggcactgtgaccgaagcactgtgccctcaggtttagtgagttcgattagccgcgtgctcagaatcaagttcgggaagaaagaggaggaggatgaagcggacaagaaggaggacgacggcgaaaagaaggccaaacacagcatcgacggcatcctgggcgacaaagggaaccggctggacgagggctcggatgtggagtcggaacctgacctcccactgaagcgcaagcagcgacgcagtcggaccacattcacggccgagcagctggaggagctggagaaggcctttgagaggacccactacccagacatatacacccgcgaggagctggcgcagaggaccaagctgacagaggcgcgtgtgcaggtctggttcagtaaccgccgcgcccgttggcgtaagcaggcaggagccaaccagctggcggcgttcaaccaccttctgccaggaggcttcccacccaccggcatgcccacgctgcccccctaccagctgccggactccacctaccccaccaccaccatctcccaagatgggggcagcactgtgcaccggcctcagcccctgccaccgtccaccatgcaccagggcgggctggctgcagcggctgcagccgccgacaccagctctgcctacggagcccgccacagcttctccagctactctgacagcttcatgaatccggcggcgccctccaaccacatgaacccggtcagcaacggcctgtctcctcaggtgatgagcatcttgggcaaccccagtgcggtgcccccgcagccacaggctgacttctccatctccccgctgcatggcggcctggactcggccacctccatctcagccagctgcagccagcgggccgactccatcaagccaggagacagcctgcccacctcccaggcctactgcccacccacctacagcaccaccggctacagcgtggaccccgtggccggctatcagtacggccagtacggccagactgctgttgattatctggccaaaaatgtgagcctctccacccagcgtcgcatgaagctcggggagcactctgctgtgctgggactcctgcctgtggaaactggccaggcctactagtaatgaactagtccgtaacttgaaagtatttcgatttcttggctttatatatcttgtggaaaggacgagaaaccagatccgacctaggtcgc

SEQ ID NO: 617 - DNA, 1664 bp, Homo sapiens
  source 1..1664: mol_type = genomic DNA
accgccaccatggcggcccttcccggcacggtaccgagaatgatgcggccggctccggggcagaactacccccgcacgggattccctttggaagtgtccaccccgcttggccaaggccgggtcaatcagctgggaggggtcttcatcaatgggcgacccctgcctaaccacatccgccacaagatagtggagatggcccaccatggcatccggccctgtgtcatctcccgacagctgcgtgtctcccacggctgcgtctccaagattctttgccgctaccaggagaccgggtccatccggcctggggccatcggcggcagcaagcccagacaggtggcgactccggatgtagagaaaaagattgaggagtacaagagggaaaacccaggcatgttcagctgggagatccgggacaggctgctgaaggatgggcactgtgaccgaagcactgtgccctcaggtttagtgagttcgattagccgcgtgctcagaatcaagttcgggaagaaagaggaggaggatgaagcggacaagaaggaggacgacggcgaaaagaaggccaaacacagcatcgacggcatcctgggcgacaaagggaaccggctggacgagggctcggatgtggagtcggaacctgacctcccactgaagcgcaagcagcgacgcagtcggaccacattcacggccgagcagctggaggagctggagaaggcctttgagaggacccactacccagacatatacacccgcgaggagctggcgcagaggaccaagctgacagaggcgcgtgtgcaggtctggttcagtaaccgccgcgcccgttggcgtaagcaggcaggagccaaccagctggcggcgttcaaccaccttctgccaggaggcttcccacccaccggcatgcccacgctgcccccctaccagctgccggactccacctaccccaccaccaccatctcccaagatgggggcagcactgtgcaccggcctcagcccctgccaccgtccaccatgcaccagggcgggctggctgcagcggctgcagccgccgacaccagctctgcctacggagcccgccacagcttctccagctactctgacagcttcatgaatccggcggcgccctccaaccacatgaacccggtcagcaacggcctgtctcctcaggtgatgagcatcttgggcaaccccagtgcggtgcccccgcagccacaggctgacttctccatctccccgctgcatggcggcctggactcggccacctccatctcagccagctgcagccagcgggccgactccatcaagccaggagacagcctgcccacctcccaggcctactgcccacccacctacagcaccaccggctacagcgtggaccccgtggccggctatcagtacggccagtacggccagagtgagtgcctggtgccctgggcgtcccccgtccccattccttctcccacccccagggcctcctgcttgtttatggagagctacaaggtggtgtcagggtggggaatgtccatttcacagatggaaaaattgaagtccagccagatggaacagttcacctagtaatgaactagtccgtaacttgaaagtatttcgatttcttggctttatatatcttgtggaaaggacgactgtttcctcaatgtattgcaaca

SEQ ID NO: 618 - DNA, 1412 bp, Homo sapiens
  source 1..1412: mol_type = genomic DNA
accgccaccatgcagaacagtcacagcggagtgaatcagctcggtggtgtctttgtcaacgggcggccactgccggactccacccggcagaagattgtagagctagctcacagcggggcccggccgtgcgacatttcccgaattctgcagacccatgcagatgcaaaagtccaagtgctggacaatcaaaacgtgtccaacggatgtgtgagtaaaattctgggcaggtattacgagactggctccatcagacccagggcaatcggtggtagtaaaccgagagtagcgactccagaagttgtaagcaaaatagcccagtataagcgggagtgcccgtccatctttgcttgggaaatccgagacagattactgtccgagggggtctgtaccaacgataacataccaagcgtgtcatcaataaacagagttcttcgcaacctggctagcgaaaagcaacagatgggcgcagacggcatgtatgataaactaaggatgttgaacgggcagaccggaagctggggcacccgccctggttggtatccggggacttcggtgccagggcaacctacgcaagatggctgccagcaacaggaaggagggggagagaataccaactccatcagttccaacggagaagattcagatgaggctcaaatgcgacttcagctgaagcggaagctgcaaagaaatagaacatcctttacccaagagcaaattgaggccctggagaaagagtttgagagaacccattatccagatgtgtttgcccgagaaagactagcagccaaaatagatctacctgaagcaagaatacaggtatggttttctaatcgaagggccaaatggagaagagaagaaaaactgaggaatcagagaagacaggccagcaacacacctagtcatattcctatcagcagtagtttcagcaccagtgtctaccaaccaattccacaacccaccacaccggtttcctccttcacatctggctccatgttgggccgaacagacacagccctcacaaacacctacagcgctctgccgcctatgcccagcttcaccatggcaaataacctgcctatgcaacccccagtccccagccagacctcctcatactcctgcatgctgcccaccagcccttcggtgaatgggcggagttatgatacctacacccccccacatatgcagacacacatgaacagtcagccaatgggcacctcgggcaccacttcaacaggactcatttcccctggtgtgtcagttccagttcaagttcccggaagtgaacctgatatgtctcaatactggccaagattacagtagtaatgaactagtccgtaacttgaaagtatttcgatttcttggctttatatatcttgtggaaaggacgattgtacgacatacggctctacgag

SEQ ID NO: 619 - DNA, 962 bp, Homo sapiens
  source 1..962: mol_type = genomic DNA
accgccaccatgggcgcagacggcatgtatgataaactaaggatgttgaacgggcagaccggaagctggggcacccgccctggttggtatccggggacttcggtgccagggcaacctacgcaagatggctgccagcaacaggaaggagggggagagaataccaactccatcagttccaacggagaagattcagatgaggctcaaatgcgacttcagctgaagcggaagctgcaaagaaatagaacatcctttacccaagagcaaattgaggccctggagaaagagtttgagagaacccattatccagatgtgtttgcccgagaaagactagcagccaaaatagatctacctgaagcaagaatacaggtatggttttctaatcgaagggccaaatggagaagagaagaaaaactgaggaatcagagaagacaggccagcaacacacctagtcatattcctatcagcagtagtttcagcaccagtgtctaccaaccaattccacaacccaccacaccggtttcctccttcacatctggctccatgttgggccgaacagacacagccctcacaaacacctacagcgctctgccgcctatgcccagcttcaccatggcaaataacctgcctatgcaacccccagtccccagccagacctcctcatactcctgcatgctgcccaccagcccttcggtgaatgggcggagttatgatacctacacccccccacatatgcagacacacatgaacagtcagccaatgggcacctcgggcaccacttcaacaggactcatttcccctggtgtgtcagttccagttcaagttcccggaagtgaacctgatatgtctcaatactggccaagattacagtagtaatgaactagtccgtaacttgaaagtatttcgatttcttggctttatatatcttgtggaaaggacgacccggctattcctacacgaaccac

SEQ ID NO: 620 - DNA, 1307 bp, Homo sapiens
  source 1..1307: mol_type = genomic DNA
accgccaccatgcagaacagtcacagcggagtgaatcagctcggtggtgtctttgtcaacgggcggccactgccggactccacccggcagaagattgtagagctagctcacagcggggcccggccgtgcgacatttcccgaattctgcaggtgtccaacggatgtgtgagtaaaattctgggcaggtattacgagactggctccatcagacccagggcaatcggtggtagtaaaccgagagtagcgactccagaagttgtaagcaaaatagcccagtataagcgggagtgcccgtccatctttgcttgggaaatccgagacagattactgtccgagggggtctgtaccaacgataacataccaagcgtgtcatcaataaacagagttcttcgcaacctggctagcgaaaagcaacagatgggcgcagacggcatgtatgataaactaaggatgttgaacgggcagaccggaagctggggcacccgccctggttggtatccggggacttcggtgccagggcaacctacgcaagatggctgccagcaacaggaaggagggggagagaataccaactccatcagttccaacggagaagattcagatgaggctcaaatgcgacttcagctgaagcggaagctgcaaagaaatagaacatcctttacccaagagcaaattgaggccctggagaaagagtttgagagaacccattatccagatgtgtttgcccgagaaagactagcagccaaaatagatctacctgaagcaagaatacaggtatggttttctaatcgaagggccaaatggagaagagaagaaaaactgaggaatcagagaagacaggccagcaacacacctagtcatattcctatcagcagtagtttcagcaccagtgtctaccaaccaattccacaacccaccacaccggtttcctccttcacatctggctccatgttgggccgaacagacacagccctcacaaacacctacagcgctctgccgcctatgcccagcttcaccatggcaaataacctgcctatgcaagtaagtgcggctggtggtggcctgcataacccaggccccagagaagtgaggagtggctcagggcctgcggacctcattggctgtgtctgcacccttgagagcttttcgcactacagtgattggcttgaccagtcaagtcggagacagtcaatcccatcacttttaagtgattagtaatgaactagtccgtaacttgaaagtatttcgatttcttggctttatatatcttgtggaaaggacgagtgttggagtcgagggtccatcga

SEQ ID NO: 621 - DNA, 1370 bp, Homo sapiens
  source 1..1370: mol_type = genomic DNA
accgccaccatgcagaacagtcacagcggagtgaatcagctcggtggtgtctttgtcaacgggcggccactgccggactccacccggcagaagattgtagagctagctcacagcggggcccggccgtgcgacatttcccgaattctgcaggtgtccaacggatgtgtgagtaaaattctgggcaggtattacgagactggctccatcagacccagggcaatcggtggtagtaaaccgagagtagcgactccagaagttgtaagcaaaatagcccagtataagcgggagtgcccgtccatctttgcttgggaaatccgagacagattactgtccgagggggtctgtaccaacgataacataccaagcgtgtcatcaataaacagagttcttcgcaacctggctagcgaaaagcaacagatgggcgcagacggcatgtatgataaactaaggatgttgaacgggcagaccggaagctggggcacccgccctggttggtatccggggacttcggtgccagggcaacctacgcaagatggctgccagcaacaggaaggagggggagagaataccaactccatcagttccaacggagaagattcagatgaggctcaaatgcgacttcagctgaagcggaagctgcaaagaaatagaacatcctttacccaagagcaaattgaggccctggagaaagagtttgagagaacccattatccagatgtgtttgcccgagaaagactagcagccaaaatagatctacctgaagcaagaatacaggtatggttttctaatcgaagggccaaatggagaagagaagaaaaactgaggaatcagagaagacaggccagcaacacacctagtcatattcctatcagcagtagtttcagcaccagtgtctaccaaccaattccacaacccaccacaccggtttcctccttcacatctggctccatgttgggccgaacagacacagccctcacaaacacctacagcgctctgccgcctatgcccagcttcaccatggcaaataacctgcctatgcaacccccagtccccagccagacctcctcatactcctgcatgctgcccaccagcccttcggtgaatgggcggagttatgatacctacacccccccacatatgcagacacacatgaacagtcagccaatgggcacctcgggcaccacttcaacaggactcatttcccctggtgtgtcagttccagttcaagttcccggaagtgaacctgatatgtctcaatactggccaagattacagtagtaatgaactagtccgtaacttgaaagtatttcgatttcttggctttatatatcttgtggaaaggacgactttgggctgccctgcgatcgttc

SEQ ID NO: 622 - DNA, 1706 bp, Homo sapiens
  source 1..1706: mol_type = genomic DNA
accgccaccatgaagttcaccctgggcctggggtcgcgggcgtggagagtgtcctgggagggggcagcagcggcggcggcaggccctggagcgggcggcagcgcgctccgctgccgcgcacagcgcgtctccagcccgcggctgggccgccgcggctctcggctctcgggcgccctccctctatgcctctcacgcggcggcggcggcgcccaagctctcccggactgcgccgggcccagccccggccaccccggccaccccggcgccaggcagctggccggcccgctcgctatggagcagacgtatggcgaggtgaaccagctgggcggtgtgttcgtcaacggccgccccctgcccaacgccatccgcttgcgcattgtggagctggcgcagctgggcatccgaccctgtgacatcagtcggcagctccgcgtatcccacggctgcgtgagcaagatcctggcgcgctacaacgagaccggctccattctgcccggggccatcggggggagcaagccccgcgtcaccactcccaacgtggtcaagcacatccgggactacaagcaaggagaccctggcatctttgcctgggagatccgcgaccggctgctggccgacggcgtctgtgacaagtacaatgtgccttcggtgagctccatcagccgcatcctgcgcaacaagatcggcagcctggcgcagcccggaccgtacgaggcaagtaagcagccgccgtcgcagcctacgctgccctacaaccacatctaccagtacccctaccccagtcccgtgtcgcccacgggcgccaagatgggcagccaccccggggtcccgggcacggcgggccacgtcagcatcccgcgctcatggccctcggcacactcggtcagcaacatcctgggcatccggacgtttatggagcaaacaggggccctggctgggagcgaaggcaccgcttactctcccaagatggaagactgggccggcgtgaaccgcacggccttccccgccacccccgcagtgaatgggctagagaaacctgccttagaggcagacattaaatacactcagtcggcctccaccctctctgccgtgggcggctttctccccgcctgcgcctacccggcctccaaccagcacggcgtgtacagcgccccgggcggcggctacctcgccccgggcccgccgtggccgcctgcgcaaggtcctcctctggcgccccccggggccggcgtagctgtgcatggcggggaactcgcggcagcaatgaccttcaagcatcccagccgagaaggaagcctcccagctccggcagcaaggccccggacgccctcagtagcttacacggactgcccatcccggcctcgacctcctaggggcagctctccccggacccgagcccggagggaacggcaggcggacccgggcgcacaggtctgcgcggcggccccggcaatcggcacgggcaggatcggaggactcgcggaggaggaagccagtgccggcccgcggggtgcacgcccagccagcccccaggcccagccctgcctctggccggacccaccacacttcctttattggtctgggtttttaggcttctctgaacttgggttttagtaatgaactagtccgtaacttgaaagtatttcgatttcttggctttatatatcttgtggaaaggacgacgtatagttgtttgaagagccaag

SEQ ID NO: 623 - DNA, 1475 bp, Homo sapiens
  source 1..1475: mol_type = genomic DNA
accgccaccatgaagttcaccctgggcctggggtcgcgggcgtggagagtgtcctgggagggggcagcagcggcggcggcaggccctggagcgggcggcagcgcgctccgctgccgcgcacagcgcgtctccagcccgcggctgggccgccgcggctctcggctctcgggcgccctccctctatgcctctcacgcggcggcggcggcgcccaagctctcccggactgcgccgggcccagccccggccaccccggccaccccggcgccaggcagctggccggcccgctcgctatggagcagacgtatggcgaggtgaaccagctgggcggtgtgttcgtcaacggccgccccctgcccaacgccatccgcttgcgcattgtggagctggcgcagctgggcatccgaccctgtgacatcagtcggcagctccgcgtatcccacggctgcgtgagcaagatcctggcgcgctacaacgagaccggctccattctgcccggggccatcggggggagcaagccccgcgtcaccactcccaacgtggtcaagcacatccgggactacaagcaaggagaccctggcatctttgcctgggagatccgcgaccggctgctggccgacggcgtctgtgacaagtacaatgtgccttcggtgagctccatcagccgcatcctgcgcaacaagatcggcagcctggcgcagcccggaccgtacgaggcaagtaagcagccgccgtcgcagcctacgctgccctacaaccacatctaccagtacccctaccccagtcccgtgtcgcccacgggcgccaagatgggcagccaccccggggtcccgggcacggcgggccacgtcagcatcccgcgctcatggccctcggcacactcggtcagcaacatcctgggcatccggacgtttatggagcaaacaggggccctggctgggagcgaaggcaccgcttactctcccaagatggaagactgggccggcgtgaaccgcacggccttccccgccacccccgcagtgaatgggctagagaaacctgccttagaggcagacattaaatacactcagtcggcctccaccctctctgccgtgggcggctttctccccgcctgcgcctacccggcctccaaccagcacggcgtgtacagcgccccgggcggcggctacctcgccccgggcccgccgtggccgcctgcgcaaggtcctcctctggcgccccccggggccggcgtagctgtgcatggcggggaactcgcggcagcaatgaccttcaagcatcccagccgagaagtggctgacaggaagcctcccagctccggcagcaaggccccggacgccctcagtagcttacacggactgcccatcccggcctcgacctcctagtaatgaactagtccgtaacttgaaagtatttcgatttcttggctttatatatcttgtggaaaggacgatctcattctaacgcgctttccacg

SEQ ID NO: 624 - DNA, 539 bp, Homo sapiens
  source 1..539: mol_type = genomic DNA
accgccaccatggccggggaggcggagggcttggtgatgtttgaggatgtgacggtatatttctccagggaggagtgggggctccttaatgtgacccagaagggcctataccgggatgtgatgctggagaactttgcactcgttagctcactgggacttgcaccttcgagatcccctgtgtttacccagctggaggatgatgaacagtcgtgggtgcccagctgggtggatgtgactccagtcagcagagcagaagccaggagaggttttggtcttggccccgcatgttcctgcctctctggcctgcgtctcctcattgcccttctctgtatctgtgcagagctgtctactgttggcgactcagtgcgtgtcttgaaatgtgcacatatccttaaacagatggtttgtgtagagtggaggatgagagagcccatcctgagcatctagtaatgaactagtccgtaacttgaaagtatttcgatttcttggctttatatatcttgtggaaaggacgataggaacgcctatcacttgaattt

SEQ ID NO: 625 - DNA, 1367 bp, Homo sapiens
  source 1..1367: mol_type = genomic DNA
accgccaccatggccggggaggcggaggctcagttggacccatcattgcagggcttggtgatgtttgaggatgtgacggtatatttctccagggaggagtgggggctccttaatgtgacccagaagggcctataccgggatgtgatgctggagaactttgcactcgttagctcactgggacttgcaccttcgagatcccctgtgtttacccagctggaggatgatgaacagtcgtgggtgcccagctgggtggatgtgactccagtcagcagagcagaagccaggagaggttttggtcttgatggtttgtgtagagtggaggatgagagagcccatcctgagcatctaaagagctacagagtcatccagcaccaggacactcatagtgaggggaaaccaagaaggcacactgagcatggggcagctttcccacctggttccagttgtgggcaacagcaagaagtccatgtggcagagaagctgttcaaatgcagtgactgtgggaaggtgttcttaaaggcctttgccctccttgaccatctgataacgcattctgaagagagacccttcagatgcccaacaggcagaagtgctttcaagaagtcagctcatattaacccccgaaaaattcacactggagaaacagcccatgtgtgtaatgaatgtgggaaggccttcagttacccgtctaagctgaggaaacaccagaaggttcacacaggcataaaaccttttaagtgtagtgactgtggtaaaaccttcaaccgcaaagacgcacttgttctacaccagaggattcacactggagaaaggccttacgagtgcagcaaatgtggtaaaaccttcagtgttctgtctaccctcattcggcaccggaaagtgcacattggagaaaggccctatgagtgtacagaatgtgggaagttctttaaatacaataatagcttcattcttcaccagagagttcacactggagaaaggccttttgaatgcaagcaatgtgggaaaggctacgtgacccgttcaggcctctatcagcactggaaagtccacactggggaacggccctatgaatgtagcctgtgtgggaaaaccttcactaccagatcctaccgcaatcggcaccagcagttccacactgaagagaggtcttatgaatgtacagagtgtgggaaggccttcaaacatagttccaccctccttcagcacaagaaagtccatactccagaaaggcgtcaggaggacagggcacatgggaaggtcgttagctgctagtaatgaactagtccgtaacttgaaagtatttcgatttcttggctttatatatcttgtggaaaggacgatttgcaccttcggtgctgcgaaat

SEQ ID NO: 626 - DNA, 1292 bp, Homo sapiens
  source 1..1292: mol_type = genomic DNA
accgccaccatggatatgcactgcaaagcagaccccttctccgcgatgcacccagggcacgggggtgtgaaccagctcgggggggtgtttgtgaacggccggcccctacccgacgtggtgaggcagcgcatcgtggagctggcccaccagggtgtgcggccctgtgacatctcccggcagctgcgggtcagccacggctgtgtcagcaaaatcctgggcaggtactacgagaccggcagcatcaagccgggtgtgatcggtggctccaagcccaaagtggcgacgcccaaagtggtggacaagattgctgaatacaaacgacagaacccgactatgttcgcctgggagattcgagaccggctcctggccgagggcatctgtgacaatgacacagtgcccagcgtctcttccatcaacagaatcatccggaccaaagttcagcagcctttccacccaacgccggatggggctgggacaggagtgaccgcccctggccacaccattgttcccagcacggcctcccctcctgtttccagcgcctccaatgacccagtgggatcctactccatcaatgggatcctggggattcctcgctccaatggtgagaagaggaaacgtgatgaagatgtgtctgagggctcagtccccaatggagattcccagagtggtgtggacagtttgcggaagcacttgcgagctgacaccttcacccagcagcagctggaagctttggatcgggtctttgagcgtccttcctaccctgacgtcttccaggcatcagagcacatcaaatcagaacaggggaacgagtactccctcccagccctgacccctgggcttgatgaagtcaagtcgagtctatctgcatccaccaaccctgagctgggcagcaacgtgtcaggcacacagacatacccagttgtgactggtcgtgacatggcgagcaccactctgcctggttacccccctcacgtgccccccactggccagggaagctaccccacctccaccctggcaggaatggtgcctgaggctgcagttggtccctcatcctccctcatgagcaagccggggaggaagcttgcagaagtgcccccttgtgtgcaacccactggagcgagttctccggcaacccgtacagccacccccagtacacggcctacaacgaggcttggagattcagcaaccccgccttactagtaatgaactagtccgtaacttgaaagtatttcgatttcttggctttatatatcttgtggaaaggacgagagcatgctcaccgcagaactcat

SEQ ID NO: 627 - DNA, 1355 bp, Homo sapiens
  source 1..1355: mol_type = genomic DNA
accgccaccatggatatgcactgcaaagcagaccccttctccgcgatgcacccagggcacgggggtgtgaaccagctcgggggggtgtttgtgaacggccggcccctacccgacgtggtgaggcagcgcatcgtggagctggcccaccagggtgtgcggccctgtgacatctcccggcagctgcgggtcagccacggctgtgtcagcaaaatcctgggcaggtactacgagaccggcagcatcaagccgggtgtgatcggtggctccaagcccaaagtggcgacgcccaaagtggtggacaagattgctgaatacaaacgacagaacccgactatgttcgcctgggagattcgagaccggctcctggccgagggcatctgtgacaatgacacagtgcccagcgtctcttccatcaacagaatcatccggaccaaagttcagcagcctttccacccaacgccggatggggctgggacaggagtgaccgcccctggccacaccattgttcccagcacggcctcccctcctgtttccagcgcctccaatgacccagtgggatcctactccatcaatgggatcctggggattcctcgctccaatggtgagaagaggaaacgtgatgaagttgaggtatacactgatcctgcccacattagaggaggtggaggtttgcatctggtctggactttaagagatgtgtctgagggctcagtccccaatggagattcccagagtggtgtggacagtttgcggaagcacttgcgagctgacaccttcacccagcagcagctggaagctttggatcgggtctttgagcgtccttcctaccctgacgtcttccaggcatcagagcacatcaaatcagaacaggggaacgagtactccctcccagccctgacccctgggcttgatgaagtcaagtcgagtctatctgcatccaccaaccctgagctgggcagcaacgtgtcaggcacacagacatacccagttgtgactggtcgtgacatggcgagcaccactctgcctggttacccccctcacgtgccccccactggccagggaagctaccccacctccaccctggcaggaatggtgcctgggagcgagttctccggcaacccgtacagccacccccagtacacggcctacaacgaggcttggagattcagcaaccccgccttactaagttccccttattattatagtgccgccccccggggctccgcccctgccgctgctgccgctgcctatgaccgccactagtaatgaactagtccgtaacttgaaagtatttcgatttcttggctttatatatcttgtggaaaggacgaggatgcaggtagggtgtccagctt

SEQ ID NO: 628 - DNA, 1286 bp, Homo sapiens
  source 1..1286: mol_type = genomic DNA
accgccaccatggatatgcactgcaaagcagaccccttctccgcgatgcacccagggcacgggggtgtgaaccagctcgggggggtgtttgtgaacggccggcccctacccgacgtggtgaggcagcgcatcgtggagctggcccaccagggtgtgcggccctgtgacatctcccggcagctgcgggtcagccacggctgtgtcagcaaaatcctgggcaggtactacgagaccggcagcatcaagccgggtgtgatcggtggctccaagcccaaagtggcgacgcccaaagtggtggacaagattgctgaatacaaacgacagaacccgactatgttcgcctgggagattcgagaccggctcctggccgagggcatctgtgacaatgacacagtgcccagcgtctcttccatcaacagaatcatccggaccaaagttcagcagcctttccacccaacgccggatggggctgggacaggagtgaccgcccctggccacaccattgttcccagcacggcctcccctcctgtttccagcgcctccaatgacccagtgggatcctactccatcaatgggatcctggggattcctcgctccaatggtgagaagaggaaacgtgatgaagatgtgtctgagggctcagtccccaatggagattcccagagtggtgtggacagtttgcggaagcacttgcgagctgacaccttcacccagcagcagctggaagctttggatcgggtctttgagcgtccttcctaccctgacgtcttccaggcatcagagcacatcaaatcagaacaggggaacgagtactccctcccagccctgacccctgggcttgatgaagtcaagtcgagtctatctgcatccaccaaccctgagctgggcagcaacgtgtcaggcacacagacatacccagttgtgactggtcgtgacatggcgagcaccactctgcctggttacccccctcacgtgccccccactggccagggaagctaccccacctccaccctggcaggaatggtgcctgggagcgagttctccggcaacccgtacagccacccccagtacacggcctacaacgaggcttggagattcagcaaccccgccttactaagttccccttattattatagtgccgccccccggggctccgcccctgccgctgctgccgctgcctatgaccgccactagtaatgaactagtccgtaacttgaaagtatttcgatttcttggctttatatatcttgtggaaaggacgagctgatctaacgggaattgatgca

SEQ ID NO: 629 - DNA, 1196 bp, Homo sapiens
  source 1..1196: mol_type = genomic DNA
accgccaccatgtgggccccgcgggagcagctactgggctggactgcggaagctctgcctgccaaggattctgcctggccctgggaagagaagcctagatatctgggaccagtgactttcgaggatgtggctgtgcttttcactgaggcagagtggaagagactgagccttgagcagaggaacctatacaaagaagtgatgctggaaaatctcaggaatctggtctcattggcagaatcaaagccagaagtccatacctgcccttcttgccctctggcctttggcagtcagcagttcctcagccaagatgagctacacaatcatcctattccaggtttccatgcaggaaatcaactccacccaggaaatccctgcccagaggatcagccacagtcacaacatccttctgataaaaatcacaggggggctgaagcagaagatcaacgagtggaaggaggcgtcagacccttgttttggagtacaaatgaaaggggggctttagtgggtttctctagcctgttccagagaccaccaataagctcttggggaggcaacagaatattagagatacagctcagtccagcccagaatgcaagctctgaggaagtagacagaatttccaagagggcagaaaccccagggtttggagcagtcacgtttggggagtgtgcactagcttttaaccagaagtcaaacctgttcagacagaaggcagtcacagcagaaaaatcttcagacaaaaggcagtcacaggtgtgcagggagtgtgggcgaggctttagcaggaagtcacagctcatcatacaccagaggacacacacaggagaaaagccttatgtctgcggagagtgtgggcgaggctttatagttgagtcagtcctccgcaaccacctgagtacacactccggggagaaaccttatgtgtgcagccattgtgggcgaggctttagctgcaagccatacctcatcagacatcagaggacacacacaagggagaaatcgtttatgtgcacagtgtgtgggcgaggctttcgtgaaaagtcagagctcattaagcaccagagaattcacacgggggataagccttatgtgtgcagagattagtaatgaactagtccgtaacttgaaagtatttcgatttcttggctttatatatcttgtggaaaggacgagttgtcgctgacgcctgaaatctg

SEQ ID NO: 630 - DNA, 2447 bp, Homo sapiens
  source 1..2447: mol_type = genomic DNA
accgccaccatggctcacaggccgaaaaggacttttcggcagcgcgcggctgattccagcgacagcgatggcgccgaggagtcgcctgctgagcctggggcgccgagggaacttccggtcccgggttctgcggaggaagagccgccctctggaggaggccgcgcgcaggtggcgggactgccccaccgggttcggggccctcgtggccggggccgggtctgggcgagctcccggcgtgccaccaaagcggctccccgcgcggacgaaggctcagaatccagaacccttgatgtgtccacagatgaagaggataaaatacatcactcctcagaaagtaaggatgatcagggtttgtcttctgacagttctagctctcttggagaaaaagaactttcatcaacagttaagatcccagatgcagcttttattcaggcagcccgcagaaaacgtgaattggccagggcccaagatgactatatttctttggatgtacaacatacctcctccatctctggtatgaagagagagagcgaagatgaccctgagagtgagcctgatgaccatgaaaagagaataccatttactctaagacctcaaacacttagacaaaggatggctgaggaatcaataagcagaaatgaagaaacaagtgaagaaagtcaggaagatgaaaagcaagatacttgggaacaacagcaaatgaggaaagcagttaaaatcatagaggaaagagacatagatctttcctgtggcaatggatcttcaaaagtgaagaaatttgatacttccatttcatttccgccagtaaatttagaaattataaagaagcaattaaatactagattaacattactacaggaaactcaccgctcacacctgagggagtatgaaaaatacgtacaagatgtcaaaagctcaaagagtaccatccagaacctagagagttcatcaaatcaagctctaaattgtaaattctataaaagcatgaaaatttatgtggaaaatttaattgactgccttaatgaaaagattatcaacatccaagaaatagaatcatccatgcatgcactccttttaaaacaagctatgacctttatgaaacgcaggcaagatgaattaaaacatgaatcaacgtatttacaacagttatcacgcaaagatgagacatccacaagtggaaacttctcagtagatgaaaaaactcagtggattttagaagagattgaatctcgaaggacaaaaagaagacaagcaagggtgctttctgggaattgtaaccatcaggaaggaacatctagtgatgatgaactgccttcagcagagatgattgacttccaaaaaagccaaggtgacattttacagaaacagaagaaagtttttgaagaagtgcaagatgatttttgtaacatccagaatattttgttgaaatttcagcaatggcgagaaaagtttcctgactcctattatgaagctttcattagtttatgcataccaaagcttttaaatcccctaatacgagttcagttgattgattggaatcctcttaagttggaatccacaggtttaaaagagatgccatggttcaaatctgtagaagaatttatggatagcagtgtggaagattcaaagaaggaaagtagttcagataaaaaagtcttgtctgcaatcatcaacaaaacaattattccccgacttacagactttgtagaattcctttgggatcctttgtcaacctcacagacaacaagtttaataacacattgcagagtgattcttgaagaacattccacttgtgaaaatgaagttagtaaaagcagacaggatttacttaaatccattgtttcaagaatgaaaaaggcagtagaagatgatgtttttattcctctgtatccaaagagtgctgtagaaaacaaaacatcacctcattcaaagttccaagaaagacagttctggtcaggcctaaagctcttccgcaatattcttctttggaatggactccttacagatgacaccttgcaagaactaggactagggaagctgctaaatcgttaccttattatagcacttctcaatgccacacctgggccagatgtggttaaaaagtgcaaccaggtagcagcatgtctaccagaaaaatggtttgaaaattctgccatgaggacatctattccacagctagaaaacttcattcagtttttattgcagtctgcacataaattatctagaagtgaattcagggatgaagtcgaagaaataattcttattttggtgaaaataaaagctttgaatcaagcagaatccttcataggagagcatcacctagaccatcttaaatcactaattaaagaagattagtaatgaactagtccgtaacttgaaagtatttcgatttcttggctttatatatcttgtggaaaggacgatgtaagagcgggtagagcccagat

SEQ ID NO: 631 - DNA, 749 bp, Homo sapiens
  source 1..749: mol_type = genomic DNA
accgccaccatggctcacaggccgaaaaggacttttcggcagcgcgcggctgattccagcgacagcgatggcgccgaggagtcgcctgctgagcctggggcgccgagggaacttccggtcccgggttctgcggaggaagagccgccctctggaggaggccgcgcgcaggtggcgggactgccccaccgggttcggggccctcgtggccggggccgggtctgggcgagctcccggcgtgccaccaaagcggctccccgcgcggacgaaggctcagaatccagaacccttgatgtgtccacagatgaagaggataaaatacatcactcctcagaaagtaaggatgatcagggtttgtcttctgacagttctagctctcttggagaaaaagaactttcatcaacagttaagatcccagatgcagcttttattcaggcagcccgcagaaaacgtgaattggccagggcccaagatgactatatttctttggatgtacaacatacctcctccatctctggtatgaagagagagagcgaagatgaccctgagagtgagcctgatgaccatgaaaagagaataccatttactctaagacctcaaacacttagacaaaggatggctgaggaatcaagtatggatttaccaatatatgaagattagtaatgaactagtccgtaacttgaaagtatttcgatttcttggctttatatatcttgtggaaaggacgaagtacgtcgaatatcggccgttcg

SEQ ID NO: 632 - DNA, 3797 bp, Homo sapiens
  source 1..3797: mol_type = genomic DNA
accgccaccatgtgtaaatgttgtaacctcttctcaccaaatcagtcggaactcctctcccacgtttcagagaagcacatggaagaaggggttaatgttgatgagattattattccccttaggcctctgagtacacctgaaccccccaactcaagcaaaaccggagatgagtttttggtcatgaagaggaagagaggcaggcctaaggggtccacgaagaagtccagcacagaagaggagctggcagaaaacatcgtgagtccgactgaggacagcccgctggctccggaggaagggaacagcctgcctccaagcagcttggagtgtagcaagtgctgtcggaagttctccaacacgcgccagctgcggaagcacatctgcattatcgtgctgaatttgggtgaggaggaaggagaagcaggtaacgagtctgaccttgaactagaaaagaagtgtaaggaagatgatcgggaaaaagcctcgaaaagaccacggtcacagaaaacagagaaagtccagaagatctcaggaaaggaggccagacagctttctggggcgaagaaacccatcataagtgtggttttaactgcacacgaagcaattccaggtgctaccaagattgtgccagtggaggctgggccccctgaaacaggagctacaaattctgagaccacttcagcagacctggtgcctcggagaggctaccaggaatacgccattcagcagacaccttatgagcaaccaatgaagtcaagcaggctaggtcccactcagctcaaaatcttcacttgtgaatactgcaacaaggtcttcaagttcaagcactcgctgcaggcccacctgaggatccacaccaatgaaaagccatacaagtgcccccagtgcagctatgccagtgccatcaaggccaacctcaatgtgcacctgcgcaagcacactggagagaagttcgcctgcgactattgctcgttcacctgcctgagcaagggccacctcaaggtgcacatcgagcgagtgcacaagaagatcaagcagcactgccgcttctgcaagaagaagtactctgacgtcaagaacctcatcaagcacatccgagacgcgcatgacccacaggacaagaaggtcaaagaggccttggacgagctctgcctgatgacgagggagggcaagcggcagctgctctatgactgccacatctgtgagcgcaagttcaagaacgagctggaccgtgaccgccatatgctggtccacggagacaagtggccttttgcctgtgagctctgtggccatggggccaccaagtaccaggcgctggaactgcatgtcaggaagcaccccttcgtgtacgtctgtgccgtctgccgcaagaagttcgtcagctccatcaggctgcgcacccacatcaaagaggtgcacggggctgcccaggaggccttggtcttcaccagttccatcaaccagagcttctgcctcctggaacctggtggggacatccagcaagaagctctgggggaccagctacagctggtggaagaggagtttgccctccagggcgtgaatgcactcaaggaagaggcctgtcctggggacactcagctggaggagggccggaaggagccggaggcccctggggaaatgcctgccccagctgtgcacctggcctccccgcaggccgaaagcacagccctgccaccctgtgagctggaaaccaccgtggtctcctcctcagacctgcattctcaagaggtggtttcagatgattttttgttgaaaaatgatacctcctccgcagaggctcatgctgctcctgagaagcccccagacatgcagcacagaagctcagtccagacgcaaggtgaagtgatcacactactgctgtccaaggcccagagtgctgggtcagatcaggaaagccatggcgcccagagccccctaggggaagggcagaacatggctgtgctttcagctggtgacccagatcccagcaggtgtctcaggtcaaacccagctgaggcctcagacctcctccctccagtagctggtggtggggacaccatcacacatcagcctgactcttgcaaagctgcccctgagcaccggtcaggcatcaccgctttcatgaaggtcctgaacagtttacagaagaagcaaatgaacaccagcttgtgtgagcggatccggaaggtttatggagacctggagtgtgaatactgtggcaaacttttttggtaccaagtgcattttgatatgcatgtccgcacccacacccgggaacatctgtattattgctctcagtgtcattattcttccatcaccaaaaactgccttaaacgccacgtaattcagaaacacagtaacatcttgctgaagtgtcccaccgatggctgtgactactcaactccagataaatataagctacaggcacatcttaaagttcacacagcactggacaaaaggagttattcttgtcctgtttgtgaaaagtctttttcagaggatcgattgataaagtcacatatcaagaccaaccatcctgaggtctccatgagcaccatttctgaggttctcgggaggagggttcagctgaaagggctaattggaaagagagccatgaaatgcccatattgtgacttttatttcatgaagaatggctcagaccttcagcgtcatatttgggctcatgaaggtgtgaagcccttcaagtgttctttgtgtgagtatgcaactcgtagcaagagtaacctcaaggctcatatgaatcgtcacagcactgagaaaacccacctatgtgacatgtgtggcaagaaattcaaatcaaaagggacactgaaaagtcacaaactccttcacactgcagatgggaagcagtttaagtgcacggtgtgtgactacacagcggcccagaagccacagctgctgcggcacatggaacagcatgtctccttcaagcctttccgctgtgcccattgccattactcctgcaacatatctggctctctgaagcggcactacaacaggaagcaccctaatgaggagtatgccaacgtgggcaccggggagctggcagcggaggtgctcatccagcaaggtggtttgaagtgtcctgtttgcagctttgtatatggcaccaaatgggagttcaataggcacttgaagaacaaacatggcttgaaggtggtggaaattgatggagaccccaagtgggagacagcaacagaagctcctgaggagccctccacccagtatctccacatcacagaggccgaagaagacgttcaagggacacaggcagcggtggccgcgctccaggacctgagatacacctctgagagtggcgaccgactggaccccacggccgtgaacatcctgcagcagatcattgagctgggcgccgagacccatgacgccactgcccttgcctcggtggttgccatggcaccagggacggtgactgtggttaagcaggtcaccgaggaggagcccagctccaaccacacggtcatgatccaggagacggtccagcaagcgtccgtggagcttgccgagcagcaccacctggtggtgtcctccgacgacgtggagggcattgagacggtgactgtctacacgcagggcggggaggcctcggagttcatcgtctacgtgcaggaggccatgcagcctgtggaggagcaggctgtggagcagccggcccaggaactctagtaatgaactagtccgtaacttgaaagtatttcgatttcttggctttatatatcttgtggaaaggacgatgggacaactccgcaaagccgcct

SEQ ID NO: 633 - DNA, 3539 bp, Homo sapiens
  source 1..3539: mol_type = genomic DNA
accgccaccatgtgtaaatgttgtaacctcttctcaccaaatcagtcggaactcctctcccacgtttcagagaagcacatggaagaaggggttaatgttgatgagattattattccccttaggcctctgagtacacctgaaccccccaactcaagcaaaaccggagatgagtttttggtcatgaagaggaagagaggcaggcctaaggggtccacgaagaagtccagcacagaagaggagctggcagaaaacatcgtgagtccgactgaggacagcccgctggctccggaggaagggaacagcctgcctccaagcagcttggagtgtagcaagtgctgtcggaagttctccaacacgcgccagctgcggaagcacatctgcattatcgtgctgaatttgggtgaggaggaaggagaagcaggtaacgagtctgaccttgaactagaaaagaagtgtaaggaagatgatcgggaaaaagcctcgaaaagaccacggtcacagaaaacagagaaagtccagaagatctcaggaaaggaggccagacagctttctggggcgaagaaacccatcataagtgtggttttaactgcacacgaagcaattccaggtgctaccaagattgtgccagtggaggctgggccccctgaaacaggagctacaaattctgagaccacttcagcagacctggtgcctcggagaggctaccaggaatacgccattcagcagacaccttatgagcaaccaatgaagtcaagcaggctaggtcccactcagctcaaaatcttcacttgtgaatactgcaacaaggtcttcaagttcaagcactcgctgcaggcccacctgaggatccacaccaatgaaaagccatacaagtgcccccagtgcagctatgccagtgccatcaaggccaacctcaatgtgcacctgcgcaagcacactggagagaagttcgcctgcgactattgctcgttcacctgcctgagcaagggccacctcaaggtgcacatcgagcgagtgcacaagaagatcaagcagcactgccgcttctgcaagaagaagtactctgacgtcaagaacctcatcaagcacatccgagacgcgcatgacccacaggacaagaaggtcaaagaggccttggacgagctctgcctgatgacgagggagggcaagcggcagctgctctatgactgccacatctgtgagcgcaagttcaagaacgagctggaccgtgaccgccatatgctggtccacggagacaagtggccttttgcctgtgagctctgtggccatggggccaccaagtaccaggcgctggaactgcatgtcaggaagcaccccttcgtgtacgtctgtgccgtctgccgcaagaagttcgtcagctccatcaggctgcgcacccacatcaaagaggtgcacggggctgcccaggaggccttggtcttcaccagttccatcaaccagagcttctgcctcctggaacctggtggggacatccagcaagaagctctgggggaccagctacagctggtggaagaggagtttgccctccagggcgtgaatgcactcaaggaagaggcctgtcctggggacactcagctggaggagggccggaaggagccggaggcccctggggaaatgcctgccccagctgtgcacctggcctccccgcaggccgaaagcacagccctgccaccctgtgagctggaaaccaccgtggtctcctcctcagacctgcattctcaagaggtggtttcagatgattttttgttgaaaaatgatacctcctccgcagaggctcatgctgctcctgagaagcccccagacatgcagcacagaagctcagtccagacgcaaggtgaagtgatcacactactgctgtccaaggcccagagtgctgggtcagatcaggaaagccatggcgcccagagccccctaggggaagggcagaacatggctgtgctttcagctggtgacccagatcccagcaggtgtctcaggtcaaacccagctgaggcctcagacctcctccctccagtagctggtggtggggacaccatcacacatcagcctgactcttgcaaagctgcccctgagcaccggtcaggcatcaccgctttcatgaaggtcctgaacagtttacagaagaagcaaatgaacaccagcttgtgtgagcggatccggaaggtttatggagacctggagtgtgaatactgtggcaaacttttttggtaccaagtgcattttgatatgcatgtccgcacccacacccgggaacatctgtattattgctctcagtgtcattattcttccatcaccaaaaactgccttaaacgccacgtaattcagaaacacagtaacatcttgctgaagtgtcccaccgatggctgtgactactcaactccagataaatataagctacaggcacatcttaaagttcacacagcactggacaaaaggagttattcttgtcctgtttgtgaaaagtctttttcagaggatcgattgataaagtcacatatcaagaccaaccatcctgaggtctccatgagcaccatttctgaggttctcgggaggagggttcagctgaaagggctaattggaaagagagccatgaaatgcccatattgtgacttttatttcatgaagaatggctcagaccttcagcgtcatatttgggctcatgaaggtgtgaagcccttcaagtgttctttgtgtgagtatgcaactcgtagcaagagtaacctcaaggctcatatgaatcgtcacagcactgagaaaacccacctatgtgacatgtgtggcaagaaattcaaatcaaaagggacactgaaaagtcacaaactccttcacactgcagatgggaagcagtttaagtgcacggtgtgtgactacacagcggcccagaagccacagctgctgcggcacatggaacagcatgtctccttcaagcctttccgctgtgcccattgccattactcctgcaacatatctggctctctgaagcggcactacaacaggaagcaccctaatgaggagtatgccaacgtgggcaccggggagctggcagcggaggtgctcatccagcaaggtggtttgaagtgtcctgtttgcagctttgtatatggcaccaaatgggagttcaataggcacttgaagaacaaacatggcttgaaggtggtggaaattgatggagaccccaagtgggaggtcaccgaggaggagcccagctccaaccacacggtcatgatccaggagacggtccagcaagcgtccgtggagcttgccgagcagcaccacctggtggtgtcctccgacgacgtggagggcattgagacggtgactgtctacacgcagggcggggaggcctcggagttcatcgtctacgtgcaggaggccatgcagcctgtggaggagcaggctgtggagcagccggcccaggaactctagtaatgaactagtccgtaacttgaaagtatttcgatttcttggctttatatatcttgtggaaaggacgataatgagtaaatttactcagctcg

SEQ ID NO: 634 - DNA, 3572 bp, Homo sapiens
  source 1..3572: mol_type = genomic DNA
accgccaccatgtgtaaatgttgtaacctcttctcaccaaatcagtcggaactcctctcccacgtttcagagaagcacatggaagaaggggttaatgttgatgagattattattccccttaggcctctgagtacacctgaaccccccaactcaagcaaaaccggagatgagtttttggtcatgaagaggaagagaggcaggcctaaggggtccacgaagaagtccagcacagaagaggagctggcagaaaacatcgtgagtccgactgaggacagcccgctggctccggaggaagggaacagcctgcctccaagcagcttggagtgtagcaagtgctgtcggaagttctccaacacgcgccagctgcggaagcacatctgcattatcgtgctgaatttgggtgaggaggaaggagaagcaggtaacgagtctgaccttgaactagaaaagaagtgtaaggaagatgatcgggaaaaagcctcgaaaagaccacggtcacagaaaacagagaaagtccagaagatctcaggaaaggaggccagacagctttctggggcgaagaaacccatcataagtgtggttttaactgcacacgaagcaattccaggtgctaccaagattgtgccagtggaggctgggccccctgaaacaggagctacaaattctgagaccacttcagcagacctggtgcctcggagaggctaccaggaatacgccattcagcagacaccttatgagcaaccaatgaagtcaagcaggctaggtcccactcagctcaaaatcttcacttgtgaatactgcaacaaggtcttcaagttcaagcactcgctgcaggcccacctgaggatccacaccaatgaaaagccatacaagtgcccccagtgcagctatgccagtgccatcaaggccaacctcaatgtgcacctgcgcaagcacactggagagaagttcgcctgcgactattgctcgttcacctgcctgagcaagggccacctcaaggtgcacatcgagcgagtgcacaagaagatcaagcagcactgccgcttctgcaagaagaagtactctgacgtcaagaacctcatcaagcacatccgagacgcgcatgacccacaggacaagaaggtcaaagaggccttggacgagctctgcctgatgacgagggagggcaagcggcagctgctctatgactgccacatctgtgagcgcaagttcaagaacgagctggaccgtgaccgccatatgctggtccacggagacaagtggccttttgcctgtgagctctgtggccatggggccaccaagtaccaggcgctggaactgcatgtcaggaagcaccccttcgtgtacgtctgtgccgtctgccgcaagaagttcgtcagctccatcaggctgcgcacccacatcaaagaggtgcacggggctgcccaggaggccttggtcttcaccagttccatcaaccagagcttctgcctcctggaacctggtggggacatccagcaagaagctctgggggaccagctacagctggtggaagaggagtttgccctccagggcgtgaatgcactcaaggaagaggcctgtcctggggacactcagctggaggagggccggaaggagccggaggcccctggggaaatgcctgccccagctgtgcacctggcctccccgcaggccgaaagcacagccctgccaccctgtgagctggaaaccaccgtggtctcctcctcagacctgcattctcaagaggtggtttcagatgattttttgttgaaaaatgatacctcctccgcagaggctcatgctgctcctgagaagcccccagacatgcagcacagaagctcagtccagacgcaaggtgaagtgatcacactactgctgtccaaggcccagagtgctgggtcagatcaggaaagccatggcgcccagagccccctaggggaagggcagaacatggctgtgctttcagctggtgacccagatcccagcaggtgtctcaggtcaaacccagctgaggcctcagacctcctccctccagtagctggtggtggggacaccatcacacatcagcctgactcttgcaaagctgcccctgagcaccggtcaggcatcaccgctttcatgaaggtcctgaacagtttacagaagaagcaaatgaacaccagcttgtgtgagcggatccggaaggtttatggagacctggagtgtgaatactgtggcaaacttttttggtaccaagtgcattttgatatgcatgtccgcacccacacccgggaacatctgtattattgctctcagtgtcattattcttccatcaccaaaaactgccttaaacgccacgtaattcagaaacacagtaacatcttgctgaagtgtcccaccgatggctgtgactactcaactccagataaatataagctacaggcacatcttaaagttcacacagcactggacaaaaggagttattcttgtcctgtttgtgaaaagtctttttcagaggatcgattgataaagtcacatatcaagaccaaccatcctgaggtctccatgagcaccatttctgaggttctcgggaggagggttcagctgaaagggctaattggaaagagagccatgaaatgcccatattgtgacttttatttcatgaagaatggctcagaccttcagcgtcatatttgggctcatgaaggtgtgaagcccttcaagtgttctttgtgtgagtatgcaactcgtagcaagagtaacctcaaggctcatatgaatcgtcacagcactgagaaaacccacctatgtgacatgtgtggcaagaaattcaaatcaaaagggacactgaaaagtcacaaactccttcacactgcagatgggaagcagtttaagtgcacggtgtgtgactacacagcggcccagaagccacagctgctgcggcacatggaacagcatgtctccttcaagcctttccgctgtgcccattgccattactcctgcaacatatctggctctctgaagcggcactacaacaggaagcaccctaatgaggagtatgccaacgtgggcaccggggagctggcagcggaggtgctcatccagcaaggtggtttgaagtgtcctgtttgcagctttgtatatggcaccaaatgggagttcaataggcacttgaagaacaaacatggcttgaaggtggtggaaattgatggagaccccaagtgggagacagcaacagaagctcctgaggagccctccacccagtatctccacatcacagaggccgaagaagacgttcaagggacacaggcagcggtggccgcgctccaggacctgagatacacctctgagagtggcgaccgactggaccccacggccgtgaacatcctgcagcagctccaaccacacggtcatgatccaggagacggtccagcaagcgtccgtggagcttgccgagcagcaccacctggtggtgtcctccgacgacgtggagggcattagtaatgaactagtccgtaacttgaaagtatttcgatttcttggctttatatatcttgtggaaaggacgacgccttgtacacgaacagcataat

SEQ ID NO: 635 - DNA, 3833 bp, Homo sapiens
  source 1..3833: mol_type = genomic DNA
accgccaccatggagacgcgggcggcagaaaacacggccatctttatgtgtaaatgttgtaacctcttctcaccaaatcagtcggaactcctctcccacgtttcagagaagcacatggaagaaggggttaatgttgatgagattattattccccttaggcctctgagtacacctgaaccccccaactcaagcaaaaccggagatgagtttttggtcatgaagaggaagagaggcaggcctaaggggtccacgaagaagtccagcacagaagaggagctggcagaaaacatcgtgagtccgactgaggacagcccgctggctccggaggaagggaacagcctgcctccaagcagcttggagtgtagcaagtgctgtcggaagttctccaacacgcgccagctgcggaagcacatctgcattatcgtgctgaatttgggtgaggaggaaggagaagcaggtaacgagtctgaccttgaactagaaaagaagtgtaaggaagatgatcgggaaaaagcctcgaaaagaccacggtcacagaaaacagagaaagtccagaagatctcaggaaaggaggccagacagctttctggggcgaagaaacccatcataagtgtggttttaactgcacacgaagcaattccaggtgctaccaagattgtgccagtggaggctgggccccctgaaacaggagctacaaattctgagaccacttcagcagacctggtgcctcggagaggctaccaggaatacgccattcagcagacaccttatgagcaaccaatgaagtcaagcaggctaggtcccactcagctcaaaatcttcacttgtgaatactgcaacaaggtcttcaagttcaagcactcgctgcaggcccacctgaggatccacaccaatgaaaagccatacaagtgcccccagtgcagctatgccagtgccatcaaggccaacctcaatgtgcacctgcgcaagcacactggagagaagttcgcctgcgactattgctcgttcacctgcctgagcaagggccacctcaaggtgcacatcgagcgagtgcacaagaagatcaagcagcactgccgcttctgcaagaagaagtactctgacgtcaagaacctcatcaagcacatccgagacgcgcatgacccacaggacaagaaggtcaaagaggccttggacgagctctgcctgatgacgagggagggcaagcggcagctgctctatgactgccacatctgtgagcgcaagttcaagaacgagctggaccgtgaccgccatatgctggtccacggagacaagtggccttttgcctgtgagctctgtggccatggggccaccaagtaccaggcgctggaactgcatgtcaggaagcaccccttcgtgtacgtctgtgccgtctgccgcaagaagttcgtcagctccatcaggctgcgcacccacatcaaagaggtgcacggggctgcccaggaggccttggtcttcaccagttccatcaaccagagcttctgcctcctggaacctggtggggacatccagcaagaagctctgggggaccagctacagctggtggaagaggagtttgccctccagggcgtgaatgcactcaaggaagaggcctgtcctggggacactcagctggaggagggccggaaggagccggaggcccctggggaaatgcctgccccagctgtgcacctggcctccccgcaggccgaaagcacagccctgccaccctgtgagctggaaaccaccgtggtctcctcctcagacctgcattctcaagaggtggtttcagatgattttttgttgaaaaatgatacctcctccgcagaggctcatgctgctcctgagaagcccccagacatgcagcacagaagctcagtccagacgcaaggtgaagtgatcacactactgctgtccaaggcccagagtgctgggtcagatcaggaaagccatggcgcccagagccccctaggggaagggcagaacatggctgtgctttcagctggtgacccagatcccagcaggtgtctcaggtcaaacccagctgaggcctcagacctcctccctccagtagctggtggtggggacaccatcacacatcagcctgactcttgcaaagctgcccctgagcaccggtcaggcatcaccgctttcatgaaggtcctgaacagtttacagaagaagcaaatgaacaccagcttgtgtgagcggatccggaaggtttatggagacctggagtgtgaatactgtggcaaacttttttggtaccaagtgcattttgatatgcatgtccgcacccacacccgggaacatctgtattattgctctcagtgtcattattcttccatcaccaaaaactgccttaaacgccacgtaattcagaaacacagtaacatcttgctgaagtgtcccaccgatggctgtgactactcaactccagataaatataagctacaggcacatcttaaagttcacacagcactggacaaaaggagttattcttgtcctgtttgtgaaaagtctttttcagaggatcgattgataaagtcacatatcaagaccaaccatcctgaggtctccatgagcaccatttctgaggttctcgggaggagggttcagctgaaagggctaattggaaagagagccatgaaatgcccatattgtgacttttatttcatgaagaatggctcagaccttcagcgtcatatttgggctcatgaaggtgtgaagcccttcaagtgttctttgtgtgagtatgcaactcgtagcaagagtaacctcaaggctcatatgaatcgtcacagcactgagaaaacccacctatgtgacatgtgtggcaagaaattcaaatcaaaagggacactgaaaagtcacaaactccttcacactgcagatgggaagcagtttaagtgcacggtgtgtgactacacagcggcccagaagccacagctgctgcggcacatggaacagcatgtctccttcaagcctttccgctgtgcccattgccattactcctgcaacatatctggctctctgaagcggcactacaacaggaagcaccctaatgaggagtatgccaacgtgggcaccggggagctggcagcggaggtgctcatccagcaaggtggtttgaagtgtcctgtttgcagctttgtatatggcaccaaatgggagttcaataggcacttgaagaacaaacatggcttgaaggtggtggaaattgatggagaccccaagtgggagacagcaacagaagctcctgaggagccctccacccagtatctccacatcacagaggccgaagaagacgttcaagggacacaggcagcggtggccgcgctccaggacctgagatacacctctgagagtggcgaccgactggaccccacggccgtgaacatcctgcagcagatcattgagctgggcgccgagacccatgacgccactgcccttgcctcggtggttgccatggcaccagggacggtgactgtggttaagcaggtcaccgaggaggagcccagctccaaccacacggtcatgatccaggagacggtccagcaagcgtccgtggagcttgccgagcagcaccacctggtggtgtcctccgacgacgtggagggcattgagacggtgactgtctacacgcagggcggggaggcctcggagttcatcgtctacgtgcaggaggccatgcagcctgtggaggagcaggctgtggagcagccggcccaggaactctagtaatgaactagtccgtaacttgaaagtatttcgatttcttggctttatatatcttgtggaaaggacgatctacgtttcagggtgtagttgac

SEQ ID NO: 636 - DNA, 3647 bp, Homo sapiens
  source 1..3647: mol_type = genomic DNA
accgccaccatggagacgcgggcggcagaaaacacggccatctttatgtgtaaatgttgtaacctcttctcaccaaatcagtcggaactcctctcccacgtttcagagaagcacatggaagaaggggttaatgttgatgagattattattccccttaggcctctgagtacacctgaaccccccaactcaagcaaaaccggagatgagtttttggtcatgaagaggaagagaggcaggcctaaggggtccacgaagaagtccagcacagaagaggagctggcagaaaacatcgtgagtccgactgaggacagcccgctggctccggaggaagggaacagcctgcctccaagcagcttggagtgtagcaagtgctgtcggaagttctccaacacgcgccagctgcggaagcacatctgcattatcgtgctgaatttgggtgaggaggaaggagaagcaggtgctaccaagattgtgccagtggaggctgggccccctgaaacaggagctacaaattctgagaccacttcagcagacctggtgcctcggagaggctaccaggaatacgccattcagcagacaccttatgagcaaccaatgaagtcaagcaggctaggtcccactcagctcaaaatcttcacttgtgaatactgcaacaaggtcttcaagttcaagcactcgctgcaggcccacctgaggatccacaccaatgaaaagccatacaagtgcccccagtgcagctatgccagtgccatcaaggccaacctcaatgtgcacctgcgcaagcacactggagagaagttcgcctgcgactattgctcgttcacctgcctgagcaagggccacctcaaggtgcacatcgagcgagtgcacaagaagatcaagcagcactgccgcttctgcaagaagaagtactctgacgtcaagaacctcatcaagcacatccgagacgcgcatgacccacaggacaagaaggtcaaagaggccttggacgagctctgcctgatgacgagggagggcaagcggcagctgctctatgactgccacatctgtgagcgcaagttcaagaacgagctggaccgtgaccgccatatgctggtccacggagacaagtggccttttgcctgtgagctctgtggccatggggccaccaagtaccaggcgctggaactgcatgtcaggaagcaccccttcgtgtacgtctgtgccgtctgccgcaagaagttcgtcagctccatcaggctgcgcacccacatcaaagaggtgcacggggctgcccaggaggccttggtcttcaccagttccatcaaccagagcttctgcctcctggaacctggtggggacatccagcaagaagctctgggggaccagctacagctggtggaagaggagtttgccctccagggcgtgaatgcactcaaggaagaggcctgtcctggggacactcagctggaggagggccggaaggagccggaggcccctggggaaatgcctgccccagctgtgcacctggcctccccgcaggccgaaagcacagccctgccaccctgtgagctggaaaccaccgtggtctcctcctcagacctgcattctcaagaggtggtttcagatgattttttgttgaaaaatgatacctcctccgcagaggctcatgctgctcctgagaagcccccagacatgcagcacagaagctcagtccagacgcaaggtgaagtgatcacactactgctgtccaaggcccagagtgctgggtcagatcaggaaagccatggcgcccagagccccctaggggaagggcagaacatggctgtgctttcagctggtgacccagatcccagcaggtgtctcaggtcaaacccagctgaggcctcagacctcctccctccagtagctggtggtggggacaccatcacacatcagcctgactcttgcaaagctgcccctgagcaccggtcaggcatcaccgctttcatgaaggtcctgaacagtttacagaagaagcaaatgaacaccagcttgtgtgagcggatccggaaggtttatggagacctggagtgtgaatactgtggcaaacttttttggtaccaagtgcattttgatatgcatgtccgcacccacacccgggaacatctgtattattgctctcagtgtcattattcttccatcaccaaaaactgccttaaacgccacgtaattcagaaacacagtaacatcttgctgaagtgtcccaccgatggctgtgactactcaactccagataaatataagctacaggcacatcttaaagttcacacagcactggacaaaaggagttattcttgtcctgtttgtgaaaagtctttttcagaggatcgattgataaagtcacatatcaagaccaaccatcctgaggtctccatgagcaccatttctgaggttctcgggaggagggttcagctgaaagggctaattggaaagagagccatgaaatgcccatattgtgacttttatttcatgaagaatggctcagaccttcagcgtcatatttgggctcatgaaggtgtgaagcccttcaagtgttctttgtgtgagtatgcaactcgtagcaagagtaacctcaaggctcatatgaatcgtcacagcactgagaaaacccacctatgtgacatgtgtggcaagaaattcaaatcaaaagggacactgaaaagtcacaaactccttcacactgcagatgggaagcagtttaagtgcacggtgtgtgactacacagcggcccagaagccacagctgctgcggcacatggaacagcatgtctccttcaagcctttccgctgtgcccattgccattactcctgcaacatatctggctctctgaagcggcactacaacaggaagcaccctaatgaggagtatgccaacgtgggcaccggggagctggcagcggaggtgctcatccagcaaggtggtttgaagtgtcctgtttgcagctttgtatatggcaccaaatgggagttcaataggcacttgaagaacaaacatggcttgaaggtggtggaaattgatggagaccccaagtgggagacagcaacagaagctcctgaggagccctccacccagtatctccacatcacagaggccgaagaagacgttcaagggacacaggcagcggtggccgcgctccaggacctgagatacacctctgagagtggcgaccgactggaccccacggccgtgaacatcctgcagcagatcattgagctgggcgccgagacccatgacgccactgcccttgcctcggtggttgccatggcaccagggacggtgactgtggttaagcaggtcaccgaggaggagcccagctccaaccacacggtcatgatccaggagacggtccagcaagcgtccgtggagcttgccgagcagcaccacctggtggtgtcctccgacgacgtggagggcattgagacggtgactgtctacacgcagggcggggaggcctcggagttcatcgtctacgtgcaggaggccatgcagcctgtggaggagcaggctgtggagcagccggcccaggaactctagtaatgaactagtccgtaacttgaaagtatttcgatttcttggctttatatatcttgtggaaaggacgatgccacgtcccgcgctcatatatt

SEQ ID NO: 637 - DNA, 1127 bp, Homo sapiens
  source 1..1127: mol_type = genomic DNA
accgccaccatggagccagccttcggggaggtgaaccagctgggaggagtgttcgtgaacgggaggccgctgcccaacgccatccggcttcgcatcgtggaactggcccaactgggcatccgaccgtgtgacatcagccgccagctacgggtctcgcacggctgcgtcagcaagatcctggcgcgatacaacgagacgggctcgatcttgccaggagccatcgggggcagcaagccccgggtcactacccccaccgtggtgaaacacatccggacctacaagcagagagaccccggcatcttcgcctgggagatccgggaccgcctgctggcggacggcgtgtgcgacaagtacaatgtgccctccgtgagctccatcagccgcattctgcgcaacaagatcggcaacttggcccagcagggtcattacgactcatacaagcagcaccagccgacgccgcagccagcgctgccctacaaccacatctactcgtaccccagccctatcacggcggcggccgccaaggtgcccacgccacccggggtgcctgccatccccggttcggtggccatgccgcgcacctggccctcctcgcactccgtcaccgacatcctgggcatccgctccatcaccgaccaagtgagcgacagctccccctaccacagccccaaggtggaggagtggagcagcctgggccgcaacaacttccccgccgccgccccgcacgcggtgaacgggttggagaagggagccctggagcaggaagccaagtacggtcaggcaccaaatggtctcccagctgtgggcagttttgtgtcagcatccagcatggctccttaccctaccccagcccaagtgtcgccttacatgacctacagtgctgctccttctggttatgttgctggacatgggtggcaacatgctgggggcacctcattgtctccccacaactgtgacattccggcatcgctggcgttcaagggaatgcaggcagccagagaaggtagtcattctgtcacggcttccgcgctctagtaatgaactagtccgtaacttgaaagtatttcgatttcttggctttatatatcttgtggaaaggacgaacctggaacttaaacttagaatga

SEQ ID NO: 638 - DNA, 1298 bp, Homo sapiens
  source 1..1298: mol_type = genomic DNA
accgccaccatgcctcacaactccatcagatctggccatggagggctgaaccagctgggaggggcctttgtgaatggcagacctctgccggaagtggtccgccagcgcatcgtagacctggcccaccagggtgtaaggccctgcgacatctctcgccagctccgcgtcagccatggctgcgtcagcaagatccttggcaggtactacgagactggcagcatccggcctggagtgatagggggctccaagcccaaggtggccacccccaaggtggtggagaagattggggactacaaacgccagaaccctaccatgtttgcctgggagatccgagaccggctcctggctgagggcgtctgtgacaatgacactgtgcccagtgtcagctccattaatagaatcatccggaccaaagtgcagcaaccattcaacctccctatggacagctgcgtggccaccaagtccctgagtcccggacacacgctgatccccagctcagctgtaactcccccggagtcaccccagtcggattccctgggctccacctactccatcaatgggctcctgggcatcgctcagcctggcagcgacaagaggaaaatggatgacagtgatcaggatagctgccgactaagcattgactcacagagcagcagcagcggaccccgaaagcaccttcgcacggatgccttcagccagcaccacctcgagccgctcgagtgcccatttgagcggcagcactacccagaggcctatgcctcccccagccacaccaaaggcgagcagggcctctacccgctgcccttgctcaacagcaccctggacgacgggaaggccaccctgaccccttccaacacgccactggggcgcaacctctcgactcaccagacctaccccgtggtggcagctccgcctttttggatctgcagcaagtcggctccggggtcccgcccttcaatgcctttccccatgctgcctccgtgtacgggcagttcacgggccaggccctcctctcagggcgagagatggtggggcccacgctgcccggatacccaccccacatccccaccagcggacagggcagctatgcctcctctgccatcgcaggcatggtggcaggaagtgaatactctggcaatgcctatggccacaccccctactcctcctacagcgaggcctggcgcttccccaactccagcttgctagtaatgaactagtccgtaacttgaaagtatttcgatttcttggctttatatatcttgtggaaaggacgaactattataacatttgaaactgag

SEQ ID NO: 639 - DNA, 965 bp, Homo sapiens
  source 1..965: mol_type = genomic DNA
accgccaccatgcctcacaactccatcagatctggccatggagggctgaaccagctgggaggggcctttgtgaatggcagacctctgccggaagtggtccgccagcgcatcgtagacctggcccaccagggtgtaaggccctgcgacatctctcgccagctccgcgtcagccatggctgcgtcagcaagatccttggcaggtactacgagactggcagcatccggcctggagtgatagggggctccaagcccaaggtggccacccccaaggtggtggagaagattggggactacaaacgccagaaccctaccatgtttgcctgggagatccgagaccggctcctggctgagggcgtctgtgacaatgacactgtgcccagtgtcagctccattaatagaatcatccggaccaaagtgcagcaaccattcaacctccctatggacagctgcgtggccaccaagtccctgagtcccggacacacgctgatccccagctcagctgtaactcccccggagtcaccccagtcggattccctgggctccacctactccatcaatgggctcctgggcatcgctcagcctggcagcgacaagaggaaaatggatgacagtgatcaggatagctgccgactaagcattgactcacagagcagcagcagcggaccccgaaagcaccttcgcacggatgccttcagccagcaccacctcgagccgctcgagtgcccatttgagcggcagcactacccagaggcctatgcctcccccagccacaccaaaggcgagcaggaagtgaatactctggcaatgcctatggccacaccccctactcctcctacagcgaggcctggcgcttccccaactccagcttgctagtaatgaactagtccgtaacttgaaagtatttcgatttcttggctttatatatcttgtggaaaggacgattctttaggcatagccgtaacccg

SEQ ID NO: 640 - DNA, 1067 bp, Homo sapiens
  source 1..1067: mol_type = genomic DNA
accgccaccatgcctcacaactccatcagatctggccatggagggctgaaccagctgggaggggcctttgtgaatggcagacctctgccggaagtggtccgccagcgcatcgtagacctggcccaccagggtgtaaggccctgcgacatctctcgccagctccgcgtcagccatggctgcgtcagcaagatccttggcaggtactacgagactggcagcatccggcctggagtgatagggggctccaagcccaaggtggccacccccaaggtggtggagaagattggggactacaaacgccagaaccctaccatgtttgcctgggagatccgagaccggctcctggctgagggcgtctgtgacaatgacactgtgcccagtgtcagctccattaatagaatcatccggaccaaagtgcagcaaccattcaacctccctatggacagctgcgtggccaccaagtccctgagtcccggacacacgctgatccccagctcagctgtaactcccccggagtcaccccagtcggattccctgggctccacctactccatcaatgggctcctgggcatcgctcagcctggcagcgacaagaggaaaatggatgacagtgatcaggatagctgccgactaagcattgactcacagagcagcagcagcggaccccgaaagcaccttcgcacggatgccttcagccagcaccacctcgagccgctcgagtgcccatttgagcggcagcactacccagaggcctatgcctcccccagccacaccaaaggcgagcagggcgagagatggtggggcccacgctgcccggatacccaccccacatccccaccagcggacagggcagctatgcctcctctgccatcgcaggcatggtggcaggaagtgaatactctggcaatgcctatggccacaccccctactcctcctacagcgaggcctggcgcttccccaactccagcttgctagtaatgaactagtccgtaacttgaaagtatttcgatttcttggctttatatatcttgtggaaaggacgactgtcctggcatagaacagtagaa

SEQ ID NO: 641 - DNA, 2219 bp, Homo sapiens
  source 1..2219: mol_type = genomic DNA
accgccaccatgttacgtgaggaagcagctcagaagaggaaaggaaaggagccaggcatggctcttcctcagggacgcttgactttccgggatgtggctatagaattctcattggcagagtggaaatgcctgaacccttcacagagggctttgtacagggaagtgatgttggagaactacaggaacctggaggctgtggatatctcttccaaatgcatgatgaaggaggtcttgtcaacagggcaaggcaatacagaagtgatccacacagggacattgcaaagacatgaaagtcatcacattggagatttttgcttccaggaaattgagaaagaaattcatgacattgagtttcagtgtcaagaagatgaaagaaatggccttgaagcacccatgacaaaaataaaaaagttgactggtagcacagaccaacatgatcacaggcatgctggaaacaagcctattaaagatcagcttggatcaagcttttattcacatctgcctgaactccacatatttcagatcaaaggtgaaattggtaatcaacttgagaagtctactaatgatgctccctcagtttcaacattccaaagaatttcctgtaggccccaaacccagatttctaataactatgggaataatcccctgaattcttcattactcccacaaaaacaggaagtacacatgagagaaaaatctttccaatgtaataagagtggcaaagcctttaattgtagctcactcttaaggaaacaccagataccccatttaggagacaaacaatataaatgtgatgtatgtggcaagctctttaatcacgagcaataccttgcatgccatgatagatgtcacactgttgagaaaccttacaagtgtaaagagtgtggcaagaccttcagtcaggagtcatcccttacctgccatcgtagacttcatactggagtaaaacgttacaattgtaatgagtgtggcaagatctttggtcaaaattcagcccttctaattgataaggcaattgatactggagaaaatccttacaagtgtaatgaatgtgacaaggcttttaatcaacaatcacaactttcacatcatagaattcatactggagagaaaccttacaaatgtgaagaatgtgacaaagttttcagtcggaaatcaaccattgagacacataagagaattcatactggagagaaaccatacagatgtaaggtttgtgacacagctttcacgtggcattcacagctggctcgacatagaagaattcatactgcaaagaaaacttataaatgtaatgagtgtggcaagaccttcagtcacaagtcatcccttgtatgccatcatagacttcatggtggagagaaatcttacaaatgtaaggtttgtgacaaggcttttgtgtggagttcacaactggcaaaacatactagaattgactgtggagaaaaaccttacaagtgtaatgaatgtgggaagacctttggtcaaaattcagatcttttaattcataagtcaattcatactggggagcaaccttacaaatgtgatgaatgtgaaaaggttttcagtcgtaaatcaagccttgagacacataagataggtcatactggagagaaaccatacaaatgtaaggtttgtgacaaggcttttgcgtgtcattcctatctggcaaaacatactagaattcatagtggagagaaaccttacaagtgtaatgagtgcagcaagaccttcagtcacaggtcataccttgtatgccatcatagagttcatagtggtgagaaaccttacaagtgtaatgagtgcagcaagaccttcagtcgcaggtcatcccttcattgccatcgtagacttcatagtggtgagaaaccttacaagtgtaatgagtgtggcaataccttccgtcactgctcatcccttatataccatcgtagacttcatactggagagaaatcttacaaatgtacaatttgtgacaaggctttcgtgcgtaattcactcctgtcaagacataccagaattcacactgcagagaaaccttacaagtgtaatgaatgtgggaaggcttttaatcaacaatcacacctttcacgtcatcatagaattcatactggagagaaaccttagtaatgaactagtccgtaacttgaaagtatttcgatttcttggctttatatatcttgtggaaaggacgagccgcgggcgggccagtgagtcag

SEQ ID NO: 642 - DNA, 2012 bp, Homo sapiens
  source 1..2012: mol_type = genomic DNA
accgccaccatgatgaaggaggtcttgtcaacagggcaaggcaatacagaagtgatccacacagggacattgcaaagacatgaaagtcatcacattggagatttttgcttccaggaaattgagaaagaaattcatgacattgagtttcagtgtcaagaagatgaaagaaatggccttgaagcacccatgacaaaaataaaaaagttgactggtagcacagaccaacatgatcacaggcatgctggaaacaagcctattaaagatcagcttggatcaagcttttattcacatctgcctgaactccacatatttcagatcaaaggtgaaattggtaatcaacttgagaagtctactaatgatgctccctcagtttcaacattccaaagaatttcctgtaggccccaaacccagatttctaataactatgggaataatcccctgaattcttcattactcccacaaaaacaggaagtacacatgagagaaaaatctttccaatgtaataagagtggcaaagcctttaattgtagctcactcttaaggaaacaccagataccccatttaggagacaaacaatataaatgtgatgtatgtggcaagctctttaatcacgagcaataccttgcatgccatgatagatgtcacactgttgagaaaccttacaagtgtaaagagtgtggcaagaccttcagtcaggagtcatcccttacctgccatcgtagacttcatactggagtaaaacgttacaattgtaatgagtgtggcaagatctttggtcaaaattcagcccttctaattgataaggcaattgatactggagaaaatccttacaagtgtaatgaatgtgacaaggcttttaatcaacaatcacaactttcacatcatagaattcatactggagagaaaccttacaaatgtgaagaatgtgacaaagttttcagtcggaaatcaaccattgagacacataagagaattcatactggagagaaaccatacagatgtaaggtttgtgacacagctttcacgtggcattcacagctggctcgacatagaagaattcatactgcaaagaaaacttataaatgtaatgagtgtggcaagaccttcagtcacaagtcatcccttgtatgccatcatagacttcatggtggagagaaatcttacaaatgtaaggtttgtgacaaggcttttgtgtggagttcacaactggcaaaacatactagaattgactgtggagaaaaaccttacaagtgtaatgaatgtgggaagacctttggtcaaaattcagatcttttaattcataagtcaattcatactggggagcaaccttacaaatgtgatgaatgtgaaaaggttttcagtcgtaaatcaagccttgagacacataagataggtcatactggagagaaaccatacaaatgtaaggtttgtgacaaggcttttgcgtgtcattcctatctggcaaaacatactagaattcatagtggagagaaaccttacaagtgtaatgagtgcagcaagaccttcagtcacaggtcataccttgtatgccatcatagagttcatagtggtgagaaaccttacaagtgtaatgagtgcagcaagaccttcagtcgcaggtcatcccttcattgccatcgtagacttcatagtggtgagaaaccttacaagtgtaatgagtgtggcaataccttccgtcactgctcatcccttatataccatcgtagacttcatactggagagaaatcttacaaatgtacaatttgtgacaaggctttcgtgcgtaattcactcctgtcaagacataccagaattcacactgcagagaaaccttacaagtgtaatgaatgtgggaaggcttttaatcaacaatcacacctttcacgtcatcatagaattcatactggagagaaaccttagtaatgaactagtccgtaacttgaaagtatttcgatttcttggctttatatatcttgtggaaaggacgaaatgatgacctcttctatgacatg

SEQ ID NO: 643 - DNA, 1361 bp, Homo sapiens
  source 1..1361: mol_type = genomic DNA
accgccaccatgctatgtgatgaagaagcccagaagaggaaagcaaaggagtcagggatggctcttcctcagggacgcttgacattcatggacgtggccatcgaattctctcaggaggagtggaaatccctggaccctggacagagggctttatacagggacgtgatgttggagaactacaggaacctggtctttctggggaggagctgtgtattgggaagcaatgcagaaaacaagcctattaaaaatcaacttggattaacccttgaggcacatctgtctgaattgcagctgtttcaagccggaaggaaaatttacagaagtaatcaagttgaaaagtttacaaaccatcgttcctcagtttcaccacttcaaaaaatttcttctagtttcacaacacacatttttaataaatatagaaatgatcttattgatttcccattactcccacaagaagagaaagcatacattagaggaaaatcttatgaatatgaatgtagtgaagatggtgaagtttttagagtccgtgcaagccttactaaccatcaagtaatccatactgcagagaaaccttacaaatgtactgaatgtggcaaggtcttcagtcgcaattcacaccttgtagaacattggagaattcatactggacagaagccttacaaatgtagtgaatgtgacaaggtgtttaatcgcaattcaaaccttgcacgacatcaaagaattcatactggagagaagcctcacaaatgtaacgaatgtggcaaagcttttagagagtgttcgggacttactacccatcttgtaatccatactggagagaaaccttacaaatgtaatgagtgtggcaagaacttcaggcacaaattttctctaaccaatcatcagagaagtcacacggcggaaaaaccttacaaatgtaatgaatgtggcaaggtctttagtctgctttcataccttgcacggcatcaaataattcatagtacagagaagccctacaaatgtaacgaatgtggaagagcatttcacaagcgtccgggccttatggcccatcttctaatccatactggagagaaaccttacaaatgtaatgaatgtgacaaagtctttgggcgcaaattatacctaaccaaccatcagagaattcatactggagagagaccttacaagtgtaatgcatgtggcaaggtcttcaatcaaaatccacacctttcacgacatcggaaaattcatgctggagagaattcactgcgtaccttacagatggaatagtaatgaactagtccgtaacttgaaagtatttcgatttcttggctttatatatcttgtggaaaggacgatggaagacaatactgttactttga

SEQ ID NO: 644 - DNA, 1490 bp, Homo sapiens
  source 1..1490: mol_type = genomic DNA
accgccaccatgctatgtgatgaagaagcccagaagaggaaagcaaaggagtcagggatggctcttcctcagggacgcttgacattcatggacgtggccatcgaattctctcaggaggagtggaaatccctggaccctggacagagggctttatacagggacgtgatgttggagaactacaggaacctggtctttctgggaatctgtcttcctgacctaagtattatttccatgttgaagcaaaggagagagcccttgattctgcaaagtcaagttaaaatagtaaaaaatacagatggaagggaatgtgtcagaagcgtgaacacagggaggagctgtgtattgggaagcaatgcagaaaacaagcctattaaaaatcaacttggattaacccttgaggcacatctgtctgaattgcagctgtttcaagccggaaggaaaatttacagaagtaatcaagttgaaaagtttacaaaccatcgttcctcagtttcaccacttcaaaaaatttcttctagtttcacaacacacatttttaataaatatagaaatgatcttattgatttcccattactcccacaagaagagaaagcatacattagaggaaaatcttatgaatatgaatgtagtgaagatggtgaagtttttagagtccgtgcaagccttactaaccatcaagtaatccatactgcagagaaaccttacaaatgtactgaatgtggcaaggtcttcagtcgcaattcacaccttgtagaacattggagaattcatactggacagaagccttacaaatgtagtgaatgtgacaaggtgtttaatcgcaattcaaaccttgcacgacatcaaagaattcatactggagagaagcctcacaaatgtaacgaatgtggcaaagcttttagagagtgttcgggacttactacccatcttgtaatccatactggagagaaaccttacaaatgtaatgagtgtggcaagaacttcaggcacaaattttctctaaccaatcatcagagaagtcacacggcggaaaaaccttacaaatgtaatgaatgtggcaaggtctttagtctgctttcataccttgcacggcatcaaataattcatagtacagagaagccctacaaatgtaacgaatgtggaagagcatttcacaagcgtccgggccttatggcccatcttctaatccatactggagagaaaccttacaaatgtaatgaatgtgacaaagtctttgggcgcaaattatacctaaccaaccatcagagaattcatactggagagagaccttacaagtgtaatgcatgtggcaaggtcttcaatcaaaatccacacctttcacgacatcggaaaattcatgctggagagaattcactgcgtaccttacagatggaatagtaatgaactagtccgtaacttgaaagtatttcgatttcttggctttatatatcttgtggaaaggacgaacggaattggtgactcctataaat

SEQ ID NO: 645 - DNA, 1847 bp, Homo sapiens
  source 1..1847: mol_type = genomic DNA
accgccaccatgttggagaactatagcaacctcgtgtcagtggggtatcaagccagcaaaccagatgcactcttcaagttggaacaaggagagccatggacagtagaaaatgaaatccacagccaaatctgtccagaaatcaagaaagttgacaatcatctacagatgcactcacaaaagcaaagatgtctgaagagagtggaacaatgccataaacataatgcatttggaaacatcattcatcagaggaaaagtgattttcctttaaggcaaaatcatgatacatttgacttacatgggaaaatactgaaatcaaatttaagtttagtcaaccagaacaaaaggtatgaaatcaagaattctgtgggggttaatggagatgggaaatccttccttcatgccaagcatgaacaatttcataatgaaatgaacttccccgaaggtggaaattctgtgaatacaaattcacaattcattaagcatcagcgaactcaaaacatagataaaccccatgtatgcactgagtgtgggaaggctttcctcaagaagtctcgcctcatctatcatcagagagttcacactggggagaaacctcatggatgcagtatatgtgggaaagccttctccagaaagtccgggctcactgaacaccagagaaaccacacaggagagaaaccctatgaatgcactgaatgtgacaaagcattccgctggaaatcacagctcaatgcacaccagaaaattcatacaggagagaagtcatatatatgcagtgattgtggaaaaggcttcatcaagaagtctcggctcattaatcatcagagagttcatacaggagagaaaccacatggatgcagcctgtgtgggaaggccttctccaaaaggtccaggctcactgaacaccagagaactcatacaggagagaaaccctatgaatgcactgaatgtgacaaagcattccgctggaaatcacagctcaatgcacatcagaaagctcacacaggagagaagtcatatatatgccgtgattgtggaaaaggcttcattcagaagggaaatctcattgtacatcagcgaattcatactggagaaaaaccctatatatgcaatgaatgtggaaaaggcttcatccaaaagggcaacctccttattcatcgacgtactcacactggagagaaaccctatgtatgcaatgaatgtgggaaaggcttcagccagaagacatgtttaatatcccatcagagatttcacacaggaaagacaccctttgtatgtactgagtgtggaaaatcctgctcacacaagtcaggtctcattaaccaccagagaattcacacaggagagaaaccctatacatgcagtgactgtgggaaagctttcagagataaatcatgtctcaacagacatcggagaactcatacaggggagagaccgtatggatgctctgattgtgggaaagctttctcccacttgtcatgccttgtttatcataagggaatgctgcatgcaagagagaaatgtgtaggttcagtcaaattggaaaatccttgctcagagagtcatagcttatcacatacacgtgatctcatacaggataaagactctgttaacatggtgactctgcagatgccttctgtggcagctcagacctcattaactaacagtgcgttccaagcagagagcaaagtagccattgtgagccagcctgttgccagaagttcagtctcagcagatagtagaatttgcacagaatagtaatgaactagtccgtaacttgaaagtatttcgatttcttggctttatatatcttgtggaaaggacgacgagccaaaccctcggacgtaata

SEQ ID NO: 646 - DNA, 1955 bp, Homo sapiens
  source 1..1955: mol_type = genomic DNA
accgccaccatgatcaagtcccaggaatcactgaccctggaggatgtggctgtggagttcacttgggaggagtggcagctcctcggccctgctcagaaggacctgtaccgagacgtgatgttggagaactatagcaacctcgtgtcagtggggtatcaagccagcaaaccagatgcactcttcaagttggaacaaggagagccatggacagtagaaaatgaaatccacagccaaatctgtccagaaatcaagaaagttgacaatcatctacagatgcactcacaaaagcaaagatgtctgaagagagtggaacaatgccataaacataatgcatttggaaacatcattcatcagaggaaaagtgattttcctttaaggcaaaatcatgatacatttgacttacatgggaaaatactgaaatcaaatttaagtttagtcaaccagaacaaaaggtatgaaatcaagaattctgtgggggttaatggagatgggaaatccttccttcatgccaagcatgaacaatttcataatgaaatgaacttccccgaaggtggaaattctgtgaatacaaattcacaattcattaagcatcagcgaactcaaaacatagataaaccccatgtatgcactgagtgtgggaaggctttcctcaagaagtctcgcctcatctatcatcagagagttcacactggggagaaacctcatggatgcagtatatgtgggaaagccttctccagaaagtccgggctcactgaacaccagagaaaccacacaggagagaaaccctatgaatgcactgaatgtgacaaagcattccgctggaaatcacagctcaatgcacaccagaaaattcatacaggagagaagtcatatatatgcagtgattgtggaaaaggcttcatcaagaagtctcggctcattaatcatcagagagttcatacaggagagaaaccacatggatgcagcctgtgtgggaaggccttctccaaaaggtccaggctcactgaacaccagagaactcatacaggagagaaaccctatgaatgcactgaatgtgacaaagcattccgctggaaatcacagctcaatgcacatcagaaagctcacacaggagagaagtcatatatatgccgtgattgtggaaaaggcttcattcagaagggaaatctcattgtacatcagcgaattcatactggagaaaaaccctatatatgcaatgaatgtggaaaaggcttcatccaaaagggcaacctccttattcatcgacgtactcacactggagagaaaccctatgtatgcaatgaatgtgggaaaggcttcagccagaagacatgtttaatatcccatcagagatttcacacaggaaagacaccctttgtatgtactgagtgtggaaaatcctgctcacacaagtcaggtctcattaaccaccagagaattcacacaggagagaaaccctatacatgcagtgactgtgggaaagctttcagagataaatcatgtctcaacagacatcggagaactcatacaggggagagaccgtatggatgctctgattgtgggaaagctttctcccacttgtcatgccttgtttatcataagggaatgctgcatgcaagagagaaatgtgtaggttcagtcaaattggaaaatccttgctcagagagtcatagcttatcacatacacgtgatctcatacaggataaagactctgttaacatggtgactctgcagatgccttctgtggcagctcagacctcattaactaacagtgcgttccaagcagagagcaaagtagccattgtgagccagcctgttgccagaagttcagtctcagcagatagtagaatttgcacagaatagtaatgaactagtccgtaacttgaaagtatttcgatttcttggctttatatatcttgtggaaaggacgaatggcgatatcaagtgcttaggat

SEQ ID NO: 647 - DNA, 2330 bp, Homo sapiens
  source 1..2330: mol_type = genomic DNA
accgccaccatgatgcaggcccaggaatccctaacactggaggatgtggctgtggacttcacctgggaggagtggcagttcctgagccctgctcagaaggacctgtaccgggacgtgatgttggagaactacagcaacctggtggcagtggggtatcaagccagcaaaccagatgcactctccaaattggaacgaggagaagaaacttgcacaacagaagatgaaatctactctcgaatctgttctgattcaggaggtgcatcaggaggtgcatatgcagaaatcaggaaaattgatgatcctctgcagcatcacttgcaaaatcaaagtattcagaagagtgtgaaacagtgccatgaacagaatatgtttggaaatattgttaatcagaacaaaggtcatttcctgctgaagcaagattgtgatacgtttgacttacatgaaaaacctttaaaatcaaatttaagttttgaaaaccagaaaaggagctctggcctaaagaactctgctgagtttaatagagatgggaaatccctttttcatgctaaccataaacaattttatactgaaatgaagtttcctgcaattgcaaaacctattaataagtcccagttcattaagcaacagagaactcacaacatagagaatgcccatgtatgcagtgaatgtgggaaagccttcctcaagttgtctcagtttattgatcatcagagagttcacactggagaaaaacctcatgtatgcagtatgtgtgggaaagctttctccagaaaatccagactaatggaccatcagagaactcatacagaactgaaacattatgaatgcactgaatgtgacaaaaccttcctcaagaaatcacagctcaatatacatcagaaaactcatatgggagggaaaccttacacatgtagccaatgtgggaaagccttcatcaagaagtgtcggctcatttatcatcaacgaactcatacaggagagaaaccccatggatgcagtgtatgtgggaaggccttctctacaaagttcagtctcactacacatcagaaaactcatacaggagaaaaaccttatatatgtagtgaatgtggaaaaggcttcattgagaagaggcgtcttactgcacatcatcgaactcatactggtgagaaaccctttatatgcaataaatgtgggaaaggcttcaccttgaagaacagtcttatcacacatcagcaaactcatacaggagagaaattatatacatgtagtgaatgtggaaaaggcttttcaatgaagcactgtctcatggtacatcaacgaactcatactggagagaaaccttataaatgcaatgagtgtggaaagggcttcgctttgaagagcccactcatcagacatcagcgaacacatactggagagaaaccctatgtatgcaccgaatgtcgaaaaggtttcaccatgaagagtgacctcattgtacatcagcgaactcatactgcagagaagccatatatatgcaatgattgtggaaaaggcttcactgtgaagagccgccttattgtgcatcagcgaactcatactggagaaaaaccctatgtatgtggtgagtgtggaaaaggctttccagcaaagatccggctaatgggacatcaacgaactcatacaggagagaaaccttatatttgcaatgagtgtggaaaaggcttcactgagaagagtcatctcaatgtacatcggcgcactcatacaggagagaaaccctatgtatgcagtgaatgtggcaaaggcttaactgggaaaagcatgctcattgcacatcagcgaactcatactggggagaaaccttatatatgcaatgaatgtggaaagggcttcaccatgaagagtactctcagtatacatcagcaaactcatactggagagaagccatacaaatgcaatgaatgtgataaaaccttcaggaagaagacatgcctcatacaacatcagcgatttcacacaggaaagacttcctttgcatgtactgaatgtggaaaattctctttgcgcaaaaatgatcttattacacatcagagaattcacacaggagagaaaccgtacaaatgcagtgactgcgggaaagccttcactacaaaatcagggctcaatgttcatcaaagaaaacatacaggagagaggccctatggatgtagtgattgtgggaaagcttttgcgcacttgtctatccttgttaaacacaggagaattcacaggtagtaatgaactagtccgtaacttgaaagtatttcgatttcttggctttatatatcttgtggaaaggacgatctgacgcataggccctatgtgat

SEQ ID NO: 648 - DNA, 2312 bp, Homo sapiens
  source 1..2312: mol_type = genomic DNA
accgccaccatgaggccggagcccaccaagttctgggaagaatccctaacactggaggatgtggctgtggacttcacctgggaggagtggcagttcctgagccctgctcagaaggacctgtaccgggacgtgatgttggagaactacagcaacctggtggcagtggggtatcaagccagcaaaccagatgcactctccaaattggaacgaggagaagaaacttgcacaacagaagatgaaatctactctcgaatctgttctgaaatcaggaaaattgatgatcctctgcagcatcacttgcaaaatcaaagtattcagaagagtgtgaaacagtgccatgaacagaatatgtttggaaatattgttaatcagaacaaaggtcatttcctgctgaagcaagattgtgatacgtttgacttacatgaaaaacctttaaaatcaaatttaagttttgaaaaccagaaaaggagctctggcctaaagaactctgctgagtttaatagagatgggaaatccctttttcatgctaaccataaacaattttatactgaaatgaagtttcctgcaattgcaaaacctattaataagtcccagttcattaagcaacagagaactcacaacatagagaatgcccatgtatgcagtgaatgtgggaaagccttcctcaagttgtctcagtttattgatcatcagagagttcacactggagaaaaacctcatgtatgcagtatgtgtgggaaagctttctccagaaaatccagactaatggaccatcagagaactcatacagaactgaaacattatgaatgcactgaatgtgacaaaaccttcctcaagaaatcacagctcaatatacatcagaaaactcatatgggagggaaaccttacacatgtagccaatgtgggaaagccttcatcaagaagtgtcggctcatttatcatcaacgaactcatacaggagagaaaccccatggatgcagtgtatgtgggaaggccttctctacaaagttcagtctcactacacatcagaaaactcatacaggagaaaaaccttatatatgtagtgaatgtggaaaaggcttcattgagaagaggcgtcttactgcacatcatcgaactcatactggtgagaaaccctttatatgcaataaatgtgggaaaggcttcaccttgaagaacagtcttatcacacatcagcaaactcatacaggagagaaattatatacatgtagtgaatgtggaaaaggcttttcaatgaagcactgtctcatggtacatcaacgaactcatactggagagaaaccttataaatgcaatgagtgtggaaagggcttcgctttgaagagcccactcatcagacatcagcgaacacatactggagagaaaccctatgtatgcaccgaatgtcgaaaaggtttcaccatgaagagtgacctcattgtacatcagcgaactcatactgcagagaagccatatatatgcaatgattgtggaaaaggcttcactgtgaagagccgccttattgtgcatcagcgaactcatactggagaaaaaccctatgtatgtggtgagtgtggaaaaggctttccagcaaagatccggctaatgggacatcaacgaactcatacaggagagaaaccttatatttgcaatgagtgtggaaaaggcttcactgagaagagtcatctcaatgtacatcggcgcactcatacaggagagaaaccctatgtatgcagtgaatgtggcaaaggcttaactgggaaaagcatgctcattgcacatcagcgaactcatactggggagaaaccttatatatgcaatgaatgtggaaagggcttcaccatgaagagtactctcagtatacatcagcaaactcatactggagagaagccatacaaatgcaatgaatgtgataaaaccttcaggaagaagacatgcctcatacaacatcagcgatttcacacaggaaagacttcctttgcatgtactgaatgtggaaaattctctttgcgcaaaaatgatcttattacacatcagagaattcacacaggagagaaaccgtacaaatgcagtgactgcgggaaagccttcactacaaaatcagggctcaatgttcatcaaagaaaacatacaggagagaggccctatggatgtagtgattgtgggaaagcttttgcgcacttgtctatccttgttaaacacaggagaattcacaggtagtaatgaactagtccgtaacttgaaagtatttcgatttcttggctttatatatcttgtggaaaggacgagtctcgcagactgcgcaagagtcg

SEQ ID NO: 649 - DNA, 2297 bp, Homo sapiens
  source 1..2297: mol_type = genomic DNA
accgccaccatgatgcaggcccaggaatccctaacactggaggatgtggctgtggacttcacctgggaggagtggcagttcctgagccctgctcagaaggacctgtaccgggacgtgatgttggagaactacagcaacctggtggcagtggggtatcaagccagcaaaccagatgcactctccaaattggaacgaggagaagaaacttgcacaacagaagatgaaatctactctcgaatctgttctgaaatcaggaaaattgatgatcctctgcagcatcacttgcaaaatcaaagtattcagaagagtgtgaaacagtgccatgaacagaatatgtttggaaatattgttaatcagaacaaaggtcatttcctgctgaagcaagattgtgatacgtttgacttacatgaaaaacctttaaaatcaaatttaagttttgaaaaccagaaaaggagctctggcctaaagaactctgctgagtttaatagagatgggaaatccctttttcatgctaaccataaacaattttatactgaaatgaagtttcctgcaattgcaaaacctattaataagtcccagttcattaagcaacagagaactcacaacatagagaatgcccatgtatgcagtgaatgtgggaaagccttcctcaagttgtctcagtttattgatcatcagagagttcacactggagaaaaacctcatgtatgcagtatgtgtgggaaagctttctccagaaaatccagactaatggaccatcagagaactcatacagaactgaaacattatgaatgcactgaatgtgacaaaaccttcctcaagaaatcacagctcaatatacatcagaaaactcatatgggagggaaaccttacacatgtagccaatgtgggaaagccttcatcaagaagtgtcggctcatttatcatcaacgaactcatacaggagagaaaccccatggatgcagtgtatgtgggaaggccttctctacaaagttcagtctcactacacatcagaaaactcatacaggagaaaaaccttatatatgtagtgaatgtggaaaaggcttcattgagaagaggcgtcttactgcacatcatcgaactcatactggtgagaaaccctttatatgcaataaatgtgggaaaggcttcaccttgaagaacagtcttatcacacatcagcaaactcatacaggagagaaattatatacatgtagtgaatgtggaaaaggcttttcaatgaagcactgtctcatggtacatcaacgaactcatactggagagaaaccttataaatgcaatgagtgtggaaagggcttcgctttgaagagcccactcatcagacatcagcgaacacatactggagagaaaccctatgtatgcaccgaatgtcgaaaaggtttcaccatgaagagtgacctcattgtacatcagcgaactcatactgcagagaagccatatatatgcaatgattgtggaaaaggcttcactgtgaagagccgccttattgtgcatcagcgaactcatactggagaaaaaccctatgtatgtggtgagtgtggaaaaggctttccagcaaagatccggctaatgggacatcaacgaactcatacaggagagaaaccttatatttgcaatgagtgtggaaaaggcttcactgagaagagtcatctcaatgtacatcggcgcactcatacaggagagaaaccctatgtatgcagtgaatgtggcaaaggcttaactgggaaaagcatgctcattgcacatcagcgaactcatactggggagaaaccttatatatgcaatgaatgtggaaagggcttcaccatgaagagtactctcagtatacatcagcaaactcatactggagagaagccatacaaatgcaatgaatgtgataaaaccttcaggaagaagacatgcctcatacaacatcagcgatttcacacaggaaagacttcctttgcatgtactgaatgtggaaaattctctttgcgcaaaaatgatcttattacacatcagagaattcacacaggagagaaaccgtacaaatgcagtgactgcgggaaagccttcactacaaaatcagggctcaatgttcatcaaagaaaacatacaggagagaggccctatggatgtagtgattgtgggaaagcttttgcgcacttgtctatccttgttaaacacaggagaattcacaggtagtaatgaactagtccgtaacttgaaagtatttcgatttcttggctttatatatcttgtggaaaggacgatggcagggtatgatctaggaatat

SEQ ID NO: 650 - DNA, 1859 bp, Homo sapiens
  source 1..1859: mol_type = genomic DNA
accgccaccatgatcaagacccaggaatcactgaccctggaggatgtggctgtggaattcagctgggaggagtggcagctcctggacactgctcagaagaacctgtaccgggatgtgatggtggagaactataaccacctagtatcactggggtatcaaactagcaaaccagatgtactctccaagttggcacatggacaagaaccatggacaacagatgctaaaattcagaataaaaattgtccaggaatcgggaaagttgacagtcatctgcaagagcactctccaaaccaaagacttctgaagagcgtgcagcaatgcaatggacagaatacacttagaaatattgtacatctcagcaagacacattttcctatagtgcaaaatcatgatacatttgacttgtacagaaaaaatttgaaatcaagtttaagtttaatcaaccagaagagaagacatggaataaataaccctgttgagtttattggaggtgagaaaacacttctacatggtaagcatgaacgtacgcatactaaaactagattttctgaaaatgcaaaatgtatccatactaaattccaagtcttcaagcatcagaggactcagaaaattgagaaaccccatgcatgcattgaatgtgagcaaaccttccttaggaagtctcagctcatttaccatgagaacatttgtatacaagagaatcctggaagtggtcaatgtgagaaattatccagaagtgtcctgttcactaagcatctgaaaactaatacaacagacaaaatctgtatacccaatgaatatagaaaaggctctactgtgaagagtagtctcattacacatcaacaaacccatacagaagagaaatcctatatgtgcagtgagtgtggaaagggctttacaatgaagcgctatctaattgctcatcagcgaactcatagtggagagaaaccttatgtgtgcaaagaatgtggaaaaggtttcactgtgaagagcaatctcattgtacatcagcgaactcatacaggggagaaaccctatatatgcagtgaatgtggaaaaggcttcaccatgaagcgctatcttgttgtacatcagcgaactcatactggagagaaaccctatatgtgcagtgaatgtggaaaaggctttaccgtgaagagcaatctcattgtacatcagcgctcccacacaggagaaaaatcttacatatgcagcgaatgtggaaaaggcttcactgtcaaacgcactctcgttatacatcagcgaactcatacaggagagaaatcttacatatgcaatgaatgtggtaaaggcttcaccacaaagcgcactcttattatacatcagcgaactcatacaggagaaaaaccctatgaatgcaatgaatgtggtaaagccttcagccagaaaatatgcctcatacaacatgagagatgtcatacaggaaagactccctttgtatgtaccgagtgcggaaaatcctattcacacaaatatggcctcattacccatcagagaattcacacaggagagaaaccttatgagtgcaatgaatgtggaaaagccttcaccacaaagtcagtactcaatgtacatcaaagaacgcatacaggagagaggccgtatggatgcagtgattgtgagaaagccttctcccacttatcaaaccttgtcaaacataagaaaatgcacacaagagaaatgggtagaatcagtcaagttgaaaactcctgtaatggagagtcacagctccttccttataagtagtaatgaactagtccgtaacttgaaagtatttcgatttcttggctttatatatcttgtggaaaggacgaactgacacaagtctttcacataga

SEQ ID NO: 651 - DNA, 2447 bp, Homo sapiens
  source 1..2447: mol_type = genomic DNA
accgccaccatggctactcaggggcatttgacattcaaggatgtagccatagaattctctcaggaggagtggaaatgcctggagcctgtgcagaaagctttgtacaaggatgtgatgttggagaactataggaacctggtcttcctaggtatctctcctaaatgtgtgatcaaggaattaccaccaacagagaacagtaatacaggagaaaggttccaaacagtggcactggaaagacatcaaagctatgatattgaaaatttatacttcagggaaatacagaaacatctacatgaccttgaatttcaatggaaagatggtgaaacaaatgataaagaagtgccagtgccccatgaaaacaatcttactggtaaaagagatcaacatagtcaaggggatgtagaaaacaatcatattgaaaaccagcttacatcaaactttgagtcacgtctggctgaactgcagaaagttcaaactgaagggagactttatgaatgtaatgaaacggagaagacaggtaataatggttgtttagtttctccacacattagggaaaaaacgtatgtatgtaatgaatgtggcaaagcctttaaagcgtcttccagccttattaatcatcagaggatacatactacagagaaaccttacaaatgcaatgagtgtggcaaagcctttcatcgggcctcactactaactgtacacaaggtagtccatacaagagggaaatcatatcaatgtgatgtatgtggcaagatcttcagaaaaaattcatattttgtaagacaccaaaggagtcacactggacagaaaccctacatatgtaatgaatgtggcaagtcctttagtaaaagttcccaccttgcagttcatcagagaattcataccggtgaaaaaccttacaaatgtaatctgtgtgggaaatcctttagtcagcgtgtccatcttagacttcatcagacagttcatactggagagagacccttcaaatgtaatgagtgtggcaaaacctttaaacggagctcaaacctcactgtacatcaggtaatccatgcaggaaagaaaccatataaatgtgatgtatgtggcaaggcattcagacatagatcaaatcttgtatgtcaccggagaatccacagtggagagaaacaatacaaatgcaatgaatgtggcaaggtcttcagtaaacgttcaagtcttgcagtgcatcgacgaattcacactgtagagaaaccttgcaaatgcaatgaatgtggcaaggtcttcagtaaacgttcaagtcttgcagtgcatcagagaattcatactggacagaaaacttacaaatgcaataaatgtggcaaggtgtacagtaagcattcacatcttgcagtgcattggagaattcataccggcgagaaagcttataaatgcaatgaatgtggcaaagttttcagcatacattcacgacttgcagctcatcagagaattcatactggagagaaaccttacaaatgcaatgaatgtggcaaggtcttcagtcaacattcacgtcttgcagtgcatcggagaattcatactggagagaaaccttacaaatgcaaagaatgtggcaaggtcttcagtgaccgttcagcttttgcaaggcatcggagaattcatactggagagaagccttacaaatgcaaagaatgtggcaaggtcttcagtcaatgttcacgtcttacagtgcatcggagaattcatagtggagagaaaccttacaaatgcaatgaatgcggcaaggtctacagtcagtattcacatcttgtagggcatcgaagagttcatactggagagaaaccatacaaatgtcatgaatgtggcaaagcctttaatcagggctccacactcaatagacatcagagaattcataccggagagaaaccttacaaatgcaatcagtgtgggaattcctttagtcagcgtgtccatcttagacttcatcagactgttcatactggagacagaccttacaaatgtaatgagtgtggcaaaacctttaaacggagctcaaacctcactgcacatcagataattcatgcaggaaagaaaccatataaatgtgatgaatgtggcaaggtattcaggcatagttcacatcttgtaagtcaccagagaatccacactggagagaaaagatacaaatgtattgaatgtggcaaagcctttgggcggttgttttccctcagcaaacaccaaagaattcattctggcaaaaaaccttataaatgtaatgagtgtgggaaatcttttatttgtcgctcaggcctcactaaacatcgaataagacatactggagagagccttacaactaaactcaatgtgacaaggccttagtaatgaactagtccgtaacttgaaagtatttcgatttcttggctttatatatcttgtggaaaggacgagtggcctcatctgtagcatcgtgt

SEQ ID NO: 652 - DNA, 1700 bp, Homo sapiens
  source 1..1700: mol_type = genomic DNA
accgccaccatgaagccaggggtcatcagccatgctccagacagtgtggttccagcagcatttccattccccaaaccagatctgatattccagctggagcaaggagaagcagcatggggcccagatccctggacacttgctgggggagaggccctgagaggcatgtgcacaggtggtaaaaccaagactgagaatgaggaaaaaactgcacagctaaacatttctaaagaatcagagtcccacagactgatagtggagggactgctgatggacgttccccagcaccctgacttcaaggacaggttagagaagtcacagctacatgatacagggaataaaacaaagataggggattgcacagatttgacagtccaggatcatgaatcttccaccactgaaagggaggagatagccaggaaattggaagaaagtagtgtcagcacacatctcattacaaagcagggttttgccaaagaacaggtgttttataaatgtggtgagtgtggcagttactacaacccacattcagactttcacctgcatcagagagttcacactaatgagaagccctacacatgcaaagaatgtgggaaaaccttcagatataactcaaaactgtcacggcatcagaaaatccacactggagagaaaccatactcatgtgaggaatgtggacaagccttcagtcaaaattcccaccttcttcagcatcagaagctccatggtggacagaggccctatgaatgtactgactgtggtaaaaccttcagttataattcaaaactgattcggcatcagagaatccatactggggagaagccctttaaatgtaaggaatgtgggaaagccttcagttgtagctatgactgcatcatccatgaacgaattcacaatggggagaagccctatgaatgtaaggagtgtgggaagagtttgagttctaattcagttctgattcagcatcagagaatccacactggggagaaaccttatgaatgtaaagagtgtggcaaggccttccaccgcagttcggtatttcttcagcaccagaggttccacactggggaacaactctacaaatgtaatgaatgttggaaaactttcagctgtagctcccgcttcatagtgcatcagagaatccacaatggggagaaaccctatgaatgccaggaatgtgggaagacattcagtcaaaagatcactctggttcagcatcagcgagttcacactggggagaaaccttatgagtgtaaggagtgcgggaaagccttcagatggaatgcaagtttcatccagcatcagaagtggcatactaggaagaaactcatcaatggaacagggctatccgcagttaagccctactgtccctgcgccatcctctctcctctgcctccccaacatacctgctctgccctagccccaccagggcctcccttatcttcttcacatgcagtggtacttcctccctctgtgcctttcttcctgctgcttccctcatctgaaaaggccaacccttcacctgtccaaatagcacatttttttcaggatctcgcttttcctgggaagtcatcccttcagagcccgaatcctttgtctcactccctgtagtaatgaactagtccgtaacttgaaagtatttcgatttcttggctttatatatcttgtggaaaggacgatttgacgcttactcctgcccttca

SEQ ID NO: 653 - DNA, 1832 bp, Homo sapiens
  source 1..1832: mol_type = genomic DNA
accgccaccatgctccagacagtgtggttccagggcttgggcaggaacctgttgtttcaggagccagtaacctttgaggatgtggctgtgtacttcacccagaatgaatgggccagcctgcaccctacgcagagggccctatacagggaggtgatgctggagaattatgcaaatgtgacttccttgtcagcatttccattccccaaaccagatctgatattccagctggagcaaggagaagcagcatggggcccagatccctggacacttgctgggggagaggccctgagaggcatgtgcacaggtggtaaaaccaagactgagaatgaggaaaaaactgcacagctaaacatttctaaagaatcagagtcccacagactgatagtggagggactgctgatggacgttccccagcaccctgacttcaaggacaggttagagaagtcacagctacatgatacagggaataaaacaaagataggggattgcacagatttgacagtccaggatcatgaatcttccaccactgaaagggaggagatagccaggaaattggaagaaagtagtgtcagcacacatctcattacaaagcagggttttgccaaagaacaggtgttttataaatgtggtgagtgtggcagttactacaacccacattcagactttcacctgcatcagagagttcacactaatgagaagccctacacatgcaaagaatgtgggaaaaccttcagatataactcaaaactgtcacggcatcagaaaatccacactggagagaaaccatactcatgtgaggaatgtggacaagccttcagtcaaaattcccaccttcttcagcatcagaagctccatggtggacagaggccctatgaatgtactgactgtggtaaaaccttcagttataattcaaaactgattcggcatcagagaatccatactggggagaagccctttaaatgtaaggaatgtgggaaagccttcagttgtagctatgactgcatcatccatgaacgaattcacaatggggagaagccctatgaatgtaaggagtgtgggaagagtttgagttctaattcagttctgattcagcatcagagaatccacactggggagaaaccttatgaatgtaaagagtgtggcaaggccttccaccgcagttcggtatttcttcagcaccagaggttccacactggggaacaactctacaaatgtaatgaatgttggaaaactttcagctgtagctcccgcttcatagtgcatcagagaatccacaatggggagaaaccctatgaatgccaggaatgtgggaagacattcagtcaaaagatcactctggttcagcatcagcgagttcacactggggagaaaccttatgagtgtaaggagtgcgggaaagccttcagatggaatgcaagtttcatccagcatcagaagtggcatactaggaagaaactcatcaatggaacagggctatccgcagttaagccctactgtccctgcgccatcctctctcctctgcctccccaacatacctgctctgccctagccccaccagggcctcccttatcttcttcacatgcagtggtacttcctccctctgtgcctttcttcctgctgcttccctcatctgaaaaggccaacccttcacctgtccaaatagcacatttttttcaggatctcgcttttcctgggaagtcatcccttcagagcccgaatcctttgtctcactccctgtagtaatgaactagtccgtaacttgaaagtatttcgatttcttggctttatatatcttgtggaaaggacgagtccgggactacacgcggactgtg

SEQ ID NO: 654 - DNA, 1805 bp, Homo sapiens
  source 1..1805: mol_type = genomic DNA
accgccaccatgggccagcctgcaccctacgcagagggccctatacagggaggtgatgctggagaattatgcaaatgtgacttccttgtcagcatttccattccccaaaccagatctgatattccagctggagcaaggagaagcagcatggggcccagatccctggacacttgctgggggagaggccctgagaggcatgtgcacagagtttcacttttgttgcccaggctggagtgcaatggcgtgatcttcactcaccgcaacctctgccttccaggtggtaaaaccaagactgagaatgaggaaaaaactgcacagctaaacatttctaaagaatcagagtcccacagactgatagtggagggactgctgatggacgttccccagcaccctgacttcaaggacaggttagagaagtcacagctacatgatacagggaataaaacaaagataggggattgcacagatttgacagtccaggatcatgaatcttccaccactgaaagggaggagatagccaggaaattggaagaaagtagtgtcagcacacatctcattacaaagcagggttttgccaaagaacaggtgttttataaatgtggtgagtgtggcagttactacaacccacattcagactttcacctgcatcagagagttcacactaatgagaagccctacacatgcaaagaatgtgggaaaaccttcagatataactcaaaactgtcacggcatcagaaaatccacactggagagaaaccatactcatgtgaggaatgtggacaagccttcagtcaaaattcccaccttcttcagcatcagaagctccatggtggacagaggccctatgaatgtactgactgtggtaaaaccttcagttataattcaaaactgattcggcatcagagaatccatactggggagaagccctttaaatgtaaggaatgtgggaaagccttcagttgtagctatgactgcatcatccatgaacgaattcacaatggggagaagccctatgaatgtaaggagtgtgggaagagtttgagttctaattcagttctgattcagcatcagagaatccacactggggagaaaccttatgaatgtaaagagtgtggcaaggccttccaccgcagttcggtatttcttcagcaccagaggttccacactggggaacaactctacaaatgtaatgaatgttggaaaactttcagctgtagctcccgcttcatagtgcatcagagaatccacaatggggagaaaccctatgaatgccaggaatgtgggaagacattcagtcaaaagatcactctggttcagcatcagcgagttcacactggggagaaaccttatgagtgtaaggagtgcgggaaagccttcagatggaatgcaagtttcatccagcatcagaagtggcatactaggaagaaactcatcaatggaacagggctatccgcagttaagccctactgtccctgcgccatcctctctcctctgcctccccaacatacctgctctgccctagccccaccagggcctcccttatcttcttcacatgcagtggtacttcctccctctgtgcctttcttcctgctgcttccctcatctgaaaaggccaacccttcacctgtccaaatagcacatttttttcaggatctcgcttttcctgggaagtcatcccttcagagcccgaatcctttgtctcactccctgtagtaatgaactagtccgtaacttgaaagtatttcgatttcttggctttatatatcttgtggaaaggacgacgatggagatgacggcccaacggc

SEQ ID NO: 655 - DNA, 1952 bp, Homo sapiens
  source 1..1952: mol_type = genomic DNA
accgccaccatgctccagacagtgtggttccagggcttgggcaggaacctgttgtttcaggagccagtaacctttgaggatgtggctgtgtacttcacccagaatgaatgggccagcctgcaccctacgcagagggccctatacagggaggtgatgctggagaattatgcaaatgtgacttccttgtacccaactgcagggggctttcctctggatacagagagaactgagaaggttcctggtgcactgtcttcattccttccatcttccagttccctggagctgatcttggccctattgcctatgtcagcatttccattccccaaaccagatctgatattccagctggagcaaggagaagcagcatggggcccagatccctggacacttgctgggggagaggccctgagaggcatgtgcacaggtggtaaaaccaagactgagaatgaggaaaaaactgcacagctaaacatttctaaagaatcagagtcccacagactgatagtggagggactgctgatggacgttccccagcaccctgacttcaaggacaggttagagaagtcacagctacatgatacagggaataaaacaaagataggggattgcacagatttgacagtccaggatcatgaatcttccaccactgaaagggaggagatagccaggaaattggaagaaagtagtgtcagcacacatctcattacaaagcagggttttgccaaagaacaggtgttttataaatgtggtgagtgtggcagttactacaacccacattcagactttcacctgcatcagagagttcacactaatgagaagccctacacatgcaaagaatgtgggaaaaccttcagatataactcaaaactgtcacggcatcagaaaatccacactggagagaaaccatactcatgtgaggaatgtggacaagccttcagtcaaaattcccaccttcttcagcatcagaagctccatggtggacagaggccctatgaatgtactgactgtggtaaaaccttcagttataattcaaaactgattcggcatcagagaatccatactggggagaagccctttaaatgtaaggaatgtgggaaagccttcagttgtagctatgactgcatcatccatgaacgaattcacaatggggagaagccctatgaatgtaaggagtgtgggaagagtttgagttctaattcagttctgattcagcatcagagaatccacactggggagaaaccttatgaatgtaaagagtgtggcaaggccttccaccgcagttcggtatttcttcagcaccagaggttccacactggggaacaactctacaaatgtaatgaatgttggaaaactttcagctgtagctcccgcttcatagtgcatcagagaatccacaatggggagaaaccctatgaatgccaggaatgtgggaagacattcagtcaaaagatcactctggttcagcatcagcgagttcacactggggagaaaccttatgagtgtaaggagtgcgggaaagccttcagatggaatgcaagtttcatccagcatcagaagtggcatactaggaagaaactcatcaatggaacagggctatccgcagttaagccctactgtccctgcgccatcctctctcctctgcctccccaacatacctgctctgccctagccccaccagggcctcccttatcttcttcacatgcagtggtacttcctccctctgtgcctttcttcctgctgcttccctcatctgaaaaggccaacccttcacctgtccaaatagcacatttttttcaggatctcgcttttcctgggaagtcatcccttcagagcccgaatcctttgtctcactccctgtagtaatgaactagtccgtaacttgaaagtatttcgatttcttggctttatatatcttgtggaaaggacgatcccataattagttactacgacaa

SEQ ID NO: 656 - DNA, 2867 bp, Homo sapiens
  source 1..2867: mol_type = genomic DNA
accgccaccatgaaccagccgggcggcgcggcggctccgcaggctgacggagccagtgcagccggaaggaaaagcactgcgagcagggagcgcttgaagcgcagccagaagagcaccaaggtggagggcccagagccagtgccagccgaggcctcgctgagtgccgagcaaggaacgatgacggaggtgaaggtgaagacagagctgcccgatgactacatccaggaggtgatctggcagggcgaggccaaggaggagaagaaggcggtcagcaaggatgggaccagcgacgtgcctgccgagatctgcgtggtgatcggcggcgtccgcaaccagcagacccttgggtcttacgaatgcggaatctgtggcaagaagtacaagtattacaactgcttccagacccacgtgcgggcgcaccgagacaccgaagccacctcaggggagggagcctcccaaagcaacaatttcaggtacacatgtgatatctgcgggaagaagtacaaatactacagctgtttccaagagcaccgagacctgcacgcagtggatgtgtttagtgtggaaggggcccctgagaaccgggcagaccccttcgaccaaggtgtcgtggccacggacgaggtgaaggaggagcccccggagccattccagaaaatcgggccaaaaactggcaattacacctgtgaattctgcggcaaacagtacaagtactacactccctaccaggagcatgtggccttacacgcccccatcagtactgcccccgggtgggagccaccggatgatccagacacgggctctgagtgttcacatccagaggtctccccatctccacgcttcgtggcagcgaagacccagacgaaccagtcggggaaaaaagctccggcctccgtggtccgatgtgccaccctcttacaccgcacccctccagccacccaaacccagacgttccgcactccaaattcgggatctccggcgagcaaggcaaccgcagaaagcgctttcagtcggagagtagaaggcaaagcacaaaaccactttgaagagacgaacagcagttcgcagaactccagcgaaccctacacctgcggcgcctgtgggatccagttccagttctacaacaacctgttggagcacatgcagtcccatgcagctgacaatgaaaacaacattgcctccaaccagtcccgatcgccacctgctgttgtagaagagaagtggaaacctcaggcccagaggaacagtgccaataacaccactaccagtggtttaacacccaacagcatgatccccgaaaaggagcggcagaacatcgcagagcggctgttgagggtcatgtgtgccgacctgggtgcactgagcgtggtcagcgggaaggagttcctgaagttggcccagaccttagtagacagtggtgcccgctatggggccttctcggtcactgaaatcctgggcaacttcaacacgctggcgctgaagcacctgccacgcatgtacaaccaggtgaaggtgaaagtgacctgtgccttgggcagcaatgcctgcctaggcatcggtgtcacctgccactcccagagtgttggccctgactcctgctacatcctcacagcctaccaggccgagggcaaccacatcaagagctatgtgcttggtgtgaagggtgcggacattcgcgacagcggtgaccttgtgcaccactgggtgcagaacgtgctgtcggagttcgtgatgtcggagatcaggacagtgtacgtgacggattgccgggtgagcacgtccgccttctccaaggccggcatgtgccttcgctgctcagcctgtgccttgaactcggtggtgcagagcgtgctgagcaagcggacactgcaggcccgcagcatgcacgaggtcatcgagctgctcaacgtgtgcgaggacctggcgggctccacgggcctggccaaggagaccttcgggtcgctggaggagacgtctccaccaccctgctggaactcggtgacggactcactgttgctggtgcatgagcgctatgagcagatctgcgagttctacagccgggccaagaagatgaacctcatccagagcctcaacaagcacctgctcagcaacctggcggccatcctgacgccggtgaagcaggcagtcatcgagctgagcaacgagagccagcccaccctgcagctggtgctgcccacctacgtcaggctggagaagctgttcacggccaaggccaacgacgcaggcactgtcagcaagctctgccacctcttcctggaggcgctcaaggagaacttcaaggtgcacccggcccacaaggtggccatgatcctggacccgcagcagaagctgcggcctgtgccaccctaccagcacgaggagatcatcggcaaggtctgtgagctcatcaacgaggtgaaggagtcctgggccgaggaggccgacttcgagcccgctgccaagaagccccgctctgctgccgtcgagaaccccgcagctcaggaagatgatcggctaggcaaaaatgaagtgtacgattacctgcaggagcccctcttccaggctacccctgatctcttccagtactggtcgtgcgttacccaaaagcacacaaaactcgccaagctcgccttctggctcctggcggttccggccgtgggcgccagaagcgggtgtgtaaatatgtgtgaacaagcgcttctaatcaaacggaggcggctgctcagtccagaagatatgaataaactcatgtttctgaaatccaacatgctttagtaatgaactagtccgtaacttgaaagtatttcgatttcttggctttatatatcttgtggaaaggacgagttcatgtaggacattgaacctat

SEQ ID NO: 657 - DNA, 2687 bp, Homo sapiens
  source 1..2687: mol_type = genomic DNA
accgccaccatgaaccagccgggcggcgcggcggctccgcaggctgacggagccagtgcagccggaaggaaaagcactgcgagcagggagcgcttgaagcgcagccagaagagcaccaaggtggagggcccagagccagtgccagccgaggcctcgctgagtgccgagcaaggaacgatgacggaggtgaaggtgaagacagagctgcccgatgactacatccaggaggtgatctggcagggcgaggccaaggaggagaagaaggcggtcagcaaggatgggaccagcgacgtgcctgccgagatctgcgtggtgatcggcggcgtccgcaaccagcagacccttgggtcttacgaatgcggaatctgtggcaagaagtacaagtattacaactgcttccagacccacgtgcgggcgcaccgagacaccgaagccacctcaggggagggagcctcccaaagcaacaatttcaggtacacatgtgatatctgcgggaagaagtacaaatactacagctgtttccaagagcaccgagacctgcacgcagtggatgtgtttagtgtggaaggggcccctgagaaccgggcagaccccttcgaccaaggtgtcgtggccacggacgaggtgaaggaggagcccccggagccattccagaaaatcgggccaatgaacaatattacatcagacatttttaagaagaaagaagttaggcagtgccaaaagagagaaactggcaattacacctgtgaattctgcggcaaacagtacaagtactacactccctaccaggagcatgtggccttacacgcccccatcaaaagcgctttcagtcggagagtagaaggcaaagcacaaaaccactttgaagagacgaacagcagttcgcagaactccagcgaaccctacacctgcggcgcctgtgggatccagttccagttctacaacaacctgttggagcacatgcagtcccatgcagctgacaatgaaaacaacattgcctccaaccagtcccgatcgccacctgctgttgtagaagagaagtggaaacctcaggcccagaggaacagtgccaataacaccactaccagtggtttaacacccaacagcatgatccccgaaaaggagcggcagaacatcgcagagcggctgttgagggtcatgtgtgccgacctgggtgcactgagcgtggtcagcgggaaggagttcctgaagttggcccagaccttagtagacagtggtgcccgctatggggccttctcggtcactgaaatcctgggcaacttcaacacgctggcgctgaagcacctgccacgcatgtacaaccaggtgaaggtgaaagtgacctgtgccttgggcagcaatgcctgcctaggcatcggtgtcacctgccactcccagagtgttggccctgactcctgctacatcctcacagcctaccaggccgagggcaaccacatcaagagctatgtgcttggtgtgaagggtgcggacattcgcgacagcggtgaccttgtgcaccactgggtgcagaacgtgctgtcggagttcgtgatgtcggagatcaggacagtgtacgtgacggattgccgggtgagcacgtccgccttctccaaggccggcatgtgccttcgctgctcagcctgtgccttgaactcggtggtgcagagcgtgctgagcaagcggacactgcaggcccgcagcatgcacgaggtcatcgagctgctcaacgtgtgcgaggacctggcgggctccacgggcctggccaaggagaccttcgggtcgctggaggagacgtctccaccaccctgctggaactcggtgacggactcactgttgctggtgcatgagcgctatgagcagatctgcgagttctacagccgggccaagaagatgaacctcatccagagcctcaacaagcacctgctcagcaacctggcggccatcctgacgccggtgaagcaggcagtcatcgagctgagcaacgagagccagcccaccctgcagctggtgctgcccacctacgtcaggctggagaagctgttcacggccaaggccaacgacgcaggcactgtcagcaagctctgccacctcttcctggaggcgctcaaggagaacttcaaggtgcacccggcccacaaggtggccatgatcctggacccgcagcagaagctgcggcctgtgccaccctaccagcacgaggagatcatcggcaaggtctgtgagctcatcaacgaggtgaaggagtcctgggccgaggaggccgacttcgagcccgctgccaagaagccccgctctgctgccgtcgagaaccccgcagctcaggaagatgatcggctaggcaaaaatgaagtgtacgattacctgcaggagcccctcttccaggctacccctgatctcttccagtactggtcgtgcgttacccaaaagcacacaaaactcgccaagctcgccttctggctcctggcggttccggccgtgggcgccagaagcgggtgtgtaaatatgtgtgaacaagcgcttctaatcaaacggaggcggctgctcagtccagaagatatgaataaactcatgtttctgaaatccaacatgctttagtaatgaactagtccgtaacttgaaagtatttcgatttcttggctttatatatcttgtggaaaggacgacaatttctctatgtaatgctcgac

SEQ ID NO: 658 - DNA, 2966 bp, Homo sapiens
  source 1..2966: mol_type = genomic DNA
accgccaccatgaaccagccgggcggcgcggcggctccgcaggctgacggagccagtgcagccggaaggaaaagcactgcgagcagggagcgcttgaagcgcagccagaagagcaccaaggtggagggcccagagccagtgccagccgaggcctcgctgagtgccgagcaaggaacgatgacggaggtgaaggtgaagacagagctgcccgatgactacatccaggaggtgatctggcagggcgaggccaaggaggagaagaaggcggtcagcaaggatgggaccagcgacgtgcctgccgagatctgcgtggtgatcggcggcgtccgcaaccagcagacccttgatggaaaagcgcccgaaggcagcccccacggtggatctgtgcgaagccggtattcagggacctggatttttgaccaagcattgagatatgcatctgggtcttacgaatgcggaatctgtggcaagaagtacaagtattacaactgcttccagacccacgtgcgggcgcaccgagacaccgaagccacctcaggggagggagcctcccaaagcaacaatttcaggtacacatgtgatatctgcgggaagaagtacaaatactacagctgtttccaagagcaccgagacctgcacgcagtggatgtgtttagtgtggaaggggcccctgagaaccgggcagaccccttcgaccaaggtgtcgtggccacggacgaggtgaaggaggagcccccggagccattccagaaaatcgggccaaaaactggcaattacacctgtgaattctgcggcaaacagtacaagtactacactccctaccaggagcatgtggccttacacgcccccatcagtactgcccccgggtgggagccaccggatgatccagacacgggctctgagtgttcacatccagaggtctccccatctccacgcttcgtggcagcgaagacccagacgaaccagtcggggaaaaaagctccggcctccgtggtccgatgtgccaccctcttacaccgcacccctccagccacccaaacccagacgttccgcactccaaattcgggatctccggcgagcaaggcaaccgcagcagaaagcgctttcagtcggagagtagaaggcaaagcacaaaaccactttgaagagacgaacagcagttcgcagaactccagcgaaccctacacctgcggcgcctgtgggatccagttccagttctacaacaacctgttggagcacatgcagtcccatgcagctgacaatgaaaacaacattgcctccaaccagtcccgatcgccacctgctgttgtagaagagaagtggaaacctcaggcccagaggaacagtgccaataacaccactaccagtggtttaacacccaacagcatgatccccgaaaaggagcggcagaacatcgcagagcggctgttgagggtcatgtgtgccgacctgggtgcactgagcgtggtcagcgggaaggagttcctgaagttggcccagaccttagtagacagtggtgcccgctatggggccttctcggtcactgaaatcctgggcaacttcaacacgctggcgctgaagcacctgccacgcatgtacaaccaggtgaaggtgaaagtgacctgtgccttgggcagcaatgcctgcctaggcatcggtgtcacctgccactcccagagtgttggccctgactcctgctacatcctcacagcctaccaggccgagggcaaccacatcaagagctatgtgcttggtgtgaagggtgcggacattcgcgacagcggtgaccttgtgcaccactgggtgcagaacgtgctgtcggagttcgtgatgtcggagatcaggacagtgtacgtgacggattgccgggtgagcacgtccgccttctccaaggccggcatgtgccttcgctgctcagcctgtgccttgaactcggtggtgcagagcgtgctgagcaagcggacactgcaggcccgcagcatgcacgaggtcatcgagctgctcaacgtgtgcgaggacctggcgggctccacgggcctggccaaggagaccttcgggtcgctggaggagacgtctccaccaccctgctggaactcggtgacggactcactgttgctggtgcatgagcgctatgagcagatctgcgagttctacagccgggccaagaagatgaacctcatccagagcctcaacaagcacctgctcagcaacctggcggccatcctgacgccggtgaagcaggcagtcatcgagctgagcaacgagagccagcccaccctgcagctggtgctgcccacctacgtcaggctggagaagctgttcacggccaaggccaacgacgcaggcactgtcagcaagctctgccacctcttcctggaggcgctcaaggagaacttcaaggtgcacccggcccacaaggtggccatgatcctggacccgcagcagaagctgcggcctgtgccaccctaccagcacgaggagatcatcggcaaggtctgtgagctcatcaacgaggtgaaggagtcctgggccgaggaggccgacttcgagcccgctgccaagaagccccgctctgctgccgtcgagaaccccgcagctcaggaagatgatcggctaggcaaaaatgaagtgtacgattacctgcaggagcccctcttccaggctacccctgatctcttccagtactggtcgtgcgttacccaaaagcacacaaaactcgccaagctcgccttctggctcctggcggttccggccgtgggcgccagaagcgggtgtgtaaatatgtgtgaacaagcgcttctaatcaaacggaggcggctgctcagtccagaagatatgaataaactcatgtttctgaaatccaacatgctttagtaatgaactagtccgtaacttgaaagtatttcgatttcttggctttatatatcttgtggaaaggacgattgtcagtgattacgttcgtgttt

SEQ ID NO: 659 - DNA, 9794 bp, Homo sapiens
  source 1..9794: mol_type = genomic DNA
accgccaccatgcagagcagcccctcccctgctcaccctcagctcccagtcctacagacacagatggtgtcggacggcatgacaggcagcaatcctgtgtcccctgcctcatccagttccccagcctctagtggggcaggcggcatctccccgcagcacatagctcaagattcctcactggatggacctccaggccccccagatggtgccacagtgcccctggaggggttcagcttatcccaggctgctgacctggctaacaagggcccgaagtgggagaagagccatgccgaaattgcagaacaggccaagcatgaggccgagatcgagactcggattgctgagctgcggaaggagggtttctggtcactgaagaggctgcctaaggtgccagagccccctcgccccaaaggtcactgggactatttgtgcgaagagatgcagtggctctctgctgactttgctcaggagcgccgttggaaacggggtgtggcccggaaggtggtgcgcatggtgatccggcaccacgaggagcagcggcagaaagaggaacgggcccggagggaggagcaggccaagctgcgtcgaattgcttccaccatggccaaggatgtcaggcagttctggagcaatgtggagaaggtggtgcaattcaagcaacagtcccggcttgaggaaaagcgcaaaaaagccctggacctgcatttggacttcattgtggggcaaactgaaaagtactcggaccttctgtctcagagcctcaaccagccattaacctccagcaaagcaggctcttccccttgcctcggctcttcctcagctgcctccagtcctccaccccctgcttctcgcctggatgatgaagatggggactttcaaccccaagaggatgaggaagaggatgatgaggaaacgattgaagttgaagaacaacaggaaggcaatgatgcagaggcccagaggcgtgagattgagctgcttcgccgtgagggagaattgccactggaagagctgctccgttcccttccccctcagctgttggaagggccttccagcccctctcaaaccccctcatctcatgatagtgacacccgagatgggcctgaagaaggtgctgaagaagagccccctcaggtgttggagataaagcccccaccctctgctgtcacacagcgcaacaaacagccttggcatccagatgaagatgatgaagagtttactgccaacgaagaggaagcggaggatgaagaggatactatagcagctgaggaacagttggaaggggaggtggatcatgccatggagctgagcgagttggctcgagaaggtgagctttccatggaggagctattgcagcagtatgcaggagcctatgccccaggctctgggagcagtgaagatgaggatgaagatgaggttgatgctaatagctctgactgtgaaccagaggggcccgtggaagcggaagagcctcctcaggaggatagtagcagtcagtcagactctgtggaggaccggagtgaggatgaggaagatgaacattcagaggaggaagaaacaagtggaagttcagcatcagaggaatctgagtctgaagagtctgaggatgcccaatcacagagccaagcagatgaagaggaggaagatgatgattttggggtggagtacttgcttgccagggatgaagagcagagtgaggcagatgcaggcagtgggcctcctactccagggcccactactctaggtccaaagaaagaaattactgacattgctgcagcagctgaaagtctccagcccaagggttacacgctggccacgacccaggtaaagacgcccattcccctgcttctgcggggccagctccgggagtaccagcacattgggctagactggctggttaccatgtatgagaagaagcttaatggcattcttgctgatgagatggggcttgggaagaccatccagaccatctctctgcttgcccacttggcttgtgagaaaggtaactggggtccccatttaatcattgttcccaccagcgtgatgttgaactgggagatggagttgaaacggtggtgccccagctttaaaatcctcacttactatggagcccagaaagagaggaagctcaagcggcagggctggaccaagcccaatgcctttcatgtgtgtatcacatcttacaagctggtgctgcaggaccaccaggccttccgtcgcaagaactggcgctatctcattctggatgaggcgcagaacatcaagaacttcaagtcacagcgctggcagtcactcctcaacttcaacagccagagacgcctgctcctgacaggaactcccttgcagaacagcctcatggagctgtggtccttgatgcactttttgatgccccatgtcttccagtctcatcgcgagttcaaggagtggttctctaatcccctaactggcatgattgagggcagccaagagtataatgaaggtctagtcaaacgcctccacaaggttttgaggccttttttactgcgccgagttaaggtggatgttgagaagcagatgcccaaaaagtacgagcatgttatccgctgcaggctctccaagcgtcaacgctgtctctatgatgacttcatggcacagaccacaactaaggagacactagccacaggccatttcatgagcgtcatcaacattttgatgcagctgagaaaagtttgcaatcatccaaatctgttcgaccctcgaccggttacctcccctttcatcaccccaggcatctgcttcagcaccgcctctctggtgctaagggccacggatgtccatcccctccagcggatagacatgggtcgatttgaccttattggcctggaaggtcgtgtctctcgatatgaggcagacacatttctgccccggcaccgcctctctcgccgggtactgttagaagtggctactgctcctgaccccccaccccggcccaagccagtcaagatgaaggtcaacaggatgctgcagccagtacctaagcaagaaggccggacagtggtggtggtgaacaacccacgggcgcccctgggccctgtcccagttcgacctcctccaggtcctgagctctcagcccagcccacccctggcccagtcccccaagtgctgccagcatcactgatggtttcagcctcacctgccgggcccccgcttattcctgcatctcggcctcctggccctgtcctcttgcctccactgcagcccaacagtggttctctcccccaggtgttgccatcccccctgggggtcctgagtgggacctcacggcctcccacgccaaccttgtccctaaagccaacaccacctgccccagttcgcctgagcccagccccacctccaggctcctctagcctgttgaagcccctgacagtgccaccaggctacaccttccctcctgctgctgccaccaccacttctaccaccacggcaactgctaccaccacagcagtgccagctccgactcctgcaccacagcgcctcattctatctcccgatatgcaggctcgcctgccctcaggcgaagtggtcagcatcgggcagttagcctcactggcacaacgtccagtggctaatgcagggggaagcaaacctctcaccttccaaatccagggcaacaagctgactttgactggtgcccaggtgcgccagcttgctgtggggcagccccgcccgctgcaaaggaatgtggtgcacctcgtgtcagcaggggggcagcaccatctcatcagccagcctgcccatgtggccctcatccaggccgtggccccgacccctggccctacccctgtctctgtgctgccttcttcgacccccagcaccacccctgcccctactggcctcagccttccgcttgctgctaaccaggtgccaccaaccatggtgaataatacaggcgtggtgaagattgtagtgagacaagcccctcgggatggactgactcctgttcctccattggccccagcaccccggcctccgagctctgggcttccagctgtgttgaatccacgccccacgttaacccctggccggctacccacacctactctgggtactgctcgagcccccatgcccacacccactctggtgaggcctcttctcaagctggtccacagtccttcacctgaagtcagtgcttcagcccccggagctgcccccttgaccatctcttctcctctccacgtgccatcctccctccctgggccagcctcttctccaatgccaattcccaactcctctccccttgctagtcctgtgtcctctacagtctcagttccattgtcatcttcactccccatctctgtccccaccacacttcctgccccagcctcggctccactcaccatccccatctcagcccccttgactgtttctgcttcgggcccagctctgttgaccagtgtgactccaccattggcacctgttgtcccagcggctcctggacctccctccttggcaccatctggtgcttccccgtcagcatcagccttgactctaggtttggccacagctccatccctgtcttcatctcagacacctggtcaccctctgttgttggctcccacctcttcacatgttccagggttgaactcaaccgtggccccagcatgctcacctgtcctggtgccagcttcggctctggccagtccttttccgtcagcaccaaatccagctccagctcaggcttcccttctggctccagcatcttctgcatctcaggctctagccacccctctggctcctatggcggctccacagacagcaattctggctccttctccagctcctcctctggctcctcttccggtcctggcaccatcgccaggtgctgctcctgtcctggcttcatcacagactccggttccagttatggctccatcgtctactccaggaacctctttagcctcagcttcaccggtaccagctccaacccctgtgttggctccatcatcaactcaaactatgctaccagccccggttccgtcacctctcccgagcccggcttctacgcagacactggccctagccccagctttagcacccactcttggaggctcatctccatctcagacactctctttgggaacggggaacccccagggaccctttccaactcagacattgtcattaactccagcatcatccctggtaccaactccagcccagacactgtctttggcaccaggaccaccactgggtccaactcagacgctgtctctggctccagcaccccctctggctccagcttctccagtgggcccagccccagctcacacgctgactttggctccagcatcgtcatctgcttcactcctggccccagcttcagtgcagacactgaccttgagccctgccccagttcctaccctgggcccggccgcagctcagaccttggcgctggccccagcctccacacagtccccagcttcccaggcatcttcccttgtggtttcggcatctggtgccgctcccttgcctgtcaccatggtatcccggctgcctgtttccaaggatgagcctgacacactgacattgcgctctggtccccccagccctccctccactgctacctcgtttggtggcccccggcctcgacgccagccccccccaccacctcgttcccctttttatctggactccctggaggaaaagcggaagcggcagcggtctgaacgcctggaacggattttccaacttagtgaggctcatggggccctggcacctgtgtatgggactgaagtcctggatttctgtaccctgccccaacctgttgccagccccatcggccctcgttctcctggccccagccaccccaccttttggacttataccgaggctgcccaccgggctgtactgtttccccagcagcgactagaccagctgtcagaaatcattgagaggttcatctttgtcatgcctcctgtggaggcacctcccccttccctgcatgcctgccacccacctccttggctggccccacgtcaggcagccttccaggagcaattggcctctgagctctggccccgggctcgtcctttgcaccgtattgtgtgtaacatgcgcacccagttccctgacttaagactcatccagtatgattgcggaaagttgcagacgttggcagtgctgttgcggcagctcaaggcagagggccaccgagtgctcatcttcacccagatgacccgaatgctggatgtattggagcagtttctcacctaccatggccatctctacctgcgcctggatggatctactagagttgaacagagacaggccttgatggaacggttcaatgcagacaaacgcatattctgcttcatcctttcaactcggagtgggggtgtgggcgtgaacctgacaggagcagacactgttgttttttatgacagcgactggaatcccaccatggatgctcaggcccaggaccgctgtcaccgaattggccagacccgggatgtccacatatataggcttatcagtgaacggacagtggaggagaacatcctaaaaaaggcaaatcagaagagaatgttgggggacatggccattgagggaggcaacttcaccacagcctatttcaaacagcagaccatccgagagctgtttgatatgcccctggaggaaccttctagctcatccgtgccctctgcccctgaagaggaggaagagactgtggccagcaagcagactcatattctggagcaggcattgtgtcgggcagaagatgaagaggatatccgtgcagccacccaggccaaggctgaacaggtggctgagcttgcagaatttaatgagaacgatgggtttcctgctggtgagggagaggaagctggccggcctggggctgaggatgaggagatgtcccgggctgagcaggaaattgctgccctcgtagaacagctgacccccattgagcgctatgccatgaaattcctggaggcctcactggaggaggtgagccgagaggagctcaaacaggcagaagagcaagtggaagctgcccgcaaagacctggaccaagccaaggaggaggtgttccgcctaccccaagaggaggaggaggggccgggggctggggatgagagttcctgtgggactggtggaggcacccaccggcgcagtaaaaaggccaaagcccctgagaggccggggactcgtgtcagtgagcgtcttcgtggagcccgggctgagactcaaggggcaaaccacactcctgtcatatccgcccatcaaactcgcagcaccaccacaccaccccgctgcagtcctgccagggagcgagttcccaggccagcacctaggcctcgacccactccagcttcagctccggctgcaattcctgcccttgttcctgtcccagtttctgccccagtacccatttcagccccaaatccaataaccattctccctgtccatatcttgccttctcctccccctccttcacagattcctccttgttcttctcctgcctgcacccctcctcctgcctgtacccctccaccagctcatacaccgcctccagcccaaacctgtcttgtaactccttcctctcctctcttgcttggtccaccttctgtgcccatctctgcctcagtcactaatctccccttgggcttgaggcctgaggcagagctgtgtgcccaggcattggcatctccagagtccctggagctggcttctgtggccagttcagaaacctcctcactttctcttgtgccccctaaagatctgttgccagttgctgtggagatcctgcctgtgtcagagaagaacctttctctcaccccttctgcacccagcctgaccttggaggctggcagcatccccaatggtcaagagcaggaggcaccagattctgctgaggggaccacccttacagtgctgcctgaaggtgaggagttgcccctgtgtgtgagtgagagcaatggcctggagctcccaccctcagcagcatctgatgagccacttcaggagccactggaggctgacaggacctcggaagagctgacagaggccaagaccccaacctccagcccagagaagccacaggaactcgttacagctgaggttgcagctccatccacctcatcttcagccacttcctcgcctgagggtccttcacctgcccgacctcctcggcgtcgcaccagtgctgatgtggaaattaggggtcaagggactggtcggccaggacaaccaccaggccccaaagtgcttcgaaagctgccaggacggctggtaactgtggtagaggaaaaggaactggtgcggcggcggcggcagcagcggggagctgccagcaccctagtgcctggggtctctgagactagtgccagcccgggaagcccgtctgtccgcagcatgtcagggccagaatcctcccctcccattggtgggccctgtgaagctgctccttcatcctcactgcccactccaccccagcagcccttcattgctcgccgtcacattgagctgggggtgactggtggtggcagccccgagaatggagacggagcactgctcgccatcaccccacctgctgtgaaacgtcggagggggaggccccccaagaagaacaggtctccagcagatgctgggagaggtgtggatgaggcaccctcatccaccttgaagggaaaaaccaatggggctgacccagtccctgggcctgagaccctaattgttgcagatcctgtcctggaaccacagcttattcctgggccccagcctcttggaccccagccagttcacagacccaatcccctcctgtcacctgtggagaaaagaaggcgaggacgaccccctaaagcacgagatttgcccatccctgggaccatttcctctgcaggggatggcaactccgaaagtcggacacagccacccccacacccatcacccctaaccccactcccaccactgctagtttgtcccactgctactgttgccaacactgtcaccactgtcaccatttcaacgtccccacccaaacggaagaggggccgacctcccaagaatcctccatcacctcggcccagccagctccccgtcttggaccgtgacagcacttctgttctcgagagctgtggattggggaggcgacggcaaccccagggccaaggggagagtgagggtagttcctctgatgaggatggaagccgccccctcacccgcctggcccgccttcggcttgaagcagaaggaatgcgaggacggaagagtggagggtccatggtggtggctgtaattcaggatgacctggacttagcagatagcgggccaggcgggttggaattgacaccacctgtggtctcactaaccccaaaactgcgctcgacccggctgcgtccagggtctctagtccccccactagagactgagaagttgcctcgcaaacgagcaggggccccagttggtgggagtcctgggctggcaaagcggggccgcctacagcccccaagtcccctggggcctgagggttcagtagaggagtctgaggctgaagcctcaggtgaggaggaggaaggggatgggaccccacgccgacgtcctggcccccgccggcttgttgggaccaccaaccaaggggaccagcgcatcctgcgcagcagcgcccctccctccctggctggccctgctgttagtcacagaggccgcaaggccaagacgtagtaatgaactagtccgtaacttgaaagtatttcgatttcttggctttatatatcttgtggaaaggacgataaagtaaacaacttggaactaga

SEQ ID NO: 660 - DNA, 1736 bp, Homo sapiens
  source 1..1736: mol_type = genomic DNA
accgccaccatgttgaatatgcaaggagctgaagagagagacattagaagagagacttgtccaggctgggtaaacaagaacaagcctgctctggagcaggatgtctgtaaaattgactcatcagggatagtagtaaagaggttccaagaggatgaataccaagattctacatttgaagaaaaatatgcatgtgagggcatgaaggaaaactctcctagggagattgctgaatcatgccttttccaggaaggaggttttgggagaataactttcatccacaaagaagcaccccctgaaattattagtcaaggatataattttgagaaaagcttgcttttgacctcaagccttgttacacgtctcagggtttctacagaagagagtctgcatcagtgggaaacaagtaatatacaaaccaatgatatttcagaccaaagtaaatgtccaactctctgcacacagaaaaaatcttggaaatgtaatgaatgtggaaaaacctttactcagagctcatcccttacccaacatcagagaactcatactggagagagaccctacacatgtgaggaatgtgggaaagcctttagtcgtagttcattccttgttcaacatcaaagaattcacactggagtgaaaccatatggatgtgagcagtgtgggaaaacatttcgatgtcgatcatttcttactcagcatcaaagaattcacactggagagaaaccttataaatgcaatgaatgtgggaattccttccgcaatcactcacatctcactgaacaccagagaattcacactggagagaaaccttataaatgcaataggtgtgggaaggcattcaatcagaatacacaccttattcatcatcagagaattcacactggtgagaagccttacatatgcagtgaatgtggctcttcttttcgaaaacactcaaatcttacgcaacatcagagaattcacactggggaaaaaccccataaatgtgacgaatgtgggaaaactttccaaacaaaggcaaacctctctcagcatcagagaattcatagtggagagaaaccctataaatgtaaagaatgtggcaaagccttttgtcagagcccatctcttattaaacaccagcgaattcatactggagaaaaaccatataagtgtaaagaatgtggcaaagcgtttactcagagcaccccactcactaaacatcagagaatacatacaggggagagaccctacaaatgcagtgaatgtggtaaagccttcattcagagcatttgccttattcggcaccagagaagtcacactggagaaaaaccctataaatgcaatgaatgtggaaagggctttaatcagaacacctgcctcactcagcatatgagaattcatactggagagaagccctataaatgtaaagaatgtgggaaagcctttgctcatagctcatctcttactgaacatcatagaactcacactggtgagaagctctataaatgtagtgagtgtgagaaaaccttccgcaagtatgcacaccttagtgaacattacagaattcacactggtgagaagccttatgagtgtattgagtgtggaaagttcttcagacatagttcagtccttttcagacatcagaaacttcacagtggtgactagtaatgaactagtccgtaacttgaaagtatttcgatttcttggctttatatatcttgtggaaaggacgaaatgtgcagctcgacgagttattt

SEQ ID NO: 661 - DNA, 521 bp, Homo sapiens
  source 1..521: mol_type = genomic DNA
accgccaccatggggaccagcagcctgggcctggtggacaccacaggaggcccaggcgatgactacggggtgcttgggagcactgccaatgagacagagaagaaatcatccaggcggagaaaggagagttcagacaaccaggagaacagagggaagccggagggcagcagcaaagcccgcaaggagaggacggccttcaccaaggagcagctgcgagagctggaggcagagtttgcccatcataactacctgactcggctccgcagatatgagattgcggtaaacctggacctctctgagcgccaggtcaaagtgtggttccagaaccgaaggatgaagtggaagcgtgtgaagggaggtcagcccatctcccccaatgggcaggaccctgaggatggggactccacagcctctccaagttcagagtagtaatgaactagtccgtaacttgaaagtatttcgatttcttggctttatatatcttgtggaaaggacgagttacataccctcgactattatcg

SEQ ID NO: 662 - DNA, 656 bp, Homo sapiens
  source 1..656: mol_type = genomic DNA
accgccaccatggatcccgcggccagcagctgcatgaggagcctccagcccccagcccctgtctggggctgccttcgaaacccccactcggaaggcaatggggcctcagggctaccccactacccgcccaccccgttctccttccaccagaaaccagacttcctggcgacagcgacggcagcgtaccctgacttctcagcctcctgcctggcagccaccccacacagcctgccccaggaggagcacatcttcactgagcagcaccccgctttcccacagtcccccaactggcacttccctgtctcagacgcccggcgcaggcccaactcaggcccggcagggggttccaaggaaatggggaccagcagcctgggcctggtggacaccacaggaggcccaggcgatgactacggggtgcttgggagcactgccaatgagacagagaagaaatcatccaggcggagaaaggagagttcaggtcaaagtgtggttccagaaccgaaggatgaagtggaagcgtgtgaagggaggtcagcccatctcccccaatgggcaggaccctagtaatgaactagtccgtaacttgaaagtatttcgatttcttggctttatatatcttgtggaaaggacgaaacttactgaaggttacactcgta

SEQ ID NO: 663 - DNA, 1016 bp, Homo sapiens
  source 1..1016: mol_type = genomic DNA
accgccaccatggaacacccgctctttggctgcctgcgcagccctcacgccacggcgcaaggcttgcacccgttctcccaatcctctctcgccctccatggaagatctgaccatatgtcttaccccgagctctctacttcttcctcatcttgcataatcgcgggataccccaacgaagagggcatgtttgccagccagcatcacagggggcaccaccaccaccaccaccaccaccaccatcaccaccatcagcagcagcagcaccaggctctgcaaaccaactggcacctcccgcagatgtcttccccaccgagtgcggctcggcacagcctctgcctccagcccgactctggagggcccccagagttggggagcagcccgcccgtcctgtgctccaactcttccagcttgggctccagcaccccgactggggccgcgtgcgcgccgggggactacggccgccaggcactgtcacctgcggaggcggagaagcgaagcggcggcaagaggaaaagcgacagctcagactcccaggaaggaaattacaagtcagaagtcaacagcaaacccaggaaagaaaggacagcatttaccaaagagcaaatcagagaacttgaagcagaatttgcccatcataattatctcaccagactgaggcgatacgagatagcagtgaatctggatctcactgaaagacaggtgaaagtctggttccaaaacaggcggatgaagtggaagagggtaaagggtggacagcaaggagctgcggctcgggaaaaggaactggtgaatgtgaaaaagggaacacttctcccatcagagctgtcgggaattggtgcagccaccctccagcaaacaggggactctatagcaaatgaagacagtcacgacagtgaccacagctcagagcatgcgcacttatagtaatgaactagtccgtaacttgaaagtatttcgatttcttggctttatatatcttgtggaaaggacgaatgcgggctcagggaaacataagg

SEQ ID NO: 664 - DNA, 1268 bp, Homo sapiens
  source 1..1268: mol_type = genomic DNA
accgccaccatgacagcctccgtgctcctccacccccgctggatcgagcccaccgtcatgtttctctacgacaacggcggcggcctggtggccgacgagctcaacaagaacatggaaggggcggcggcggctgcagcagcggctgcagcggcggcggctgccggggccgggggcgggggcttcccccacccggcggctgcggcggcagggggcaacttctcggtggcggcggcggccgcggctgcggcggcggccgcggccaaccagtgccgcaacctgatggcgcacccggcgcccttggcgccaggagccgcgtccgcctacagcagcgcccccggggaggcgcccccgtcggctgccgccgctgctgccgcggctgccgctgcagccgccgccgccgccgccgcgtcgtcctcgggaggtcccggcccggcgggcccggcgggcgcagaggccgccaagcaatgcagcccctgctcggcagcggcgcagagctcgtcggggcccgcggcgctgccctatggctacttcggcagcggctactacccgtgcgcccgcatgggcccgcaccccaacgccatcaagtcgtgcgcgcagcccgcctcggccgccgccgccgccgccttcgcggacaagtacatggataccgccggcccagctgccgaggagttcagctcccgcgctaaggagttcgccttctaccaccagggctacgcagccgggccttaccaccaccatcagcccatgcctggctacctggatatgccagtggtgccgggcctcgggggccccggcgagtcgcgccacgaacccttgggtcttcccatggaaagctaccagccctgggcgctgcccaacggctggaacggccaaatgtactgccccaaagagcaggcgcagcctccccacctctggaagtccactctgcccgacgtggtctcccatccctcggatgccagctcctataggagggggagaaagaagcgcgtgccttataccaaggtgcaattaaaagaacttgaacgggaatacgccacgaataaattcattactaaggacaaacggaggcggatatcagccacgacgaatctctctgagcggcaggtcacaatctggttccagaacaggagggttaaagagaaaaaagtcatcaacaaactgaaaaccactagttagtaatgaactagtccgtaacttgaaagtatttcgatttcttggctttatatatcttgtggaaaggacgaacagggagctatgcctggacgtgt

SEQ ID NO: 665 - DNA, 1043 bp, Homo sapiens
  source 1..1043: mol_type = genomic DNA
accgccaccatggattttgatgagcgtggtccctgctcctctaacatgtatttgccaagttgtacttactacgtctcgggtccagatttctccagcctcccttcttttctgccccagaccccgtcttcgcgcccaatgacatactcctactcctccaacctgccccaggtccaacccgtgcgcgaagtgaccttcagagagtacgccattgagcccgccactaaatggcacccccgcggcaatctggcccactgctactccgcggaggagctcgtgcacagagactgcctgcaggcgcccagcgcggccggcgtgcctggcgacgtgctggccaagagctcggccaacgtctaccaccaccccacccccgcagtctcgtccaatttctatagcaccgtgggcaggaacggcgtcctgccacaggctttcgaccagtttttcgagacagcctacggcaccccggaaaacctcgcctcctccgactaccccggggacaagagcgccgagaaggggcccccggcggccacggcgacctccgcggcggcggcggcggctgcaacgggcgcgccggcaacttcaagttcggacagcggcggcggcggcggctgccgggagacggcggcggcagcagaggagaaagagcggcggcggcgccccgagagcagcagcagccccgagtcgtcttccggccacactgaggacaaggccggcggctccagtggccaacgcacccgcaaaaagcgctgcccctataccaagtaccagatccgagagctggaacgggagttcttcttcagcgtctacattaacaaagagaagcgcctgcaactgtcccgcatgctcaacctcactgatcgtcaagtcaaaatctggtttcagaacaggagaatgaaggaaaaaaaaattaacagagaccgtttacagtactactcagcaaatccactcctctagtaatgaactagtccgtaacttgaaagtatttcgatttcttggctttatatatcttgtggaaaggacgaaacaaagagaggcatactaaggcg

SEQ ID NO: 666 - DNA, 1334 bp, Homo sapiens
  source 1..1334: mol_type = genomic DNA
accgccaccatgtcagccagaaagggctatctgctcccttcgccaaattatcccacaacaatgtcatgctcggagagccccgccgcgaactcttttttggtcgactcgctcatcagctcgggcagaggcgaggcaggcggcggtggtggtggcgcggggggcggcggcggtggcggttactacgcccacggcggggtctacctgccgcccgccgccgacctgccctacgggctgcagagctgcgggctcttccccacgctgggcggcaagcgcaatgaggcagcgtcgccgggcagcggtggcggtggcgggggtctaggtcccggggcgcacggctacgggccctcgcccatagacctgtggctagacgcgccccggtcttgccggatggagccgcctgacgggccgccgccgccgccccagcagcagccgccgcccccgccgcaaccaccccagccagcgccgcaggccacctcgtgctctttcgcgcagaacatcaaagaagagagctcctactgcctctacgactcggcggacaaatgccccaaagtctcggccaccgccgccgaactggctcccttcccgcggggcccgccgcccgacggctgcgccctgggcacctccagcggggtgccagtgcctggctacttccgcctttctcaggcctacggcaccgccaagggctatggcagcggcggcggcggcgcgcagcaactcggggctggcccgttccccgcgcagcccccggggcgcggtttcgatctcccgcccgcgctagcctccggctcggccgatgcggcccggaaggagcgagccctcgattcgccgccgccccccacgctggcttgcggcagcggcgggggctcgcagggcgacgaggaggcgcacgcgtcgtcctcggccgcggaggagctctccccggccccttccgagagcagcaaagcctcgccggagaaggattccctgggcaattccaaaggtgaaaacgcagccaactggctcacggcaaagagtggtcggaagaagcgctgcccctacacgaagcaccagacactggagctggagaaggagtttctgttcaatatgtaccttactcgagagcggcgcctagagattagccgcagcgtccacctcacggacagacaagtgaaaatctggtttcagaaccgcaggatgaaactgaagaaaatgaatcgagaaaaccggatccgggagctcacagccaactttaatttttcctagtaatgaactagtccgtaacttgaaagtatttcgatttcttggctttatatatcttgtggaaaggacgaaatggccatcagtccttcttagat

SEQ ID NO: 667 - DNA, 1436 bp, Homo sapiens
  source 1..1436: mol_type = genomic DNA
accgccaccatggcctgcctcaacccggtgctctgggaaaccaaggttttgcagtctaaagcaacagaagacttcttcagaaatagcatccaatcacctctgtttactcttcagttgccgcacagcttgcaccaaacattgcaatcgtcaacagcatcattagttattcctgctggtagaactcttccaagttttaccacagcagaactgggcacttcaaactccagtgcaaactttacttttcctggttatcccattcatgtaccagcaggtgtgacactacagactgtatctggtcacctttataaagtcaatgtaccaattatggtgacagagacttctggaagagcaggtattcttcagcatccaattcagcaagtatttcaacagcttggccagccttcagtaatacaaactagtgttccacaattgaatccatggtctcttcaagcaactactgaaaaatcacagagaattgaaaccgtgctacagcaacccgcaattctaccttctgggccagtagataggaaacacttagaaaatgccaccagtgatatacttgtatctcctggaaatgagcataaaatcgtgcctgaagctttgttgtgtcatcaggaaagttctcactatatcagtcttccaggtgttgtattttctccacaggtctctcaaacaaattctaatgtggagtcagtgctcagtggttcagctagcatggctcaaaatctgcatgatgagtccctctccacaagccctcatggggctctccaccagcacgtgactgatattcagcttcatattcttaaaaataggatgtatggatgtgattctgtaaagcaaccaagaaatatagaggaacccagcaacatacctgtatcagagaaggattctaattctcaggtggatttaagcattcgggttactgatgatgatattggtgaaataattcaagtagatggaagcggtgatacatcttccaatgaagaaataggaagtacaagagatgcagatgagaatgaatttctagggaatattgacgggggagatctgaaggtacctgaagaagaagctgacagtatttcaaatgaggattcagccacaaacagtagtgataatgaagaccctcaagtaaacattgtagaagaggaccctttaaattctggagatgatgttagtgaacaggatgtgccagacctgtttgacacggataatgttattgtctgtcagtatgataagattcatcgaagcaagaacaaatggaaattctatttgaaagatggtgttatgtgttttggagggagagactatgtatttgcaaaagccattggtgatgcagagtggtagtaatgaactagtccgtaacttgaaagtatttcgatttcttggctttatatatcttgtggaaaggacgaggcagcactaacgcctatattctt

SEQ ID NO: 668 - DNA, 2453 bp, Homo sapiens
  source 1..2453: mol_type = genomic DNA
accgccaccatggtagccaaacccccagtaatgtcttttcattttgcccaagacctttggccagagcagaacataaaagattctttccagaaagtgacactgagaagatacggaaaatgtgaatatgagaatttacagttaagaaaaggctgtaaacatgtggatgagtgtacggggcacaaaggaggtcataatacagttaaccaatgtttgacagctaccccaagcaaaatattccagtgtaataaatatgtgaaagtctttgataaattttcaaattcaaatagatataagagaagacatacaggaaacaaacacttcaaatgtaaagaatgtagcaaatcattttgcgtgctttcacaactaactcagcatagaagaattcatactagagtgaattcctacaaatgtgaagaatgtggaaaagcctttaactggttctcaactcttactaaacataagagaattcatactggagaaaagccctacaaatgtgaagaatgtggcaaagcctttaaccagtcctcacaacttactaggcataagataattcatactgaagagaaacccaacaaatgtgaagaatgtggcaaggcctttaaacaggcctcacaccttactatacataaaataattcatactggagaaaaaccttacaaatatgaagaatgtggcaaagtctttagccagtcctcacaccttactacacaaaagatacttcacactggagagaacctctacaagtgtaaagaatgtggaaaagcttttaacctattctcaaatcttactaaccataagagaattcatgctggggagaaaccctacaaatgtaaagaatgtggcagagcttttaacatatcctcaaaccttaataaacaggagaaaattcatactggagggaaactcaacaaatgtgaagaatgtgacaaagcttttaaccgatccttaaaacttactgcacataagaaaattctaatggaagagaaaccctacaaatgtgaagaatgtggcaaagtctttaaccagttctcaactcttactagacataagataattcatactggagagaaaccctacaaatgtaaagaatgtggcaaagcttttaaccaatcttcaaaccttactgaacataagaaaattcatactgcagagaaatcctataaatgtgaagaatgtggcaaagcttttaaccaacactcaaacctaattaaccataggaaaatttattctggagagaaaccatacaaatgtgaagaatgtggaaaagcttttaatcgatcctcaacccttactagacataagaaaattcatactggagagaaaccctacaaatgtgaagaatgtgacagagcttttagccagtcttcaaaccttactgaacataagaaaattcatactggagagaaaccctataaatgtgaggaatgtggcaaagcttttaaccgattctcaacccttactaaacataagagaattcatactggagaaaaaccctataaatgtgaagaatgtggaaaagcctttaatcaatcctatcaacttactagacataagatagttcatactaaagagaaactcaacaaatgtgaagaatttggcaaggcctttaaacagtcctcacaccgtactatacataaaattattcatactggagagaaaccctacaaatgtgaagaacatggcaaagtttttaaccagtcctcaaaccttactacacaaaagataattcatactggagagaacctctacaaatttgaagaacatggaaaagcttttaacctattctcaaacattactaaccataagataatttatactggagagaaaccccacaaatgtgaagaatgtggaaaagcttataaccgattctcaaacctaactatacataagagaattcatacgggagagaaaccttaccaatgtgcagaatgtggcaaagcctttaactgctcctcaacccttaatagacataagataattcatactggagagaaaccttacaaatgtaaagaatgtggcaaagcttttaacctatcctcaacccttactgcacataagaaaattcatactggagagaaaccctataaatgtgaagaatgtggcaaagcttttaaccaatcctcaaaccttactacacataagaaaattcatacttcagagaaaccctacaaatgtgaagaatgtggcaaatcctttaaccagttctcatctcttaatatacataagataattcatactggagagaaaccctacaaatgtggagattatggcagagctttcaacctatcctcaaatcttactacacataagaaaattcatactggagagaaaccctacaaatgtgagtatggcaaaacttagtaatgaactagtccgtaacttgaaagtatttcgatttcttggctttatatatcttgtggaaaggacgatacataacgggataggagtctgga

SEQ ID NO: 669 - DNA, 2660 bp, Homo sapiens
  source 1..2660: mol_type = genomic DNA
accgccaccatggaaccactgacatttaaagatgtcgccatagaattctctctggaggagtggcaatgcctggatactgcacagcgggatttatataggaatgtgttgttagagaactacagaaacctggtctttttgggtattgctgtctctaagccatatctgatcacctgtctggagcaaaaaaaagagccctggaatataaaaagacatgagatggtagccaaacccccagtaatgtcttttcattttgcccaagacctttggccagagcagaacataaaagattctttccagaaagtgacactgagaagatacggaaaatgtgaatatgagaatttacagttaagaaaaggctgtaaacatgtggatgagtgtacggggcacaaaggaggtcataatacagttaaccaatgtttgacagctaccccaagcaaaatattccagtgtaataaatatgtgaaagtctttgataaattttcaaattcaaatagatataagagaagacatacaggaaacaaacacttcaaatgtaaagaatgtagcaaatcattttgcgtgctttcacaactaactcagcatagaagaattcatactagagtgaattcctacaaatgtgaagaatgtggaaaagcctttaactggttctcaactcttactaaacataagagaattcatactggagaaaagccctacaaatgtgaagaatgtggcaaagcctttaaccagtcctcacaacttactaggcataagataattcatactgaagagaaacccaacaaatgtgaagaatgtggcaaggcctttaaacaggcctcacaccttactatacataaaataattcatactggagaaaaaccttacaaatatgaagaatgtggcaaagtctttagccagtcctcacaccttactacacaaaagatacttcacactggagagaacctctacaagtgtaaagaatgtggaaaagcttttaacctattctcaaatcttactaaccataagagaattcatgctggggagaaaccctacaaatgtaaagaatgtggcagagcttttaacatatcctcaaaccttaataaacaggagaaaattcatactggagggaaactcaacaaatgtgaagaatgtgacaaagcttttaaccgatccttaaaacttactgcacataagaaaattctaatggaagagaaaccctacaaatgtgaagaatgtggcaaagtctttaaccagttctcaactcttactagacataagataattcatactggagagaaaccctacaaatgtaaagaatgtggcaaagcttttaaccaatcttcaaaccttactgaacataagaaaattcatactgcagagaaatcctataaatgtgaagaatgtggcaaagcttttaaccaacactcaaacctaattaaccataggaaaatttattctggagagaaaccatacaaatgtgaagaatgtggaaaagcttttaatcgatcctcaacccttactagacataagaaaattcatactggagagaaaccctacaaatgtgaagaatgtgacagagcttttagccagtcttcaaaccttactgaacataagaaaattcatactggagagaaaccctataaatgtgaggaatgtggcaaagcttttaaccgattctcaacccttactaaacataagagaattcatactggagaaaaaccctataaatgtgaagaatgtggaaaagcctttaatcaatcctatcaacttactagacataagatagttcatactaaagagaaactcaacaaatgtgaagaatttggcaaggcctttaaacagtcctcacaccgtactatacataaaattattcatactggagagaaaccctacaaatgtgaagaacatggcaaagtttttaaccagtcctcaaaccttactacacaaaagataattcatactggagagaacctctacaaatttgaagaacatggaaaagcttttaacctattctcaaacattactaaccataagataatttatactggagagaaaccccacaaatgtgaagaatgtggaaaagcttataaccgattctcaaacctaactatacataagagaattcatacgggagagaaaccttaccaatgtgcagaatgtggcaaagcctttaactgctcctcaacccttaatagacataagataattcatactggagagaaaccttacaaatgtaaagaatgtggcaaagcttttaacctatcctcaacccttactgcacataagaaaattcatactggagagaaaccctataaatgtgaagaatgtggcaaagcttttaaccaatcctcaaaccttactacacataagaaaattcatacttcagagaaaccctacaaatgtgaagaatgtggcaaatcctttaaccagttctcatctcttaatatacataagataattcatactggagagaaaccctacaaatgtggagattatggcagagctttcaacctatcctcaaatcttactacacataagaaaattcatactggagagaaaccctacaaatgtgagtatggcaaaacttagtaatgaactagtccgtaacttgaaagtatttcgatttcttggctttatatatcttgtggaaaggacgataagtcggtctccagtgtactcgt

SEQ ID NO: 670 - DNA, 2564 bp, Homo sapiens
  source 1..2564: mol_type = genomic DNA
accgccaccatggaaccactgacatttaaagatgtcgccatagaattctctctggaggagtggcaatgcctggatactgcacagcgggatttatataggaatgtgttgttagagaactacagaaacctggtctttttggtaatgtcttttcattttgcccaagacctttggccagagcagaacataaaagattctttccagaaagtgacactgagaagatacggaaaatgtgaatatgagaatttacagttaagaaaaggctgtaaacatgtggatgagtgtacggggcacaaaggaggtcataatacagttaaccaatgtttgacagctaccccaagcaaaatattccagtgtaataaatatgtgaaagtctttgataaattttcaaattcaaatagatataagagaagacatacaggaaacaaacacttcaaatgtaaagaatgtagcaaatcattttgcgtgctttcacaactaactcagcatagaagaattcatactagagtgaattcctacaaatgtgaagaatgtggaaaagcctttaactggttctcaactcttactaaacataagagaattcatactggagaaaagccctacaaatgtgaagaatgtggcaaagcctttaaccagtcctcacaacttactaggcataagataattcatactgaagagaaacccaacaaatgtgaagaatgtggcaaggcctttaaacaggcctcacaccttactatacataaaataattcatactggagaaaaaccttacaaatatgaagaatgtggcaaagtctttagccagtcctcacaccttactacacaaaagatacttcacactggagagaacctctacaagtgtaaagaatgtggaaaagcttttaacctattctcaaatcttactaaccataagagaattcatgctggggagaaaccctacaaatgtaaagaatgtggcagagcttttaacatatcctcaaaccttaataaacaggagaaaattcatactggagggaaactcaacaaatgtgaagaatgtgacaaagcttttaaccgatccttaaaacttactgcacataagaaaattctaatggaagagaaaccctacaaatgtgaagaatgtggcaaagtctttaaccagttctcaactcttactagacataagataattcatactggagagaaaccctacaaatgtaaagaatgtggcaaagcttttaaccaatcttcaaaccttactgaacataagaaaattcatactgcagagaaatcctataaatgtgaagaatgtggcaaagcttttaaccaacactcaaacctaattaaccataggaaaatttattctggagagaaaccatacaaatgtgaagaatgtggaaaagcttttaatcgatcctcaacccttactagacataagaaaattcatactggagagaaaccctacaaatgtgaagaatgtgacagagcttttagccagtcttcaaaccttactgaacataagaaaattcatactggagagaaaccctataaatgtgaggaatgtggcaaagcttttaaccgattctcaacccttactaaacataagagaattcatactggagaaaaaccctataaatgtgaagaatgtggaaaagcctttaatcaatcctatcaacttactagacataagatagttcatactaaagagaaactcaacaaatgtgaagaatttggcaaggcctttaaacagtcctcacaccgtactatacataaaattattcatactggagagaaaccctacaaatgtgaagaacatggcaaagtttttaaccagtcctcaaaccttactacacaaaagataattcatactggagagaacctctacaaatttgaagaacatggaaaagcttttaacctattctcaaacattactaaccataagataatttatactggagagaaaccccacaaatgtgaagaatgtggaaaagcttataaccgattctcaaacctaactatacataagagaattcatacgggagagaaaccttaccaatgtgcagaatgtggcaaagcctttaactgctcctcaacccttaatagacataagataattcatactggagagaaaccttacaaatgtaaagaatgtggcaaagcttttaacctatcctcaacccttactgcacataagaaaattcatactggagagaaaccctataaatgtgaagaatgtggcaaagcttttaaccaatcctcaaaccttactacacataagaaaattcatacttcagagaaaccctacaaatgtgaagaatgtggcaaatcctttaaccagttctcatctcttaatatacataagataattcatactggagagaaaccctacaaatgtggagattatggcagagctttcaacctatcctcaaatcttactacacataagaaaattcatactggagagaaaccctacaaatgtgagtatggcaaaacttagtaatgaactagtccgtaacttgaaagtatttcgatttcttggctttatatatcttgtggaaaggacgactaagtgatgagcattattgcctt

SEQ ID NO: 671 - DNA, 1412 bp, Homo sapiens
  source 1..1412: mol_type = genomic DNA
accgccaccatggactcagtggcctttgaggatgtggctgtgaacttcacccaggaggagtgggctttgctgagtccttcccagaagaatctctacagagatgtgacgctggaaaccttcaggaacctggcctcggtcggaatccaatggaaagaccaggacattgagaatctgtaccaaaacctggggattaagctaagaagtctggtggagagactctgtggacgtaaagaagggaatgaacacagagaaactttcagccagattcctgattgtcacctgaacaagaaaagtcaaactggagtgaaaccatgcaaatgcagcgtgtgtgggaaagtcttcctccgtcattcattcctggacaggcacatgagagctcatgctggacacaaacgatctgagtgtggtggggaatggagagagacgccccgtaaacagaaacaacatgggaaagcctccatttcccccagtagtggtgcacggcgcacagtaacaccaactcgaaagagaccttatgaatgcaaggtgtgcgggaaagcctttaattctcccaatttatttcaaatccatcaaagaactcacactggaaagaggtcctataaatgtagggaaatagtgagagccttcacagtttccagtttctttcgaaaacatggaaaaatgcatactggagaaaaacgctatgaatgtaaatactgtggaaaacctatcgattatcccagtttatttcaaattcatgttagaactcacactggagaaaaaccttacaaatgtaaacaatgtggtaaagccttcatttccgcaggttaccttcggacacatgaaatcagatctcacgcgctggagaaatcccaccaatgtcaggaatgtgggaaaaaactcagttgttccagttcccttcacagacatgaaagaactcatagtggaggaaaactctacgaatgtcaaaaatgtgccaaagtctttagatgtcccacgtcccttcaagcacatgaaagagctcacactggagaaagaccttatgaatgtaataaatgtggtaaaaccttcaattatcccagttgttttcgaagacataaaaaaactcatagtggagaaaagccatatgaatgtacaaggtgtggtaaagcctttgggtggtgcagttccctccgaagacatgaaatgactcacactggagaaaaaccctttgattgtaaacagtgtggtaaagtctttactttttcaaattaccttagacttcatgaaagaactcatttggccgggcgtagccagtgctttggcaggaggcagggggatcacctgagcccaggagtttagtaatgaactagtccgtaacttgaaagtatttcgatttcttggctttatatatcttgtggaaaggacgagcgatgacgtacatatatgaacgt

SEQ ID NO: 672 - DNA, 1730 bp, Homo sapiens
  source 1..1730: mol_type = genomic DNA
accgccaccatggatgacccgaggtatggaatgtgtcctctcaagggagcaagtggatgccctggggctgagaggagtcttctggtgcagtcttattttgaaaaggggccattgacgtttagggatgtggccatagaattctctctggaggagtggcaatgcctggacagtgctcagcagggtttgtataggaaagtgatgttagagaactacagaaacctggtcttcttggcaggtattgctctcactaagccagacctgatcacctgtctggagcaaggaaaagagccctggaatataaagagacatgagatggtagccaaacccccagttatatgttctcattttccccaagacctttgggcagagcaggacattaaagattcttttcaagaagcgattctgaaaaaatatggaaaatatggacatgacaatttacagttacaaaaaggctgtaaaagtgtggatgagtgtaaagtgcacaaagaacatgataacaaattaaaccagtgtttgataactacccagagcaacatatttcaatgtgatccatctgcaaaagtctttcatacattttcaaattcaaacagacataagataagacatactagaaagaaacctttcaaatgtaaaaaatgtgaaaaatcattttgcatgcttttacacctaactcaacataaaagatttcatattacagagaattcctaccaatgtaaagattgtggcaaagccttcaactggttctcaacccttactacacacaggagaattcatactggagagaaaccctacaaatgtgaagaatgtgggaaagcatttaaccggtcctcacaccttactacacataagataattcatactggagagaaaccatacagatgtgaagaatgtgggaaagcttttaaccggtcttcacaccttactacacataaaagaattcatactggagtgaaaccctacaaatgtacagaatgtggcaaagcttttaaccggtcctcacaccttactacacacaggataattcatactggagagaaaccctacaaatgtgaagaatgtggcaaagcctttaaccagtcctcaacccttactacacataagataactcatgctggagagaaaccttacaaatgtgaagaatgtggcaaagctttttaccgattctcataccttactaaacataagacaagtcatactggagagaaattctacaaatgtgaagaatgcggcaaaggctttaactggtcctcagccctcactaaacataagagaattcatactggagagaaaccctacaaatgtgaagaatgtggcaaagcttttaatgagtcctcaaaccttactacccataagatgattcatactggagagaaaccctacaaatgtgacgaatgtggcaaagcctttaaccggtcctcacaactaactgcacataagatgattcatactggagagaaaccctacaaatgtgaggaatgtggcaaagcttttaaccgatcctcaacccttactaaacataagataactcatactggagagaaatcttacaaatgggaagaatgtggtaaagactttaaccagtccctaagccttattaaacaaaataactcatactggagagaaaccctacaaatgtagtaatgaactagtccgtaacttgaaagtatttcgatttcttggctttatatatcttgtggaaaggacgaacgaggtcattaatcgctctcgcg

SEQ ID NO: 673 - DNA, 1763 bp, Homo sapiens
  source 1..1763: mol_type = genomic DNA
accgccaccatggcctttgaggatgtggctgtgtacttctcccaggaggagtgggggctcctggacacagcccagagggccctgtaccgccgcgtgatgctagacaacttcgcacttgtggcctcgctgggactctccacctctcgacctcgtgtggtcatccaactggagcgtggcgaggagccctgggttcccagtggaacggacacaaccctgtccaggaccacctacaggaggcgcaaccctggttcctggagtttgacagaggatagagatgtttctggagaatggccacgagctttcccagataccccacctgggatgactactagcgtcttccctgttgccggtgcctgccacagtgtaaaaagcctgcagagacaacggggtgcctccccatctcgggagagaaaacccacgggggtgtcggtgatctactgggagaggctcctgctaggctcaggcagtgggcaagccagcgtcagcctgcgactgacctccccgcttaggcctcccgagggcgtccggcttagagaaaagacactcacagagcatgcgttgctggggaggcagcccaggacgcctgagcggcagaaaccatgtgcacaggaggtccctgggagaacctttgggagcgcccaggacctggaggctgccggcggtcggggacatcaccgaatgggtgcagtttggcaggagcctcatagactcctcggtggccaggagccctcgacctgggacgagctgggcgaggctcttcacgctggggagaagtccttcgaatgcagggcgtgcagcaaagtgttcgtgaagagctccgacctcctcaagcacctacgcacccacaccggggagcggccctacgagtgcgcccagtgcggcaaggccttcagccagacgtcgcacttgacgcagcaccagcgcatccacagcggcgagacgccctacgcgtgccccgtgtgcggcaaggccttccggcatagctcctcgctggtgcggcaccagcgcatccacacggccgagaagtccttccgctgctccgagtgcggcaaggccttcagccacggctccaacctcagccagcaccgcaagatccacgcgggtgggcgtccttatgcttgcgcacagtgtggccgccgcttctgccgcaactcgcacctgatccagcacgagcgtacgcacacaggcgagaagcccttcgtgtgcgcgctctgcggtgctgccttcagccagggctcctcgctctttaagcaccagcgcgtgcacacaggcgagaagcccttcgcctgcccacagtgcggccgcgcctttagccacagctccaacctcacccagcaccagctcctgcacacgggcgagcggcccttccgctgcgtggactgtggcaaggccttcgccaagggcgccgtgctgctcagccaccggcgcattcacacgggcgagaagcccttcgtgtgtacgcagtgtggccgcgccttccgtgagcgcccggccctcttccaccaccagaggatccataccggcgagaagaccgtccggcgatccagggccagcctgcacccccaggccaggtctgttgccggggcatcatcagaaggtgcgccagcgaaggaaaccgagcccactcccgcctcgggcccagccgccgtctcgcagccagcggaggtctagtaatgaactagtccgtaacttgaaagtatttcgatttcttggctttatatatcttgtggaaaggacgaacgttaaagggagtagcgagagct

SEQ ID NO: 674 - DNA, 1628 bp, Homo sapiens
  source 1..1628: mol_type = genomic DNA
accgccaccatgttaccgacccaagctggggccgcggcggctctgggccggggctcggccctggggggcagcctgaaccggaccccgacggggcggccgggcggcggcggcgggacacgcggggctaacgggggccgggtccccgggaatggcgcggggctcgggcccggccgcctggagcgggaggctgcggcagcggcggcaaccaccccggcgcccaccgcgggggccctctacagcggcagcgagggcgactcggagtcgggcgaggaggaggagctgggcgccgagcggcgcggcctgaagcggagcctgagcgagatggagatcggtatggtggtcggtgggcccgaggcgtcggcagcggccaccgggggctacgggccggtgagcggcgcggtgagcggggccaagccgggtaagaagacccggggccgcgtgaagatcaagatggagttcatcgacaacaagctgcggcgctacacgaccttcagcaagaggaagacgggcatcatgaagaaggcctatgagctgtccacgctgacagggacacaggtgctgttgctggtggccagtgagacaggccatgtgtatacctttgccacccgaaaactgcagcccatgatcaccagtgagaccggcaaggcactgattcagacctgcctcaactcgccagactctccaccccgttcagaccccacaacagaccagagaatgagtgccactggctttgaagagacagatctcacctaccaggtgtcggagtctgacagcagtggggagaccaaggacacactgaagccggcgttcacagtcaccaacctgccgggtacaacctccaccatccaaacagcacctagcacctctaccaccatgcaagtcagcagcggcccctcctttcccatcaccaactacctggcaccagtgtctgctagtgtcagccccagtgctgtcagcagtgccaatgggactgtgctgaagagtacaggcagcggccctgtctcctctgggggccttatgcagctgcctaccagcttcaccctcatgcctggtggggcagtggcccagcaggtcccagtgcaggccattcaagtgcaccaggccccacagcaagcgtctccctcccgtgacagcagcacagacctcacgcagacctcctccagcgggacagtgacgctgcccgccaccatcatgacgtcatccgtgcccacaactgtgggtggccacatgatgtaccctagcccgcatgcggtgatgtatgcccccacctcgggcctgggtgatggcagcctcaccgtgctgaatgccttctcccaggcaccatccaccatgcaggtgtcacacagccaggtccaggagccaggtggcgtcccccaggtgttcctgacagcatcatctgggacagtgcagatccctgtttcagcagttcagctccaccagatggctgtgatagggcagcaggccgggagcagcagcaacctcaccgagctacaggtggtgaacctggacaccgcccacagcaccaagagtgaatagtaatgaactagtccgtaacttgaaagtatttcgatttcttggctttatatatcttgtggaaaggacgagctgggtcggactaagcgggtctg

SEQ ID NO: 675 - DNA, 1727 bp, Homo sapiens
  source 1..1727: mol_type = genomic DNA
accgccaccatgagattgaaaatgacgactcggaattttcctgagagagaagtaccctgtgatgtagaagtggaaagattcacaagggaagttccctgcttgtccagtttaggtgatggttgggactgtgagaaccaggagggacacttgaggcaatcagctttaactctggagaaaccagggactcaggaagcaatttgtgaatatcctggttttggggagcatttgattgcaagctcagaccttccaccgtctcagagagttctggcaacaaatggtttccatgcacctgactcaaatgttagtggtctggattgtgaccccgccttacccagctatcctaaaagttatgcagataagagaactggtgacagtgatgcctgtggaaaaggcttcaaccattccatggaagttattcatggaagaaatccagtgagagagaagccctacaaataccctgaaagtgttaagtcttttaatcattttacctctcttggtcatcagaaaataatgaaaagaggcaagaaatcgtatgaaggtaagaattttgagaacatctttactctgagctcatcgcttaatgaaaaccagagaaatctccctggagagaaacaatatagatgtactgaatgtggcaaatgcttcaaacggaactcttctcttgttttgcatcaccgaactcacaccggagagaagccttatacttgtaatgagtgtggaaagtccttctccaagaactacaacctgattgtgcatcaaagaatccacacaggagagaagccctatgaatgcagtaaatgtgggaaagctttcagtgatggctcagctctgacacagcaccagagaattcacacaggcgagaaaccttatgaatgcctagagtgtggaaaaaccttcaaccgaaattcatccttaattttgcaccaaagaactcatacaggggaaaaaccatatagatgtaacgaatgtgggaaacccttcactgacatctcccaccttacagtgcatctcagaatccacaccggtgagaagccctatgagtgtagcaaatgtggaaaggctttccgggacggctcgtacctcacccagcatgagaggactcacactggagaaaagccctttgagtgtgcagagtgcgggaaatccttcaacagaaactctcacctcattgtgcatcaaaagatccattctggggagaaaccctatgaatgtaaagaatgtggcaagactttcatcgagagtgcgtacctcatcaggcatcagaggattcatactggcgagaagccctatggctgcaaccagtgtcagaaacttttcaggaatatcgctggcctcattaggcaccagaggactcatactggtgagaagccctatgagtgtaatcagtgtggcaaagccttcagggacagctcctgtctgaccaagcaccagagaattcacactaaggagaccccatatcagtgtccagaatgtgggaagtccttcaagcagaactctcacctggcagtacatcagagactccatagcagggagggtcccagccggtgtcctcagtgtggaaaaatgttccaaaagagctcatcccttgttcgacatcaaagagcacacctgggagagcaacccatggaaacatagtaatgaactagtccgtaacttgaaagtatttcgatttcttggctttatatatcttgtggaaaggacgatcgccgcgtagcagacacgtgtga

SEQ ID NO: 676 - DNA, 716 bp, Homo sapiens
  source 1..716: mol_type = genomic DNA
accgccaccatgcaatcatatgcttctgctatgttaagcgtattcaacagcgatgattacagtccagctgtgcaagagaatattcccgctctccggagaagctcttccttcctttgcactgaaagctgtaactctaagtatcagtgtgaaacgggagaaaacagtaaaggcaacgtccaggatagagtgaagcgacccatgaacgcattcatcgtgtggtctcgcgatcagaggcgcaagatggctctagagaatcccagaatgcgaaactcagagatcagcaagcagctgggataccagtggaaaatgcttactgaagccgaaaaatggccattcttccaggaggcacagaaattacaggccatgcacagagagaaatacccgaattataagtatcgacctcgtcggaaggcgaagatgctgccgaagaattgcagtttgcttcccgcagatcccgcttcggtactctgcagcgaagtgcaactggacaacaggttgtacagggatgactgtacgaaagccacacactcaagaatggagcaccagctaggccacttaccgcccatcaacgcagccagctcaccgcagcaacgggaccgctacagccactggacaaagctgtagtaatgaactagtccgtaacttgaaagtatttcgatttcttggctttatatatcttgtggaaaggacgattggccctcgggcatcgaggatgt

SEQ ID NO: 677 - DNA, 1025 bp, Homo sapiens
  source 1..1025: mol_type = genomic DNA
accgccaccatggaagctgataaagatgacacacaacaaattcttaaggagcattcgccagatgaatttataaaagatgaacaaaataagggactaattgatgaaattacaaagaaaaatattcaactaaagaaggagatccaaaagcttgaaacggagttacaagaggctaccaaagaattccagattaaagaggatattcctgaaacaaagatgaaattcttatcagttgaaactcctgagaatgacagccagttgtcaaatatctcctgttcgtttcaagtgagctcgaaagttccttatgagatacaaaaaggacaagcacttatcacctttgaaaaagaagaagttgctcaaaatgtggtaagcatgagtaaacatcatgtacagataaaagatgtaaatctggaggttacggccaagccagttccattaaattcaggagtcagattccaggtttatgtagaagtttctaaaatgaaaatcaatgttactgaaattcctgacacattgcgtgaagatcaaatgagagacaaactagagctgagcttttcaaagtcccgaaatggaggcggagaggtggaccgcgtggactatgacagacagtccgggagtgcagtcatcacgtttgtggagattggagtggctgacaagattttgaaaaagaaagaataccctctttatataaatcaaacctgccatagagttactgtttctccatacacagaaatacacttgaaaaagtatcagatattttcaggaacatctaagaggacagtgcttctgacaggaatggaaggcattcaaatggatgaagaaattgtggaggatttaattaacattcactttcaacgggcaaagaatggaggtggagaagtagatgtggtcaagtgttctctaggtcaacctcacatagcatactttgaagaatagtaatgaactagtccgtaacttgaaagtatttcgatttcttggctttatatatcttgtggaaaggacgatgagatacgtgataagttcacgtt

SEQ ID NO: 678 - DNA, 1463 bp, Homo sapiens
  source 1..1463: mol_type = genomic DNA
accgccaccatgcgggtccagaatgagggaactggcaagagctcttggtggatcatcaaccctgatggggggaagagcggaaaagccccccggcggcgggctgtctccatggacaatagcaacaagtataccaagagccgtggccgcgcagccaagaagaaggcagccctgcagacagcccccgaatcagctgacgacagtccctcccagctctccaagtggcctggcagccccacgtcacgcagcagtgatgagctggatgcgtggacggacttccgttcacgcaccaattctaacgccagcacagtcagtggccgcctgtcgcccatcatggcaagcacagagttggatgaagtccaggacgatgatgcgcctctctcgcccatgctctacagcagctcagccagcctgtcaccttcagtaagcaagccgtgcacggtggaactgccacggctgactgatatggcaggcaccatgaatctgaatgatgggctgactgaaaacctcatggacgacctgctggataacatcacgctcccgccatcccagccatcgcccactgggggactcatgcagcggagctctagcttcccgtataccaccaagggctcgggcctgggctccccaaccagctcctttaacagcacggtgttcggaccttcatctctgaactccctacgccagtctcccatgcagaccatccaagagaacaagccagctaccttctcttccatgtcacactatggtaaccagacactccaggacctgctcacttcggactcacttagccacagcgatgtcatgatgacacagtcggaccccttgatgtctcaggccagcaccgctgtgtctgcccagaattcccgccggaacgtgatgcttcgcaatgatccgatgatgtcctttgctgcccagcctaaccagggaagtttggtcaatcagaacttgctccaccaccagcaccaaacccagggcgctcttggtggcagccgtgccttgtcgaattctgtcagcaacatgggcttgagtgagtccagcagccttgggtcagccaaacaccagcagcagtctcctgtcagccagtctatgcaaaccctctcggactctctctcaggctcctccttgtactcaactagtgcaaacctgcccgtcatgggccatgagaagttccccagcgacttggacctggacatgttcaatgggagcttggaatgtgacatggagtccattatccgtagtgaactcatggatgctgatgggttggattttaactttgattccctcatctccacacagaatgttgttggtttgaacgtggggaacttcactggtgctaagcaggcctcatctcagagctgggtgccaggctagtaatgaactagtccgtaacttgaaagtatttcgatttcttggctttatatatcttgtggaaaggacgattccaaccgtcctgacaactgagt

SEQ ID NO: 679 - DNA, 2069 bp, Homo sapiens
  source 1..2069: mol_type = genomic DNA
accgccaccatggccgaggcgcctcaggtggtggagatcgacccggacttcgagccgctgccccggccgcgctcgtgcacctggccgctgcccaggccggagtttagccagtccaactcggccacctccagcccggcgccgtcgggcagcgcggctgccaaccccgacgccgcggcgggcctgccctcggcctcggctgccgctgtcagcgccgacttcatgagcaacctgagcttgctggaggagagcgaggacttcccgcaggcgcccggctccgtggcggcggcggtggcggcggcggccgccgcggccgccaccggggggctgtgcggggacttccagggcccggaggcgggctgcctgcacccagcgccaccgcagcccccgccgcccgggccgctgtcgcagcacccgccggtgccccccgccgccgctgggccgctcgcggggcagccgcgcaagagcagctcgtcccgccgcaacgcgtggggcaacctgtcctacgccgacctcatcaccaaggccatcgagagctcggcggagaagcggctcacgctgtcgcagatctacgagtggatggtcaagagcgtgccctacttcaaggataagggtgacagcaacagctcggcgggctggaagaattcaattcgtcataatctgtccctacacagcaagttcattcgtgtgcagaatgaaggaactggaaaaagttcttggtggatgctcaatccagagggtggcaagagcgggaaatctcctaggagaagagctgcatccatggacaacaacagtaaatttgctaagagccgaagccgagctgccaagaagaaagcatctctccagtctggccaggagggtgctggggacagccctggatcacagttttccaaatggcctgcaagccctggctctcacagcaatgatgactttgataactggagtacatttcgccctcgaactagctcaaatgctagtactattagtgggagactctcacccattatgaccgaacaggatgatcttggagaaggggatgtgcattctatggtgtacccgccatctgccgcaaagatggcctctactttacccagtctgtctgagataagcaatcccgaaaacatggaaaatcttttggataatctcaaccttctctcatcaccaacatcattaactgtttcgacccagtcctcacctggcaccatgatgcagcagacgccgtgctactcgtttgcgccaccaaacaccagtttgaattcacccagcccaaactaccaaaaatatacatatggccaatccagcatgagccctttgccccagatgcctatacaaacacttcaggacaataagtcgagttatggaggtatgagtcagtataactgtgcgcctggactcttgaaggagttgctgacttctgactctcctccccataatgacattatgacaccagttgatcctggggtagcccagcccaacagccgggttctgggccagaacgtcatgatgggccctaattcggtcatgtcaacctatggcagccaggcatctcataacaaaatgatgaatcccagctcccatacccaccctggacatgctcagcagacatctgcagttaacgggcgtcccctgccccacacggtaagcaccatgccccacacctcgggtatgaaccgcctgacccaagtgaagacacctgtacaagtgcctctgccccaccccatgcagatgagtgccctggggggctactcctccgtgagcagctgcaatggctatggcagaatgggccttctccaccaggagaagctcccaagtgacttggatggcatgttcattgagcgcttagactgtgacatggaatccatcattcggaatgacctcatggatggagatacattggattttaactttgacaatgtgttgcccaaccaaagcttcccacacagtgtcaagacaacgacacatagctgggtgtcaggctagtaatgaactagtccgtaacttgaaagtatttcgatttcttggctttatatatcttgtggaaaggacgaagattattagatgcttgcctcggt

SEQ ID NO: 680 - DNA, 1580 bp, Homo sapiens
  source 1..1580: mol_type = genomic DNA
accgccaccatggctgcgaagctgcgagcgcatcaggtggacgtggacccggacttcgcgccgcagagccggccgcgctcgtgtacctggcccctgccgcagcctgacttggccggcgacgaggacggagcgctgggcgcaggggtggccgagggcgccgaggactgcgggccggagcgccgggctacggccccggcgatggccccagcgccgcccctgggcgcggaggtcggaccgctgcggaaagcgaagagctctcggcggaacgcgtgggggaacctgtcctacgccgacctcatcaccaaagccatcgagagcgccccggacaagcggctcacgctctcgcagatctacgactggatggtccgttacgtgccctacttcaaggataaaggcgacagcaacagctcggccggctggaagaactccatccggcacaacctgtcgctgcacacccgtttcatccgcgtgcagaacgagggcaccggcaagagttcgtggtggatgctgaaccccgagggcggaaagacagggaagaccccgcggcgcagggccgtgtccatggacaacggggccaagttcctgcgcatcaagggcaaggcgagcaagaagaagcagctgcaggcgcccgagcgaagcccggacgacagctccccgagtgcgcccgccccggggccggtgcctgccgcagccaagtgggccgccagccccgcctcgcacgccagcgacgactacgaggcttgggccgacttccgcggcggcgggagacccctgctcggggaggcggccgagctggaggacgacgaggccctggaggccctggcgccatcatcgccgctcatgtacccaagccccgccagcgcgctgtcgccggcgctgggctcgcgctgtccgggtgagctgccccgcctggccgagctgggaggcccgctgggcctgcacggcggcggcggcgcggggctgcccgagggcctgctggacggcgcgcaggacgcgtacgggccgcgggcccgcgccaggcccggcccggtgctgggtgcgccgggggagctggcgctggcgggcgcagccgccgcctaccccggcaaaggggcggccccgtacgcgccgcccgcgccctcgcgcagtgccttagcccaccccatcagccttatgacgctgcccggcgaggcgggcgccgcgggcctggcaccgccgggccacgccgccgccttcgggggcccgcccggcggcctcctgctggacgctctgccggggccctacgctgccgccgccgccgggccgctgggcgccgcgcccgaccgcttcccggccgacctggacctcgacatgttcagcgggagcctcgagtgcgacgtggagtccatcatcctcaacgacttcatggacagcgacgaaatggacttcaacttcgattcggccctgcctccgccgccgccgggcctggccggggccccgccccccaaccagagctgggtgccgggctagtaatgaactagtccgtaacttgaaagtatttcgatttcttggctttatatatcttgtggaaaggacgactttcgatgatatagcggttagcc

SEQ ID NO: 681 - DNA, 1619 bp, Homo sapiens
  source 1..1619: mol_type = genomic DNA
accgccaccatggatccggggaatgagaattcagccacagaggctgccgcgatcatagacctagatcccgacttcgaaccccagagccgtccccgctcctgcacctggccccttccccgaccagagatcgctaaccagccgtccgagccgcccgaggtggagccagatctgggggaaaaggtacacacggaggggcgctcagagccgatcctgttgccctctcggctcccagagccggccgggggcccccagcccggaatcctgggggctgtaacaggtcctcggaagggaggctcccgccggaatgcctggggaaatcagtcatatgcagaactcatcagccaggccattgaaagcgccccggagaagcgactgacacttgcccagatctacgagtggatggtccgtactgtaccctacttcaaggacaagggtgacagcaacagctcagcaggatggaagaactcgatccgccacaacctgtccctgcacagcaagttcatcaaggttcacaacgaggccaccggcaaaagctcttggtggatgctgaaccctgagggaggcaagagcggcaaagccccccgccgccgggccgcctccatggatagcagcagcaagctgctccggggccgcagtaaagcccccaagaagaaaccatctgtgctgccagctccacccgaaggtgccactccaacgagccctgtcggccactttgccaagtggtcaggcagcccttgctctcgaaaccgtgaagaagccgatatgtggaccaccttccgtccacgaagcagttcaaatgccagcagtgtcagcacccggctgtcccccttgaggccagagtctgaggtgctggcggaggaaataccagcttcagtcagcagttatgcagggggtgtccctcccaccctcaatgaaggtctagagctgttagatgggctcaatctcacctcttcccattccctgctatctcggagtggtctctctggcttctctttgcagcatcctggggttaccggccccttacacacctacagcagctcccttttcagcccagcagaggggcccctgtcagcaggagaagggtgcttctccagctcccaggctctggaggccctgctcacctctgatacgccaccaccccctgctgacgtcctcatgacccaggtagatcccattctgtcccaggctccgactcttctgttgctgggggggcttccttcctccagtaagctggccacgggcgtcggcctgtgtcccaagcccctagaggctccaggccccagcagtctggttcccaccctttctatgatagcaccacctccagtcatggcaagtgcccccatccccaaggctctggggactcctgtgctcacaccccctactgaagctgcaagccaagacagaatgcctcaggatctagatcttgatatgtatatggagaacctggagtgtgacatggataacatcatcagtgacctcatggatgagggcgagggactggacttcaactttgagccagatccctagtaatgaactagtccgtaacttgaaagtatttcgatttcttggctttatatatcttgtggaaaggacgaaggcgattattgtggacagagggt

SEQ ID NO: 682 - DNA, 1454 bp, Homo sapiens
  source 1..1454: mol_type = genomic DNA
accgccaccatggatccggggaatgagaattcagccacagaggctgccgcgatcatagacctagatcccgacttcgaaccccagagccgtccccgctcctgcacctggccccttccccgaccagagatcgctaaccagccgtccgagccgcccgaggtggagccagatctgggggaaaaggccattgaaagcgccccggagaagcgactgacacttgcccagatctacgagtggatggtccgtactgtaccctacttcaaggacaagggtgacagcaacagctcagcaggatggaagaactcgatccgccacaacctgtccctgcacagcaagttcatcaaggttcacaacgaggccaccggcaaaagctcttggtggatgctgaaccctgagggaggcaagagcggcaaagccccccgccgccgggccgcctccatggatagcagcagcaagctgctccggggccgcagtaaagcccccaagaagaaaccatctgtgctgccagctccacccgaaggtgccactccaacgagccctgtcggccactttgccaagtggtcaggcagcccttgctctcgaaaccgtgaagaagccgatatgtggaccaccttccgtccacgaagcagttcaaatgccagcagtgtcagcacccggctgtcccccttgaggccagagtctgaggtgctggcggaggaaataccagcttcagtcagcagttatgcagggggtgtccctcccaccctcaatgaaggtctagagctgttagatgggctcaatctcacctcttcccattccctgctatctcggagtggtctctctggcttctctttgcagcatcctggggttaccggccccttacacacctacagcagctcccttttcagcccagcagaggggcccctgtcagcaggagaagggtgcttctccagctcccaggctctggaggccctgctcacctctgatacgccaccaccccctgctgacgtcctcatgacccaggtagatcccattctgtcccaggctccgactcttctgttgctgggggggcttccttcctccagtaagctggccacgggcgtcggcctgtgtcccaagcccctagaggctccaggccccagcagtctggttcccaccctttctatgatagcaccacctccagtcatggcaagtgcccccatccccaaggctctggggactcctgtgctcacaccccctactgaagctgcaagccaagacagaatgcctcaggatctagatcttgatatgtatatggagaacctggagtgtgacatggataacatcatcagtgacctcatggatgagggcgagggactggacttcaactttgagccagatccctagtaatgaactagtccgtaacttgaaagtatttcgatttcttggctttatatatcttgtggaaaggacgaggtgtatcacgtaactctgtctaa

SEQ ID NO: 683 - DNA, 1697 bp, Homo sapiens
  source 1..1697: mol_type = genomic DNA
accgccaccatgatggacggccgcctcctggaacacccgcatgcccagttcgggggctcgctgggcggcgtggtgggcttcccctacccgctgggccaccaccacgtgtacgagctggccgggcaccagctgcagtcggccgccgccgccgcctcggtgcccttctccatcgacggcctgctcgggggctcgtgcgccgccgccgcctcggtggtcaaccccacgccgctgctgccagccgcctgcggggtcggcggggacggccagcccttcaagctgtcagactcgggggacccggacaaggagagcccgggctgcaagcggcggcgcacccgcaccaacttcaccggctggcagctggaggagctggagaaggcgttcaacgagagccactatcccgacgtgttcatgcgcgaggcgctggcgctgcgcctagacctggtcgagtcccgagttcaggtctggttccaaaaccgccgggccaagtggaggaagaaggagaacacgaaaaagggcccggggcggccggcgcacaactcgcacccgaccacgtgcagcggcgagcccatggacccggaggagatcgcgcgcaaggagctggagaagatggagaagaagaagcgcaagcacgagaagaagctgctgaagagccagggccgccacttgcactcgcccggcggcctgtccctgcacagcgcgcccagctccgacagcgacagcggcggcggcggcctgtctccggagccgcccgagccgccgccgcccgccgccaagggccccggagcgcacgcctcgggcgccgcggggaccgcgcccgcccctcccggcgagccgcctgcacccggcacctgcgaccccgccttctacccgagccaaagaagcggcgccggcccacagccgcgcccaggtcgccctgcggacaaggacgcggcctcgtgcgggccaggggccgctgtggcggcggtggagcgcggcgccgcggggctgcccaaggccagcccattcagcgtggagagcctcctgtccgactcgccgccgcgccggaaagccgcttccaacgccgccgccgccgccgccgcggggctggacttcgcgcccgggctgccgtgcgcgccgcggaccctgatcggcaagggccacttcctcctctaccccatcacgcagccgctcggcttcctggtgccgcaggccgcgctcaagggcggcgcgggcctggagccggcgcccaaggacgcgccgcccgcgcccgccgtgccgcccgcgccgcctgcccaggccagtttcggggccttctcggggcccggcggcgccccggactcggccttcgcgcgtcgcagccccgacgccgtcgcctccccgggggccccagccccggccccggcgcctttccgggacctcgcctcggcagcggctaccgagggcggcggcggggactgcgcggacgcggggaccgccggccccgcgcccccgccgcccgcgccgtcgcccaggcccggccctcggcctcccagccccgccgaggagccggccacctgcggggttcccgagcctggcgcggcggccggacccagcccgccggagggcgaggagctggacatggactagtaatgaactagtccgtaacttgaaagtatttcgatttcttggctttatatatcttgtggaaaggacgatggtcaacttcttcctgaccatct

SEQ ID NO: 684 - DNA, 4127 bp, Homo sapiens
  source 1..4127: mol_type = genomic DNA
accgccaccatgacaaagaggaagaagaccatcaaccttaatatacaagacgcccagaagaggactgctctacactgggcctgtgtcaatggccatgaggaagtagtaacatttctggtagacagaaagtgccagcttgacgtccttgatggcgaacacaggacacctctgatgaaggctctacaatgccatcaggaggcttgtgcaaatattctgatagattctggtgccgatataaatctcgtagatgtgtatggcaacacggctctccattatgctgtttatagtgagattttgtcagtggtggcaaaactgctgtcccatggtgcagtcatcgaagtgcacaacaaggctagcctcacaccacttttactatccataacgaaaagaagtgagcaaattgtggaatttttgctgataaaaaatgcaaatgcgaatgcagttaataagtataaatgcacagccctcatgcttgctgtatgtcatggatcatcagagatagttggcatgcttcttcagcaaaatgttgacgtctttgctgcagatatatgtggagtaactgcagaacattatgctgttacttgtggatttcatcacattcatgaacaaattatggaatatatacgaaaattatctaaaaatcatcaaaataccaatccagaaggaacatctgcaggaacacctgatgaggctgcacccttggcggaaagaacacctgacacagctgaaagcttggtggaaaaaacacctgatgaggctgcacccttggtggaaagaacacctgacacggctgaaagcttggtggaaaaaacacctgatgaggctgcatccttggtggagggaacatctgacaaaattcaatgtttggagaaagcgacatctggaaagttcgaacagtcagcagaagaaacacctagggaaattacgagtcctgcaaaagaaacatctgagaaatttacgtggccagcaaaaggaagacctaggaagatcgcatgggagaaaaaagaagacacacctagggaaattatgagtcccgcaaaagaaacatctgagaaatttacgtgggcagcaaaaggaagacctaggaagatcgcatgggagaaaaaagaaacacctgtaaagactggatgcgtggcaagagtaacatctaataaaactaaagttttggaaaaaggaagatctaagatgattgcatgtcctacaaaagaatcatctacaaaagcaagtgccaatgatcagaggttcccatcagaatccaaacaagaggaagatgaagaatattcttgtgattctcggagtctctttgagagttctgcaaagattcaagtgtgtatacctgagtctatatatcaaaaagtaatggagataaatagagaagtagaagagcctcctaagaagccatctgccttcaagcctgccattgaaatgcaaaactctgttccaaataaagcctttgaattgaagaatgaacaaacattgagagcagatccgatgttcccaccagaatccaaacaaaaggactatgaagaaaattcttgggattctgagagtctctgtgagactgtttcacagaaggatgtgtgtttacccaaggctacacatcaaaaagaaatagataaaataaatggaaaattagaagagtctcctaataaagatggtcttctgaaggctacctgcggaatgaaagtttctattccaactaaagccttagaattgaaggacatgcaaactttcaaagcagagcctccggggaagccatctgccttcgagcctgccactgaaatgcaaaagtctgtcccaaataaagccttggaattgaaaaatgaacaaacattgagagcagatgagatactcccatcagaatccaaacaaaaggactatgaagaaaattcttgggatactgagagtctctgtgagactgtttcacagaaggatgtgtgtttacccaaggctgcgcatcaaaaagaaatagataaaataaatggaaaattagaagggtctcctgttaaagatggtcttctgaaggctaactgcggaatgaaagtttctattccaactaaagccttagaattgatggacatgcaaactttcaaagcagagcctcccgagaagccatctgccttcgagcctgccattgaaatgcaaaagtctgttccaaataaagccttggaattgaagaatgaacaaacattgagagcagatgagatactcccatcagaatccaaacaaaaggactatgaagaaagttcttgggattctgagagtctctgtgagactgtttcacagaaggatgtgtgtttacccaaggctacgcatcaaaaagaaatagataaaataaatggaaaattagaagagtctcctgataatgatggttttctgaaggctccctgcagaatgaaagtttctattccaactaaagccttagaattgatggacatgcaaactttcaaagcagagcctcccgagaagccatctgccttcgagcctgccattgaaatgcaaaagtctgttccaaataaagccttggaattgaagaatgaacaaacattgagagcagatcagatgttcccttcagaatcaaaacaaaagaaggttgaagaaaattcttgggattctgagagtctccgtgagactgtttcacagaaggatgtgtgtgtacccaaggctacacatcaaaaagaaatggataaaataagtggaaaattagaagattcaactagcctatcaaaaatcttggatacagttcattcttgtgaaagagcaagggaacttcaaaaagatcactgtgaacaacgtacaggaaaaatggaacaaatgaaaaagaagttttgtgtactgaaaaagaaactgtcagaagcaaaagaaataaaatcacagttagagaaccaaaaagttaaatgggaacaagagctctgcagtgtgagattgactttaaaccaagaagaagagaagagaagaaatgccgatatattaaatgaaaaaattagggaagaattaggaagaatcgaagagcagcataggaaagagttagaagtgaaacaacaacttgaacaggctctcagaatacaagatatagaattgaagagtgtagaaagtaatttgaatcaggtttctcacactcatgaaaatgaaaattatctcttacatgaaaattgcatgttgaaaaaggaaattgccatgctaaaactggaaatagccacactgaaacaccaataccaggaaaaggaaaataaatactttgaggacattaagattttaaaagaaaagaatgctgaacttcagatgaccctaaaactgaaagaggaatcattaactaaaagggcatctcaatatagtgggcagcttaaagttctgatagctgagaacacaatgctcacttctaaattgaaggaaaaacaagacaaagaaatactagaggcagaaattgaatcacaccatcctagactggcttctgctgtacaagaccatgatcaaattgtgacatcaagaaaaagtcaagaacctgctttccacattgcaggagatgcttgtttgcaaagaaaaatgaatgttgatgtgagtagtacgatatataacaatgaggtgctccatcaaccactttctgaagctcaaaggaaatccaaaagcctaaaaattaatctcaattatgcaggagatgctctaagagaaaatacattggtttcagaacatgcacaaagagaccaacgtgaaacacagtgtcaaatgaaggaagctgaacacatgtatcaaaacgaacaagataatgtgaacaaacacactgaacagcaggagtctctagatcagaaattatttcaactacaaagcaaaaatatgtggcttcaacagcaattagttcatgcacataagaaagctgacaacaaaagcaagataacaattgatattcattttcttgagaggaaaatgcaacatcatctcctaaaagagaaaaatgaggagatatttaattacaataaccatttaaaaaaccgtatatatcaatatgaaaaagagaaagcagaaacagaaaactcatagtaatgaactagtccgtaacttgaaagtatttcgatttcttggctttatatatcttgtggaaaggacgaagatatccggatgtgcagaagcgg

SEQ ID NO: 685 - DNA, 1604 bp, Homo sapiens
  source 1..1604: mol_type = genomic DNA
accgccaccatggccactgtcattcctggtgatttgtcagaagtaagagatacccagaaagtcccttcagggaaacgtaagcgtggtgaaaccaaaccaagaaaaaactttccttgccaactgtgtgacaaggcctttaacagtgttgagaaattaaaggttcactcctactctcacacaggagagaggccctacaagtgcatacaacaagactgcaccaaggcctttgtttctaagtacaaattacaaaggcacatggctactcattctcctgagaaaacccacaagtgtaattattgtgagaaaatgtttcaccggaaagatcatctgaagaatcacctccatacacacgaccctaacaaagagacgtttaagtgcgaagaatgtggcaagaactacaataccaagcttggatttaaacgtcacttggccttgcatgccgcaacaagtggtgacctcacctgtaaggtatgtttgcaaacttttgaaagcacgggagtgcttctggagcaccttaaatctcatgcaggcaagtcgtctggtggggttaaagaaaaaaagcaccagtgcgaacattgtgatcgccggttctacacccgaaaggatgtccggagacacatggtggtgcacactggaagaaaggacttcctctgtcagtattgtgcacagagatttgggcgaaaggatcacctgactcgacatatgaagaagagtcacaatcaagagcttctgaaggtcaaaacagaaccagtggatttccttgacccatttacctgcaatgtgtctgtgcctataaaagacgagctccttccggtgatgtccttaccttccagtgaactgttatcaaagccattcacaaacactttgcagttaaacctctacaacactccatttcagtccatgcagagctcgggatctgcccaccaaatgatcacaactttacctttgggaatgacatgcccaatagatatggacactgttcatccctctcaccacctttctttcaaatatccgttcagttctacctcatatgcaatttctattcctgaaaaagaacagccattaaagggggaaattgagagttacctgatggagttacaaggtggcgtgccctcttcatcccaagattctcaagcatcgtcatcatctaagctagggttggatcctcagattgggtccctagatgatggtgcaggagacctctccctatccaaaagctctatctccatcagtgaccccctaaacacaccagcattggatttttctcagttgtttaatttcatacctttaaatggtcctccctataatcctctatcagtggggagccttggaatgagctattcccaggaagaagcacattcttctgtttcccagctccccccacaaacacaggatcttcaggatcctgcaaacactatagggcttgggtctctgcactcactgtcagcagctttcaccagcagtttaagcacaagtaccaccctcccacgtttccatcaagcttttcagtagtaatgaactagtccgtaacttgaaagtatttcgatttcttggctttatatatcttgtggaaaggacgactaacgggtgataacgcacgacca

SEQ ID NO: 686 - DNA, 1358 bp, Homo sapiens
  source 1..1358: mol_type = genomic DNA
accgccaccatggctactcattctcctgagaaaacccacaagtgtaattattgtgagaaaatgtttcaccggaaagatcatctgaagaatcacctccatacacacgaccctaacaaagagacgtttaagtgcgaagaatgtggcaagaactacaataccaagcttggatttaaacgtcacttggccttgcatgccgcaacaagtggtgacctcacctgtaaggtatgtttgcaaacttttgaaagcacgggagtgcttctggagcaccttaaatctcatgcaggcaagtcgtctggtggggttaaagaaaaaaagcaccagtgcgaacattgtgatcgccggttctacacccgaaaggatgtccggagacacatggtggtgcacactggaagaaaggacttcctctgtcagtattgtgcacagagatttgggcgaaaggatcacctgactcgacatatgaagaagagtcacaatcaagagcttctgaaggtcaaaacagaaccagtggatttccttgacccatttacctgcaatgtgtctgtgcctataaaagacgagctccttccggtgatgtccttaccttccagtgaactgttatcaaagccattcacaaacactttgcagttaaacctctacaacactccatttcagtccatgcagagctcgggatctgcccaccaaatgatcacaactttacctttgggaatgacatgcccaatagatatggacactgttcatccctctcaccacctttctttcaaatatccgttcagttctacctcatatgcaatttctattcctgaaaaagaacagccattaaagggggaaattgagagttacctgatggagttacaaggtggcgtgccctcttcatcccaagattctcaagcatcgtcatcatctaagctagggttggatcctcagattgggtccctagatgatggtgcaggagacctctccctatccaaaagctctatctccatcagtgaccccctaaacacaccagcattggatttttctcagttgtttaatttcatacctttaaatggtcctccctataatcctctatcagtggggagccttggaatgagctattcccaggaagaagcacattcttctgtttcccagctccccccacaaacacaggatcttcaggatcctgcaaacactatagggcttgggtctctgcactcactgtcagcagctttcaccagcagtttaagcacaagtaccaccctcccacgtttccatcaagcttttcagtagtaatgaactagtccgtaacttgaaagtatttcgatttcttggctttatatatcttgtggaaaggacgaccgctaaaccctggatgtccgact

SEQ ID NO: 687 - DNA, 1286 bp, Homo sapiens
  source 1..1286: mol_type = genomic DNA
accgccaccatgatgatgatggcgctgagcaagaccttcgggcagaagcccgtgaagttccagctggaggacgacggcgagttctacatgatcggctccgaggtgggaaactacctccgtatgttccgaggttctctgtacaagagatacccctcactctggaggcgactagccactgtggaagagaggaagaaaatagttgcatcgtcacatgatcacggatacacgactctagccaccagtgtgaccctgttaaaagcctcggaagtggaagagattctggatggcaacgatgagaagtacaaggctgtgtccatcagcacagagccccccacctacctcagggaacagaaggccaagaggaacagccagtgggtacccaccctgcccaacagctcccaccacttagatgccgtgccatgctccacaaccatcaacaggaaccgcatgggccgagacaagaagagaaccttccccctttggtgtggatgcatcgctgcactcaccctccgtgctgattccgccttagttctccactttgatgaccatgacccagctgtgatccatgagaacgcatctcagcccgaggtgctggtccccatccggctggacatggagatcgatgggcagaagctgcgagacgccttcacctggaacatgaatgagaagttgatgacgcctgagatgttttcagaaatcctctgtgacgatctggatttgaacccgctgacgtttgtgccagccatcgcctctgccatcagacagcagatcgagtcctaccccacggacagcatcctggaggaccagtcagaccagcgcgtcatcatcaagctgaacatccatgtgggaaacatttccctggtggaccagtttgagtgggacatgtcagagaaggagaactcaccagagaagtttgccctgaagctgtgctcggagctggggttgggcggggagtttgtcaccaccatcgcatacagcatccggggacagctgagctggcatcagaagacctacgccttcagcgagaaccctctgcccacagtggagattgccatccggaacacgggcgatgcggaccagtggtgcccactgctggagactctgacagacgctgagatggagaagaagatccgcgaccaggacaggaacacgaggcggatgaggcgtcttgccaacacggccccggcctggtagtaatgaactagtccgtaacttgaaagtatttcgatttcttggctttatatatcttgtggaaaggacgaagcttccatgatcatttgcaatcc

SEQ ID NO: 688 - DNA, 1259 bp, Homo sapiens
  source 1..1259: mol_type = genomic DNA
accgccaccatgatgatgatggcgctgagcaagaccttcgggcagaagcccgtgaagttccagctggaggacgacggcgagttctacatgatcggctccgaggtgggaaactacctccgtatgttccgaggttctctgtacaagagatacccctcactctggaggcgactagccactgtggaagagaggaagaaaatagttgcatcgtcacatggtaaaaaaacaaaacctaacactaaggatcacggatacacgactctagccaccagtgtgaccctgttaaaagcctcggaagtggaagagattctggatggcaacgatgagaagtacaaggctgtgtccatcagcacagagccccccacctacctcagggaacagaaggccaagaggaacagccagtgggtacccaccctgcccaacagctcccaccacttagatgccgtgccatgctccacaaccatcaacaggaaccgcatgggccgagacaagaagagaaccttccccctttgctttgatgaccatgacccagctgtgatccatgagaacgcatctcagcccgaggtgctggtccccatccggctggacatggagatcgatgggcagaagctgcgagacgccttcacctggaacatgaatgagaagttgatgacgcctgagatgttttcagaaatcctctgtgacgatctggatttgaacccgctgacgtttgtgccagccatcgcctctgccatcagacagcagatcgagtcctaccccacggacagcatcctggaggaccagtcagaccagcgcgtcatcatcaagctgaacatccatgtgggaaacatttccctggtggaccagtttgagtgggacatgtcagagaaggagaactcaccagagaagtttgccctgaagctgtgctcggagctggggttgggcggggagtttgtcaccaccatcgcatacagcatccggggacagctgagctggcatcagaagacctacgccttcagcgagaaccctctgcccacagtggagattgccatccggaacacgggcgatgcggaccagtggtgcccactgctggagactctgacagacgctgagatggagaagaagatccgcgaccaggacaggaacacgaggcggatgaggcgtcttgccaacacggccccggcctggtagtaatgaactagtccgtaacttgaaagtatttcgatttcttggctttatatatcttgtggaaaggacgacttgccaccagtcttatcttcggg

SEQ ID NO: 689 - DNA, 1736 bp, Homo sapiens
  source 1..1736: mol_type = genomic DNA
accgccaccatggcagttatggacctatcctccccatgggctttaactaaacaggactctgcctgtttccatctgagaaatgctgaagaggaaaggatgattgctgtatttctgacaacctggttacaggaaccaatgactttcaaagatgtagctgtggagttcactcaggaggagtggatgatgctggattctgctcaaagaagtctgtacagagatgtgatgttggaaaactatagaaatctcacctccgtggaatatcagttgtacaggcttactgtgatctccccattggatcaagaagagataaggaatatgaaaaagagaattccccaagccatctgtccagaccagaagattcaacctaaaaccaaagaatcaactgtgcagaaaattttgtgggaggaaccatccaatgcagtgaaaatgataaaactcacaatgcataattggtcctccacattaagagaagactgggaatgccataagatcagaaaacagcataagattccagggggacattggaggcaaatgatatatgccccaaagaaaacagtacctcaggagctattccgtgactatcatgaattagaggaaaactctaaacttggatcaaaacttattttttcacagagcattttcaccagtaaacattgccaaaaatgttactcagagattggatgtttgaaacacaattcaatcataaacaattatgtgaaaaactctataagtgagaagctctatgaaagtcatgaatgtgatacaactctatggcattttcagagaaatcaaacagtacaaaaagagtacacatattctaaacatggaatgcacttcacacataatatgtttcctgtacctaacaatttgcatatggcacagaatgcctgtgaatgtaataaagatgaaacgctgtgtcatcaatcatcccttaagaaacaaggacaaactcatactgaaaagaaacatgaatgcaatcaatgtggaaaagccttcaaaaggatttctaatcttactttatacaagaaaagtcacatgggtgagaaacaatatgaatgtaaagaatgtggtaaagtgttcaatgattcctcaaccttaaggagacatgtaagaactcacactggagagaaaccctatgaatgtaatcaatgtggaaaagctttcagtcaaaaaacatcccttaaggctcacatgagaactcacactggagagaaaccttatgaatgtaatcagtgtggaaaatcctttggcacaagctcttaccttatagtgcacaagagaatacacactggagaaaaactctatgaatgcagtgagtgtggaaaagccttcaacacgagctctcaccttaaagttcataagaaaattcataccggagagaatgtttatgaatgcagtgactgtgggaaagttttcagtggggtctcatcccttagaatgcatataagaactcacactggagagaaaccctatgaatgtaaggaatgtaggaaagccttcagtgtttcctcttcccttaggaggcatgtgagaattcacactggagagaaaccctatgaatgtattcaatgtggaaaagccttcagtcagagctcttcacttattatacacaagagaattcatactgagagagaaaccctgtagtaatgaactagtccgtaacttgaaagtatttcgatttcttggctttatatatcttgtggaaaggacgaagcccacaaacatgtaccacgatg

SEQ ID NO: 690 - DNA, 974 bp, Homo sapiens
  source 1..974: mol_type = genomic DNA
accgccaccatgaggcctgcggtgctgggctccccagaccgagcacccccagaagatgaggggcctgtcatggtgaagctagaggactctgaggaggagggtgaggctgccttatgggacccaggccctgaagctgcacgcctgcgtttccggtgcttccgctatgaggaggccacagggccccaagaggccctggcccagctccgagagctgtgtcgccagtggctgcgtccagaggtacgctccaaggagcagatgctggagctgttggtgctggagcagttcctgggcgcactgccccctgagatccaggcccgtgtgcaggggcagcggccaggcagccccgaggaggctgctgccctagtagatgggctgcgccgggagccgggcggaccccggagatgggtcacagtccaggtgcagggccaggaggtcctatcagagaagatggagccctccagtttccagcccctacctgaaactgagcctccaactccagagcctgggcccaagacacctcctaggactatgcaggaatcaccactgggcctgcaggtgaaagaggagtcagaggttacagaggactcagatttcctggagtctgggcctctagctgccacccaggagtctgtacccaccctcctgcctgaggaggcccagagatgtgggaccgtgctggaccagatctttccccacagcaagactgggcctgagggtccctcatggagggagcaccccagggccctgtggcatgaggaagctgggggcatcttctccccaggggccggagccggggccgccccagcactgggggcggggtggttaggggcggccgttgcgatgtatgtggcaaggtgttcagccaacgcagcaacctgctagtaatgaactagtccgtaacttgaaagtatttcgatttcttggctttatatatcttgtggaaaggacgaaagccacacggaagagctcaattc

SEQ ID NO: 691 - DNA, 1952 bp, Homo sapiens
  source 1..1952: mol_type = genomic DNA
accgccaccatgggactgttgacatttagggatgtggccatagaattctctctggaggagtggcagtgcctggacactgcacagaagaatttatataggaatgtgatgttagagaactacagaaacctggccttcctgggtattgctgtctctaagccagacctcatcatctgtctggagaaagaaaaagagccctggaatatgaagcgagatgagatggtggatgaacccccaggtatatgtcctcattttgctcaagacatttggccagagcagggcgtggaagattcttttcaaaaagtaatactaagaagatttgaaaaatgtggacatgagaatttacagttaagaaaaggttgtaaaagtgtggatgagtgtaaggtacacaaagaaggttataatggacttaaccagtgtttcacaactacccagggcaaagcttctcaatgtggtaaatatttgaaagtcttttataaatttataaatttaaacagatataagataagacatactagaaagaaacctttcaaatgtaaaaattgtgtcaaatcattttgcatgttttcacacaaaacccagcataaaagcatatatactacagagaagtcctacaaatgtaaagaatgtggaaaaacctttaattggtcctcaacccttactaatcataagaaaactcatactgaagaaaagccctacaaatgtgaagaatatggcaaagcttttaatcaatcctcaaattatactacacataaggtaactcatactggagagaagccttacaagtgtgaagaatgtggcaaagcatttagccaatcctcaacactaaccatacataagaggatacatactggagagaaaccctgcaaatgtgaagaatgtggcaaagcatttagccaaccctcagcactaaccatacataagaggatgcacattggagagaaaccctacaaatgtgaagaatgtggcaaagcatttgtttggtcctcaaccctaactagacataagaggctgcacagtggagagaaaccctacaaatgtgaagaatgtgccaaagcttttagccaattcggacaccttactacacataggataattcatactggagagaaaccctacaaatgtgaagaatgtggcaaagcatttatatggccctcaaccctaactaaacataagaggattcacactggagagaaaccctacaaatgtgaagaatgtggcaaagcttttcatcgatcctcaaatcttactaaacataagataattcatactggagagaaaccttacaagtgtgaagaatgcggcaaagcgtttatatggtcctcaaaccttactgaacataagaaaattcatactagagagaaaccctacaaatgtgaagaatgtagtaaagcatttagccgatcctcagccctaactacacataagaggatgcacactggagagaaaccctacaaatgtgaagaatgtggcaaagcttttagccagtcctcaacccttactgcacataagataattcatactggagagaaaccctacaaatgtgaagaatgtggcaaagcatttatattgtcctcgaccctatctaaacataagaggattcacactggagagaaaccctacaaatgtgaagaatgtggcaaaacttttaatcaatcctcaaatcttagtacacataagataattcatactggagagaaaccttacaagtgtgaagaatgtggaaaagcgtttaatcgatcctcaaatcttagtacgcataagataattcatactggagagaaaccttacaagtgtgacgaatgtggcaaatcatttatctggtcctcaaccctttttaagcataagaggattcatacttagtaatgaactagtccgtaacttgaaagtatttcgatttcttggctttatatatcttgtggaaaggacgacataagtcaaccatcttcactccc

SEQ ID NO: 692 - DNA, 1970 bp, Homo sapiens
  source 1..1970: mol_type = genomic DNA
accgccaccatgggatcgttgacatttcgggatgtggccatacaattctctctggaggagtggcaatgcctggacactgcacagcagaatttatataggaatgtgatgttagagaactacagaaacctggtcttcctgggtattgctgcccctaagccagacctgatcatttttctggagcaaggaaaagagccctggaatatgaagagacatgagctggtgaaagaaccgccagttatatgttctcattttgctcaagacctttggccagagcagggcagagaagattctttccaaaaagtgatattgagaagatatgaaaaatgtggacatgagaatttacagttaaaaattggttgtaccaatgtggatgagtgtaaggtgcacaaaaaaggttataataagcttaaccagagtttgacaactacacaaagcaaagtatttcaatgtggcaaatatgcaaacatctttcataaatgttcaaattcaaaaagacataagataaggcatactggaaagaaacttttgaaatgtaaagaatatgtcagatcattttgcatgctttcacacctatctcaacataaaagaatttatactagagagaattcctacaaaagtgaagaacatggcaaagcctttaactggtcctcagcccttacttataagagaattcatactggagagaaaccctgcaaatgtgaagaatgtggcaaagcctttagtaagttctcaatccttactaagcataaggtaattcatactggagagaaacattacaaatgtgaagaatgtggcaaagccttcacccggtcctcaagccttattgaacataagagaagtcatgctggagagaaaccctacaaatgtgaagaatgtggcaaagcctttagtaaggcctcaacccttactgcacataagacaattcatgctggagagaaaccctacaaatgtgaagaatgtggcaaagctttcaaccggtcctcaaaccttatggaacataagagaattcatactggagagaagccctgcaaatgtgaagaatgtggcaaagcctttggtaacttctcaacccttactaaacataaggtaattcatactggagagaaaccctacaaatgtgaagaatgtggcaaagccttcagctggccctcaagccttactgaacacaagagaattcatgctggagacaaaccttacaaatgtgaagaatgtggcaaaacctttaagtggtcctcaacacttactaaacataagataattcatactggagagaaaccctacaaatgtgaagaatgtggcaaagcctttactacattttcgagccttactaaacataaagtaattcatactggagagaaacactacaaatgtgaagaatgtggcaaagtcttcagctggtcctcaagccttactacacataaggcaattcatgctggagagaaactctacaaatgtgaagaatgtggcaaagcctttaagtggtcctcaaaccttatggaacataagagaattcatactggagagaaaccctacaaatgtgaagaatgtggcaaagccttcagtaaggttgcaaaccttactaaacataaggtaattcatactggagagaaacaatacaaatgtgaagaatgtggcaaagccttcatctggtcctcaagacttagtgaacataagagaattcatactggagagaaaccctacaaatgtgaagaatgtggcaaagcctttagctgggtctcagtccttaacaaacataagaaaattcatgctggaaagaaattctacaaatgtgaagaatgtggtaaagacttcaaccaatcctcacaccttactactcataagagaattcatactggaggaaaaaccctacaaatgtagtaatgaactagtccgtaacttgaaagtatttcgatttcttggctttatatatcttgtggaaaggacgaccgaatcccaagagttaatgcgcg

SEQ ID NO: 693 - DNA, 8273 bp, Homo sapiens
  source 1..8273: mol_type = genomic DNA
accgccaccatggcggacgaagaggccgagcaggagaggttgagttgcggcgaaggcggctgcgtcgcggagctgcagcgcctgggcgagcggctccaggagctggagctacagctgcgggagagccgggtaccggccgtggaagcggccaccgactactgtcagcagctgtgccagacactcctagaatatgcagagaaatggaaaacttcagaagatcctttacctttattggaggtatacacagtggctatccaaagttatgttaaagcccgaccttatcttacctctgaatgtgaaaatgtagccttggttctggaacgcttggcattaagctgtgttgaacttttactgtgtctgcctgttgagttatcagataaacagtgggaacaatttcagacactggtgcaggtagctcatgaaaagctgatggagaatggcagctgtgaattgcattttttagctactctagctcaagagactggggtgtggaaaaacccggtactgtgcactattctttcccaggaaccattggataaggataaagtgaatgaatttttagcttttgagggtcccatcttgttggatatgagaattaaacatctaatcaaaacaaatcagttaagtcaagcaactgctctagcaaagctgtgttctgaccatccagagattggcataaaaggtagttttaagcaaacttaccttgtctgtctttgtacatcatcaccaaatggaaagttaatcgaagagatttcagaagttgattgcaaagatgcactggaaatgatctgtaacttagaatctgagggtgatgaaaaaagcgctcttgttttatgtactgcgtttttgtcacgtcagctccaacaaggagatatgtactgcgcttgggaacttactctcttttggagtaaattacaacaaagagtagaaccatctatacaagtgtaccttgagaggtgtcgtcaactttctttgttaacgaaaacagtatatcacattttcttcctgattaaagttattaattcagagactgaaggggctggacttgctacctgtatagaactgtgtgtaaaggctcttcgcttggagtctacagaaaatactgaagtgaaaatatctatttgcaagaccatttcatgtttgttgcctgatgatctggaagttaaacgtgcttgtcaactgagtgaatttcttattgagcctacagtagatgcgtattatgctgtggaaatgttgtataatcagccagaccagaaatatgatgaagagaatcttccaataccaaattctttacgctgtgagctgttacttgtattgaaaactcaatggccctttgatccagaattctgggattggaaaaccttgaaacgacaatgtcttgcattaatgggagaagaagcatccattgtgtcttcaatagatgaactaaatgacagtgaagtatatgaaaaagtggtagactaccaagaagagagtaaagaaacttctatgaatgggctttctggtggagttggtgctaattctggccttcttaaagacattggtgatgaaaagcagaagaagagagagataaaacagttaagagagaggggatttatatctgctcggtttaggaattggcaagcctacatgcagtattgtgtgttgtgtgacaaagaattccttggtcacagaatagtacgacatgctcagaaacattacaaagatggaatttatagttgccccatatgtgcaaagaactttaattctaaagaaacttttgtccctcatgtcacactgcatgttaaacaatctagtaaagagagactagcagctatgaaaccattaagaagattgggaaggcctccaaagatcacaactaccaatgaaaatcagaagactaatactgtggctaaacaggagcagcgacctataaaaaagaatagtctctattcaacagattttatagtgtttaatgacaatgatggttcagatgatgagaatgatgacaaagataaatcctatgagccagaagtgattccagtccagaaaccagtacctgttaatgaatttaattgccctgtaactttttgtaaaaagggctttaagtactttaaaaatttaattgctcatgtgaaggggcataaagataatgaagacgccaagcgctttcttgaaatgcagagcaaaaaagttatttgccagtactgtaggcggcattttgtgagtgttactcatctcaatgatcacttacagatgcactgtggcagtaaaccatatatctgtatacagatgaaatgtaaagctggttttaatagttacgccgagcttttaacccaccgaaaggagcatcaagtctttagagcaaaatgtatgtttcctaaatgtggaagaattttttcggaagcttatttactatatgatcatgaagcacaacattataatacgtacacttgtaagttcacaggttgtggtaaagtttatcgttctcagggtgagctggaaaagcatctggatgatcacagtactcctcctgaaaaagtgctgcctcctgaagcccaacttaattcatctggagattccattcagccttctgaagtgaatcagaacacagcagagaatattgagaaagaaagatctatgcttccttcagaaaataacattgaaaacagcttactagcagatagaagtgatgcttgggataaaagcaaagcagaatcagctgtgaccaaacaagaccagatttctgcctctgagctcaggcaagctaatggaccattgtcaaatggtttggaaaaccctgctactactcctctacttcaatccagtgaagtagctgtgtccattaaggtgtctctcaatcaggggattgaggataactttggaaagcaagaaaactcaactgtggaaggcagtggtgaagcactggtcacagacttacatacgccagttgaagatacttgtaatgatttgtgtcatccaggtttccaggagagaaaagaacaagattgctttaatgatgcccatgttactcagaattctttagtaaattcagaaactctcaaaataggtgaccttaccccacaaaacttagaaagacaagtgaacaacttgatgaccttttctgtgcaaaatcaggcagcatttcaaaacaatttaccaacttccaaatttgaatgtggagataatgttaaaacatcatccaatctttataatttacctcttaagacattagaaagtattgcatttgttccaccgcagtccgacctaagtaattcattaggaactccatcagtgcctccaaaagctccagttcagaaattcagctgccaggtcgagggatgtactcgaacctataattcttcacagagtattgggaaacacatgaagacagcacaccctgaccaatatgctgcatttaaaatgcagcgcaaaagtaaaaaaggtcagaaagctaacaacttaaatacaccaaataatggaaagtttgtttattttttgccatcaccggtgaacagctcaaatccattttttacatcacagaccaaagccaatgggaatcctgcttgttcggcccagttgcagcatgtctcgccacccatttttccagctcatttagcaagtgtgtcaactccattgttgtcctcaatggaaagtgtcataaatccaaatataacttctcaggataaaaatgaacaaggtggtatgttatgttcccaaatggaaaatttacctagtactgccttgccagcacaaatggaagatctaaccaaaacagttctgcctttgaatattgacagtggctcagatcctttccttcctttacctgcagaaagtagttcaatgtctctcttcccttcaccagcagatagtgggactaattctgttttttcccaactggaaaataatacaaatcattattcctcacagattgaaggaaacactaattcctcctttctaaaggggggtaatggtgaaaatgcagtttttccttcacaagtgaatgttgcaaataacttcagtagcaccaatgcccaacagtctgcacctgaaaaagttaaaaaagaccgtgggcggggcccaaatgggaaggaaagaaaacctaagcacaacaaaagggctaaatggcctgcaattatcagagatgggaaatttatctgtagcaggtgttacagggcttttactaatcccagatcactgggtgggcacttatccaagcgatcttactgtaaaccactggatggagccgaaattgctcaagaacttctacagagtaatggacagccttctcttcttgccagcatgattctctccacaaatgcagtaaatttgcagcagccacaacaatctaccttcaatccagaagcatgttttaaagatccatcatttctacagcttcttgctgaaaatcgctcgccagcatttttaccaaatacatttcctcgatctggtgtgactaactttaataccagtgtcagtcaagaaggtagtgaaattattaaacaggctttggaaactgctggcattcccagtacatttgagggtgccgaaatgctttctcatgtttcaacaggttgtgtctctgatgcatcacaagtaaatgcaacggtgatgccaaatccaactgtaccacccctgttgcacactgtatgccatccaaacaccttgctgaccaaccagaataggacgtcaaactccaaaacttcctccattgaggaatgtagcagcttgcctgtttttccaacgaatgacttactactgaagactgttgaaaatggtttgtgctctagttcatttcctaattctggtgggccatcacaaaattttaccagtaacagttctcgtgtttctgttataagtggtcctcagaacacaagatccagtcatttaaataaaaagggaaacagtgcttctaagagaagaaagaaagttgctcctccactaattgcacctaacgcttcccaaaacttggtaacaagtgacttaacaacaatgggactcatagcaaagagtgttgaaatcccaactactaaccttcattcaaatgtaattccaacttgtgaacctcagagtttggtggaaaatctaacacagaaattaaataatgttaacaatcagttatttatgactgatgtaaaagagaatttcaaaaccagtcttgagtcccatacagtgttagcccctttaacattaaaaactgaaaatggtgattcccaaatgatggctttgaattcatgcacaacttcaataaattctgatttgcagatttctgaagacaatgttatacaaaactttgaaaagactcttgaaattattaaaactgctatgaattctcaaatacttgaggtaaaaagtggatctcagggtgctggtgaaacttcacaaaatgctcaaataaattataacattcagcttccttcagtaaacactgtgcaaaataacaaattacccgattcttctccgttttcctcctttataagtgtcatgccaacaaaaagtaacattcctcagtctgaagtatcacataaggaggatcaaatacaggaaattttagaaggcttacagaaattaaaattagaaaatgacctatccactccagcatcccaatgtgtactgataaatacatcagtgacactgactcccacgcctgttaaatcaactgcagatatcacagttattcagccagtttctgaaatgataaacattcaatttaatgacaaagttaataaaccctttgtgtgtcaaaaccaaggctgtaactacagtgctatgacaaaggatgcactatttaagcactatggtaaaattcatcaatacactccagaaatgattcttgaaattaagaagaatcaattgaaatttgctccctttaaatgtgtagtacctacatgtacaaaaacatttacaagaaattctaacctccgggcacactgtcagttggtgcatcattttacaactgaagaaatggtaaagttaaaaattaaaaggccttatggaagaaaatctcagagtgaaaatgtgccggcctcacgaagtacacaagtgaaaaaacagctagctatgacagaggaaaataaaaaggaatctcagcctgctttagaattgagagcagagacccaaaatacccacagtaatgtagcagtgatcccagaaaaacaacttgtagaaaaaaaaagtcctgacaaaacagaaagttctttacaagtgattacagttacttcagaacaatgtaatacaaatgcactcacaaacacacaaaccaaaggacggaagattaggaggcataaaaaagaaaaggaggagaaaaaacgaaagaagccagtttcccaatcccttgagtttccaacaagatacagtccttacagaccttatcgatgtgttcaccagggatgctttgctgcctttacgatacagcaaaacttgattctccattaccaggctgtacacaaatcagatctacctgcattttcagcagaggtcgaagaggaaagtgaagctggtaaagaaagtgaagaaactgaaactaaacaaactttgaaagaatttcgatgtcaggtaagtgactgttctcgaattttccaagcaattactggcctaatacaacactacatgaaacttcatgaaatgactcctgaagaaattgaaagtatgactgcttcagtggatgttgggaagtttccatgtgaccagttagagtgtaaatcttcatttactacatatttgaactatgttgttcatctagaggcagaccacgggattggactaagggcaagtaaaacagaagaagatggtgtatacaaatgtgattgtgaaggctgtgaccgtatatatgcaacccggtcgaatctcctccgacacatttttaataagcataatgacaaacataaggctcatttgattcgtccaagaagattaacaccaggccaggaaaatatgtcaagcaaggcaaaccaagaaaaatcaaagtctaaacatcgggggaccaagcacagcagatgtggaaaggaaggaataaaaatgcccaagaccaaacgaaagaaaaaaaataatttagaaaacaagaatgcaaagattgtgcagattgaagaaaataagccttattctctgaaacgtgggaagcatgtatattctataaaggctagaaatgatgccctgtctgagtgtacaagcagatttgtaacccagtatccatgtatgataaagggatgtacttcagttgttacaagtgaaagcaatataattagacattataagtgccataaattatctaaggcatttacatcacaacaccgaaatcttcttattgtattcaaacggtgttgcaactcacaagtaaaggaaacgtctgagcaagaaggtgctaagaatgatgtgaaagattctgacacgtgtgtatcagagagcaatgataattcaagaacaacagctacagtttcacaaaaggaagttgaaaaaaatgaaaaagatgaaatggatgaactaacagaattgtttattacaaaattaataaatgaagatagcacaagtgtagagacccaagctaatacttcttcaaatgtaagtaatgattttcaggaagataacctctgccagtcagaaagacaaaaagcaagtaatttgaagagagttaataaggaaaaaaatgtctcacaaaataaaaaaaggaaagttgaaaaagctgaaccagcatcagcagctgagttaagtagcgtgcgtaaagaagaagaaactgctgttgccattcaaaccattgaggagcatcctgcatcttttgactggagctcttttaagccaatgggatttgaagtatcatttctgaagtttcttgaggagtctgcagtgaagcagaagaaaaatactgacaaagaccatccgaatactggaaacaaaaaaggatcccattcaaattcaagaaaaaatattgataagactgctgtgactagtggaaatcatgtatgtccttgtaaagaaagcgaaacgtttgtacagtttgccaatccatcacagcttcagtgcagtgataatgtaaaaattgttttagacaagaatcttaaagattgcactgagcttgtcttaaagcaacttcaggaaatgaaacctaccgtcagtctgaaaaaacttgaagtacattcaaatgatccagatatgtctgttatgaaagatatcagtataggtaaagccacaggcagaggtcagtactagtaatgaactagtccgtaacttgaaagtatttcgatttcttggctttatatatcttgtggaaaggacgacgagacaacgagttgcactccgta

SEQ ID NO: 694 - DNA, 1694 bp, Homo sapiens
  source 1..1694: mol_type = genomic DNA
accgccaccatggcgacggcgaccatagctctcggcacagactccatcaagatggagaacgggcagagcacagccgccaagctggggctgcctcccctgacgcccgagcagcaggaggcccttcagaaggccaagaagtacgccatggagcagagcatcaagagtgtgctggtgaagcagaccatcgcgcaccagcagcagcagctcaccaacctgcagatggcagcagtgacaatgggctttggagatcctctctcacctttgcaatcgatggcggctcagcggcagcgggcgctggccatcatgtgccgcgtctacgtgggctctatctactatgagctgggggaggacaccatccgccaggcctttgccccctttggccccatcaagagcatcgacatgtcctgggactccgtcaccatgaagcacaagggctttgccttcgtggagtatgaggtccccgaagctgcacagctggccttggagcagatgaactcggtgatgctggggggcaggaacatcaaggtgggcagacccagcaacatagggcaggcccagcccatcatagaccagttggctgaggaggcacgggccttcaaccgcatctacgtggcctctgtgcaccaggacctctcagacgatgacatcaagagcgtgtttgaggcctttggcaagatcaagtcctgcacactggcccgggaccccacaactggcaagcacaagggctacggcttcattgagtacgagaaggcccagtcgtcccaagatgctgtgtcttccatgaacctctttgacctgggtggccagtacttgcgggtgggcaaggctgtcacaccgcccatgcccctactcacaccagccacgcctggaggcctcccacctgccgctgctgtggcagctgctgcagccactgccaagatcacagctcaggaagcagtggccggagcagcggtgctgggtaccctgggcacacctggactggtgtccccagcactgaccctggcccagcccctgggcactttgccccaggctgtcatggctgcccaggcacctggagtcatcacaggtgtgaccccagcccgtcctcctatcccggtcaccatcccctcggtgggagtggtgaaccccatcctggccagccctccaacgctgggtctcctggagcccaagaaggagaaggaagaagaggagctgtttcccgagtcagagcggccagagatgctgagcgagcaggagcacatgagcatctcgggcagtagcgcccgacacatggtgatgcagaagctgctccgcaagcaggagtctacagtgatggttctgcgcaacatggtggaccccaaggacatcgatgatgacctggaaggggaggtgacagaggagtgtggcaagttcggggccgtgaaccgcgtcatcatctaccaagagaaacaaggcgaggaggaggatgcagaaatcattgtcaagatctttgtggagttttccatagcctctgagactcataaggccatccaggccctcaatggccgctggtttgctggccgcaaggtggtggctgaagtgtacgaccaggagcgttttgataacagtgacctctctgcgtagtaatgaactagtccgtaacttgaaagtatttcgatttcttggctttatatatcttgtggaaaggacgaggtaacccgcccatagacacggat

SEQ ID NO: 695 - DNA, 1643 bp, Homo sapiens
  source 1..1643: mol_type = genomic DNA
accgccaccatggcgacggcgaccatagctctcggcacagactccatcaagatggagaacgggcagagcacagccgccaagctggggctgcctcccctgacgcccgagcagcaggaggcccttcagaaggccaagaagtacgccatggagcagagcatcaagagtgtgctggtgaagcagaccatcgcgcaccagcagcagcagctcaccaacctgcagatggcggctcagcggcagcgggcgctggccatcatgtgccgcgtctacgtgggctctatctactatgagctgggggaggacaccatccgccaggcctttgccccctttggccccatcaagagcatcgacatgtcctgggactccgtcaccatgaagcacaagggctttgccttcgtggagtatgaggtccccgaagctgcacagctggccttggagcagatgaactcggtgatgctggggggcaggaacatcaaggtgggcagacccagcaacatagggcaggcccagcccatcatagaccagttggctgaggaggcacgggccttcaaccgcatctacgtggcctctgtgcaccaggacctctcagacgatgacatcaagagcgtgtttgaggcctttggcaagatcaagtcctgcacactggcccgggaccccacaactggcaagcacaagggctacggcttcattgagtacgagaaggcccagtcgtcccaagatgctgtgtcttccatgaacctctttgacctgggtggccagtacttgcgggtgggcaaggctgtcacaccgcccatgcccctactcacaccagccacgcctggaggcctcccacctgccgctgctgtggcagctgctgcagccactgccaagatcacagctcaggaagcagtggccggagcagcggtgctgggtaccctgggcacacctggactggtgtccccagcactgaccctggcccagcccctgggcactttgccccaggctgtcatggctgcccaggcacctggagtcatcacaggtgtgaccccagcccgtcctcctatcccggtcaccatcccctcggtgggagtggtgaaccccatcctggccagccctccaacgctgggtctcctggagcccaagaaggagaaggaagaagaggagctgtttcccgagtcagagcggccagagatgctgagcgagcaggagcacatgagcatctcgggcagtagcgcccgacacatggtgatgcagaagctgctccgcaagcaggagtctacagtgatggttctgcgcaacatggtggaccccaaggacatcgatgatgacctggaaggggaggtgacagaggagtgtggcaagttcggggccgtgaaccgcgtcatcatctaccaagagaaacaaggcgaggaggaggatgcagaaatcattgtcaagatctttgtggagttttccatagcctctgagactcataaggccatccaggccctcaatggccgctggtttgctggccgcaaggtggtggctgaagtgtacgaccaggagcgttttgataacagtgacctctctgcgtagtaatgaactagtccgtaacttgaaagtatttcgatttcttggctttatatatcttgtggaaaggacgaacgacttaggcgggttatccaatg

SEQ ID NO: 696 - DNA, 1781 bp, Homo sapiens
  source 1..1781: mol_type = genomic DNA
accgccaccatggcgacggcgaccatagctctccaggtcaatggccagcaaggaggggggtccgagccggcggcggcggcggcagtggtggcagcgggagacaaatggaaacctccacagggcacagactccatcaagatggagaacgggcagagcacagccgccaagctggggctgcctcccctgacgcccgagcagcaggaggcccttcagaaggccaagaagtacgccatggagcagagcatcaagagtgtgctggtgaagcagaccatcgcgcaccagcagcagcagctcaccaacctgcagatggcagcagtgacaatgggctttggagatcctctctcacctttgcaatcgatggcggctcagcggcagcgggcgctggccatcatgtgccgcgtctacgtgggctctatctactatgagctgggggaggacaccatccgccaggcctttgccccctttggccccatcaagagcatcgacatgtcctgggactccgtcaccatgaagcacaagggctttgccttcgtggagtatgaggtccccgaagctgcacagctggccttggagcagatgaactcggtgatgctggggggcaggaacatcaaggtgggcagacccagcaacatagggcaggcccagcccatcatagaccagttggctgaggaggcacgggccttcaaccgcatctacgtggcctctgtgcaccaggacctctcagacgatgacatcaagagcgtgtttgaggcctttggcaagatcaagtcctgcacactggcccgggaccccacaactggcaagcacaagggctacggcttcattgagtacgagaaggcccagtcgtcccaagatgctgtgtcttccatgaacctctttgacctgggtggccagtacttgcgggtgggcaaggctgtcacaccgcccatgcccctactcacaccagccacgcctggaggcctcccacctgccgctgctgtggcagctgctgcagccactgccaagatcacagctcaggaagcagtggccggagcagcggtgctgggtaccctgggcacacctggactggtgtccccagcactgaccctggcccagcccctgggcactttgccccaggctgtcatggctgcccaggcacctggagtcatcacaggtgtgaccccagcccgtcctcctatcccggtcaccatcccctcggtgggagtggtgaaccccatcctggccagccctccaacgctgggtctcctggagcccaagaaggagaaggaagaagaggagctgtttcccgagtcagagcggccagagatgctgagcgagcaggagcacatgagcatctcgggcagtagcgcccgacacatggtgatgcagaagctgctccgcaagcaggagtctacagtgatggttctgcgcaacatggtggaccccaaggacatcgatgatgacctggaaggggaggtgacagaggagtgtggcaagttcggggccgtgaaccgcgtcatcatctaccaagagaaacaaggcgaggaggaggatgcagaaatcattgtcaagatctttgtggagttttccatagcctctgagactcataaggccatccaggccctcaatggccgctggtttgctggccgcaaggtggtggctgaagtgtacgaccaggagcgttttgataacagtgacctctctgcgtagtaatgaactagtccgtaacttgaaagtatttcgatttcttggctttatatatcttgtggaaaggacgaagtccctgtactgagtgcagacaa

SEQ ID NO: 697 - DNA, 464 bp, Homo sapiens
  source 1..464: mol_type = genomic DNA
accgccaccatggatgacagtaaggtggttggaggcaaagtaaagaagcccggtaaacgtggtcggaagccagccaaaattgacttgaaagcaaaacttgagaggagccggcagagtgcaagagaatgccgagcccgaaaaaagctgagatatcagtatttggaagagttggtatccagtcgagaaagagctatatgtgccctcagagaggaactggaaatgtacaagcagtggtgcatggcaatggaccaaggaaaaatcccttctgaaataaaggccctactcactggagaagagcagaacaaatctcagcagaactcaagcaggcataccaaggctgggaagacagatgctaatagcaattcctggtagtaatgaactagtccgtaacttgaaagtatttcgatttcttggctttatatatcttgtggaaaggacgaagatggtcgaatggtatcggcgca

SEQ ID NO: 698 - DNA, 1163 bp, Homo sapiens
  source 1..1163: mol_type = genomic DNA
accgccaccatggccgcggagctggcgatgggcgccgagctgcccagcagcccgctggccatcgagtacgtcaacgacttcgacctgatgaagttcgaggtgaagaaggagcctcccgaggccgagcgcttctgccaccgcctgccgccaggctcgctgtcctcgacgccgctcagcacgccctgctcctccgtgccctcctcgcccagcttctgcgcgcccagcccgggcaccggcggcggcggcggcgcggggggcggcggcggctcgtctcaggccgggggcgcccccgggccgccgagcgggggccccggcgccgtcgggggcacctcggggaagccggcgctggaggatctgtactggatgagcggctaccagcatcacctcaaccccgaggcgctcaacctgacgcccgaggacgcggtggaggcgctcatcggcagcggccaccacggcgcgcaccacggcgcgcaccacccggcggccgccgcagcctacgaggctttccgcggcccgggcttcgcgggcggcggcggagcggacgacatgggcgccggccaccaccacggcgcgcaccacgccgcccaccatcaccacgccgcccaccaccaccaccaccaccaccaccaccatggcggcgcgggacacggcggtggcgcgggccaccacgtgcgcctggaggagcgcttctccgacgaccagctggtgtccatgtcggtgcgcgagctgaaccggcagctccgcggcttcagcaaggaggaggtcatccggctcaagcagaagcggcgcacgctcaagaaccgcggctacgcgcagtcctgccgcttcaagcgggtgcagcagcggcacattctggagagcgagaagtgccaactccagagccaggtggagcagctgaagctggaggtggggcgcctggccaaagagcgggacctgtacaaggagaaatacgagaagctggcgggccggggcggccccgggagcgcgggcggggccggtttcccgcgggagccttcgccgccgcaggccggtcccggcggggccaagggcacggccgacttcttcctgtagtaatgaactagtccgtaacttgaaagtatttcgatttcttggctttatatatcttgtggaaaggacgacagtaatctgaggcgccgcgagcc

SEQ ID NO: 699 - DNA, 509 bp, Homo sapiens
  source 1..509: mol_type = genomic DNA
accgccaccatggggctgtcggtgcgcgagctgaaccggcatctgcgcgggctctccgccgaggaggtgacacggctcaagcagcggcgccgcacactcaaaaaccgtggctacgccgccagctgccgcgtgaagcgcgtgtgccagaaggaggagctgcagaagcagaagtcggagctggagcgcgaggtggacaagctggcgcgcgagaacgccgccatgcgcctggagctcgacgcgctgcgcggcaagtgcgaggcgctgcagggcttcgcgcgctccgtggccgccgcccgcgggcccgccacgctcgtggcgccggccagcgtcatcaccatcgtcaagtccaccccgggctcggggtctggccccgcccacggcccggaccccgcccacggcccggcctcctgctcctagtaatgaactagtccgtaacttgaaagtatttcgatttcttggctttatatatcttgtggaaaggacgagaaagaacctcgagttgcggccgt

SEQ ID NO: 700 - DNA, 1562 bp, Homo sapiens
  source 1..1562: mol_type = genomic DNA
accgccaccatggcgtggattaaaaggaaatttggtgagcggcctccacctaaacgacttactagggaagctatgcgaaattatttaaaagagcgaggggatcaaacagtacttattcttcatgcaaaagttgcacagaagtcatatggaaatgaaaaaaggtttttttgcccacctccttgtgtatatcttatgggcagtggatggaagaaaaaaaaagaacaaatggaacgcgatggttgttctgaacaagagtctcaaccgtgtgcatttattgggataggaaatagtgaccaagaaatgcagcagctaaacttggaaggaaagaactattgcacagccaaaacattgtatatatctgactcagacaagcgaaagcacttcatgttgtctgtaaagatgttctatggcaacagtgatgacattggtgtgttcctcagcaagcggataaaagtcatctccaaaccttccaaaaagaagcagtcattgaaaaatgctgacttatgcattgcctcaggaacaaaggtggctctgtttaatcgactacgatcccagacagttagtaccagatacttgcatgtagaaggaggtaattttcatgccagttcacagcagtggggagccttttttattcatctcttggatgatgatgaatcagaaggagaagaattcacagtccgagatggctacatccattatggacaaacagtcaaacttgtgtgctcagttactggcatggcactcccaagattgataattaggaaagttgataagcagaccgcattattggatgcagatgatcctgtgtcacaactccataaatgtgcattttaccttaaggatacagaaagaatgtatttgtgcctttctcaagaaagaataattcaatttcaggccactccatgtccaaaagaaccaaataaagagatgataaatgatggcgcttcctggacaatcattagcacagataaggcagagtatacattttatgagggaatgggccctgtccttgccccagtcactcctgtgcctgtggtagagagccttcagttgaatggcggtggggacgtagcaatgcttgaacttacaggacagaatttcactccaaatttacgagtgtggtttggggatgtagaagctgaaactatgtacaggtgtggagagagtatgctctgtgtcgtcccagacatttctgcattccgagaaggttggagatgggtccggcaaccagtccaggttccagtaactttggtccgaaatgatggaatcatttattccaccagccttacctttacctacacaccagaaccagggccgcggccacattgcagtgcagcaggagcaatccttcgagccaattcaagccaggtgccccctaacgaatcaaacacaaacagcgagggaagttacacaaacgccagcacaaattcaaccagtgtcacatcatctacagccacagtggtatcctagtaatgaactagtccgtaacttgaaagtatttcgatttcttggctttatatatcttgtggaaaggacgagggcgactcgtctggtaccaatgt

SEQ ID NO: 701 - DNA, 1604 bp, Homo sapiens
  source 1..1604: mol_type = genomic DNA
accgccaccatggaccacacggagggctcgcccgcggaggagccgcctgcgcatgctccatcgcctgggaaatttggtgagcggcctccacctaaacgacttactagggaagctatgcgaaattatttaaaagagcgaggggatcaaacagtacttattcttcatgcaaaagttgcacagaagtcatatggaaatgaaaaaaggtttttttgcccacctccttgtgtatatcttatgggcagtggatggaagaaaaaaaaagaacaaatggaacgcgatggttgttctgaacaagagtctcaaccgtgtgcatttattgggataggaaatagtgaccaagaaatgcagcagctaaacttggaaggaaagaactattgcacagccaaaacattgtatatatctgactcagacaagcgaaagcacttcatgttgtctgtaaagatgttctatggcaacagtgatgacattggtgtgttcctcagcaagcggataaaagtcatctccaaaccttccaaaaagaagcagtcattgaaaaatgctgacttatgcattgcctcaggaacaaaggtggctctgtttaatcgactacgatcccagacagttagtaccagatacttgcatgtagaaggaggtaattttcatgccagttcacagcagtggggagccttttttattcatctcttggatgatgatgaatcagaaggagaagaattcacagtccgagatggctacatccattatggacaaacagtcaaacttgtgtgctcagttactggcatggcactcccaagattgataattaggaaagttgataagcagaccgcattattggatgcagatgatcctgtgtcacaactccataaatgtgcattttaccttaaggatacagaaagaatgtatttgtgcctttctcaagaaagaataattcaatttcaggccactccatgtccaaaagaaccaaataaagagatgataaatgatggcgcttcctggacaatcattagcacagataaggcagagtatacattttatgagggaatgggccctgtccttgccccagtcactcctgtgcctgtggtagagagccttcagttgaatggcggtggggacgtagcaatgcttgaacttacaggacagaatttcactccaaatttacgagtgtggtttggggatgtagaagctgaaactatgtacaggtgtggagagagtatgctctgtgtcgtcccagacatttctgcattccgagaaggttggagatgggtccggcaaccagtccaggttccagtaactttggtccgaaatgatggaatcatttattccaccagccttacctttacctacacaccagaaccagggccgcggccacattgcagtgcagcaggagcaatccttcgagccaattcaagccaggtgccccctaacgaatcaaacacaaacagcgagggaagttacacaaacgccagcacaaattcaaccagtgtcacatcatctacagccacagtggtatcctagtaatgaactagtccgtaacttgaaagtatttcgatttcttggctttatatatcttgtggaaaggacgacgtagcctatacgaacttcaacaa

SEQ ID NO: 702 - DNA, 1565 bp, Homo sapiens
  source 1..1565: mol_type = genomic DNA
accgccaccatggcgcctgttgtgacagggaaatttggtgagcggcctccacctaaacgacttactagggaagctatgcgaaattatttaaaagagcgaggggatcaaacagtacttattcttcatgcaaaagttgcacagaagtcatatggaaatgaaaaaaggtttttttgcccacctccttgtgtatatcttatgggcagtggatggaagaaaaaaaaagaacaaatggaacgcgatggttgttctgaacaagagtctcaaccgtgtgcatttattgggataggaaatagtgaccaagaaatgcagcagctaaacttggaaggaaagaactattgcacagccaaaacattgtatatatctgactcagacaagcgaaagcacttcatgttgtctgtaaagatgttctatggcaacagtgatgacattggtgtgttcctcagcaagcggataaaagtcatctccaaaccttccaaaaagaagcagtcattgaaaaatgctgacttatgcattgcctcaggaacaaaggtggctctgtttaatcgactacgatcccagacagttagtaccagatacttgcatgtagaaggaggtaattttcatgccagttcacagcagtggggagccttttttattcatctcttggatgatgatgaatcagaaggagaagaattcacagtccgagatggctacatccattatggacaaacagtcaaacttgtgtgctcagttactggcatggcactcccaagattgataattaggaaagttgataagcagaccgcattattggatgcagatgatcctgtgtcacaactccataaatgtgcattttaccttaaggatacagaaagaatgtatttgtgcctttctcaagaaagaataattcaatttcaggccactccatgtccaaaagaaccaaataaagagatgataaatgatggcgcttcctggacaatcattagcacagataaggcagagtatacattttatgagggaatgggccctgtccttgccccagtcactcctgtgcctgtggtagagagccttcagttgaatggcggtggggacgtagcaatgcttgaacttacaggacagaatttcactccaaatttacgagtgtggtttggggatgtagaagctgaaactatgtacaggtgtggagagagtatgctctgtgtcgtcccagacatttctgcattccgagaaggttggagatgggtccggcaaccagtccaggttccagtaactttggtccgaaatgatggaatcatttattccaccagccttacctttacctacacaccagaaccagggccgcggccacattgcagtgcagcaggagcaatccttcgagccaattcaagccaggtgccccctaacgaatcaaacacaaacagcgagggaagttacacaaacgccagcacaaattcaaccagtgtcacatcatctacagccacagtggtatcctagtaatgaactagtccgtaacttgaaagtatttcgatttcttggctttatatatcttgtggaaaggacgaagttatcgccgtgatctcgggata

SEQ ID NO: 703 - DNA, 2660 bp, Homo sapiens
  source 1..2660: mol_type = genomic DNA
accgccaccatgatggccaaatcagctctaagagagaatggcactaactctgagaccttccgacagcgtttcaggagattccattaccaggaggtggctgggccgcgggaggctttcagccaactctgggaactttgctgtcggtggctaaggccggaggtgcgcaccaaggagcagattgtagaactgttggtgctagagcagttcctgaccgtcttacctggggagatccagaattgggtacaggaacaatgtccagaaaatggagaggaggcagtgactctcgtggaagatttagaaagagagcctggaagacctagatcttcggtcacagtctctgtgaaggggcaggaagtgcgcttggagaagatgacacccccgaaatcatcacaagagttattaagtgttcggcaggagtcagtggaaccccagcccaggggtgtacccaagaaagagagggcaagaagcccagacctgggaccacaggagcagatgaacccaaaggagaagctcaaaccttttcaaaggagcggattgccatttcctaaatccggtgtggtctccaggttggagcaaggagagccatggatcccagatctgctgggctctaaggagaaagaacttccaagtggcagccacataggagacagacgagtgcatgctgatctgttaccatccaagaaagatagaagaagctgggtggaacaggatcactggagctttgaagatgagaaggtggcaggtgtgcactggggctatgaagagaccagaacgctcctcgcaattctcagccagactgagttttatgaggctctcagaaactgccataggaacagccaagtgtatggggctgtggctgagcggctcagggaatatggcttcctccggaccctggaacagtgtcggaccaagttcaaaggtctccagaagagctatcggaaagtcaagagcggccacccacctgagacctgccccttctttgaagagatggaagccctgatgagtgctcaggtcattgccctgcccagtaatggcctggaagcagcagcctctcactctggcctggtaggcagcgatgctgagactgaagagccagggcagaggggctggcagcatgaggagggagcagaagaggctgtggctcaggagtctgacagtgatgacatggatctagaggcgaccccccaggaccccaactcagctgcacctgttgtgttcagaagcccaggtggtgtacactggggctatgaagagaccaagacttaccttgcaattcttagtgagacccagttttatgaagccctccggaactgtcaccgcaacagccagctgtatggagcagtggctgagaggttatgggaatatggctttcttaggaccccagaacagtgtcggaccaagtttaaaagcctgcaaaccagctatcggaaagttaagaatggccaggcaccagagacctgtcccttctttgaagagatggatgctttggtgagtgtccgggttgctgccccacccaatgatggccaggaagagactgcttcttgccccgtccaggggaccagtgaggctgaagctcagaagcaagctgaggaagcagacgaggccacagaggaagattctgatgatgatgaagaggatactgagatacccccaggggctgtcataacccgtgctccagtgttattccaaagcccccgtggttttgaagctggatttgagaatgaagataattcaaaacgggatatttctgaggaagtacaactgcataggacattacttgcaagatctgaaaggaaaattccccggtatcttcatcagggtaaaggcaatgagagtgactgtagatcaggaagacagtgggcaaagacctcaggggagaaaagaggaaaactgacactcccggagaagagcttaagtgaagtcctaagtcaacagagaccttgcttgggagagagaccctataaatatctcaaatacagcaaaagctttggtccaaactcccttctcatgcatcaggtatcccaccaggtggaaaatccatataaatgtgctgattgtgggaaaagcttcagtcggagtgcacgactcattagacaccggagaatccacactggagagaaaccttataaatgtcttgactgtggaaaaagtttccgtgacagttcaaatttcatcacccataggagaatccacacaggagagaaaccttatcaatgtggtgagtgtgggaaatgcttcaatcagagctcaagccttatcattcaccagagaacccacacaggagaaaagccctatcaatgtgaagagtgtggaaaaagcttcaataacagttctcattttagtgcacatcggaggatacacacaggagagagaccccatgtgtgtcctgactgtggaaagagtttcagtaagagttctgacttacgtgcacatcatagaacccacacaggagagaaaccctatgggtgtcatgactgtggtaagtgcttcagtaaaagctctgcccttaataagcacggagaaatccatgcacgggaaaagcttctgacacagtcagctcccaagtagtaatgaactagtccgtaacttgaaagtatttcgatttcttggctttatatatcttgtggaaaggacgacttaaaggcgatctccacgggacc

SEQ ID NO: 704 - DNA, 1736 bp, Homo sapiens
  source 1..1736: mol_type = genomic DNA
accgccaccatgcttaaagagcatccagagatggcggaagctcctcagcagcagttgggtattcctgtggtgaaactggagaaagagttgccatggggcagaggaagggaggaccctagtccagagacttttcggctgaggtttcggcagttccgctaccaggaggcagctggaccccaggaagctcttagggagctccaggagctctgtcgtcggtggctgaggcccgagttgcacaccaaggagcagatcctggagctgctggtgctggagcagttcctcactatcctgccccgcgagttctacgcctggatccgggagcatggcccagagagtggcaaggccctggccgccatggtggaggacctgacagaaagagcactggaggccaaggcggttccatgccacaggcagggagagcaggaggaaacagcactttgcagaggcgcttgggagccaggcatccagctggggccagtggaggtcaagcctgaatgggggatgccccctggggaaggagttcaaggtccagacccaggtaccgaggagcagctcagtcaggaccctggagatgagacacgggccttccaggagcaagcactacctgttctgcaggcgggtcctggcctccccgcagtgaatcccagagaccaagagatggcagctgggttctttactgctggatcgcaggggttggggccatttaaagatatggccctggccttccctgaggaggagtggaggcatgtgaccccagcccagatagactgctttggggagtatgtggaaccgcaggactgcagggtctctccaggcggtgggagcaaggaaaaggaggcaaaacccccacaggaagacctgaaaggggcgctggtggcactgacatcagagaggtttggggaagcctctctccagggccctgggctcggaagggtctgtgagcaggagcctggtggccctgcaggcagtgcgcctgggcttcctcctccccagcacggtgccatccccctgcctgacgaagtcaaaacccacagctccttctggaagcctttccagtgccctgagtgtgggaaaggattcagtcggagctccaatctcgtcaggcaccagcgaacccacgaagagaagtcttatggctgtgtggagtgtgggaagggctttaccctgagagaatacctgatgaagcaccagagaacccacctgggaaagaggccctacgtgtgcagcgagtgctggaaaaccttcagccagagacaccacctggaggtgcaccagcgcagccacactggggagaagccctacaagtgcggggactgctggaagagcttcagccgcaggcagcacctgcaggtgcaccggaggacgcacaccggggagaagccctacacctgcgagtgtggcaagagcttcagcaggaatgccaatctggcggtgcaccggcgtgcccacactggcgagaagccatatgggtgccaggtgtgcgggaagcggttcagcaaaggggagcggctggtccgacaccagagaatccatacaggggagaagccctaccactgtcctgcctgcgggcgaagcttcaaccagaggtccatcctcaaccggcaccagaagacccagcaccgccaggagccgctggtgcagtagtaatgaactagtccgtaacttgaaagtatttcgatttcttggctttatatatcttgtggaaaggacgaagcgtataggcttaggtcagtgac

SEQ ID NO: 705 - DNA, 914 bp, Homo sapiens
  source 1..914: mol_type = genomic DNA
accgccaccatggaggctcataatgagggctctaacttggaaaggcatcaggccaagcccaaagagaagattgagtataaatgctcagaacgtgagcagagattcatccagcacttggacctgattgaacatgcgagtacacacacgggaaagaaactctgcgagtctgatgtgtgtcagagttccagtcttacaggacataagaaagtcctctctagagagaaaggtcatcagtgtcatgagtgtgggaaagcctttcagaggagttcacacctcgtcagacatcagaaaatccatcttggtgagaagccttatcagtgcaatgagtgtggcaaagtctttagccagaatgcaggccttttggaacatctcagaattcatactggagagaaaccttatctatgtatccattgtggaaaaaattttaggcgcagctctcaccttaatcgacatcagagaattcacagtcaggaggagccctgtgagtgcaaggagtgtggaaaaacctttagtcaggccttactcctcacccaccatcagagaatccatagtcactccaaaagccatcaatgtaacgagtgtggaaaagctttcagtttgacctcagaccttattcgacaccacagaattcatactggagaaaaacctttcaagtgtaacatatgccagaaagccttccgactaaactcacaccttgctcagcatgtaagaatccacaatgaagaaaaaccctatcagtgtagtgaatgtggagaagccttcaggcaaaggtcaggtctttttcaacatcagagatatcaccacaaagacaaactggcttagtaatgaactagtccgtaacttgaaagtatttcgatttcttggctttatatatcttgtggaaaggacgaactctcggaataagggccatggag

SEQ ID NO: 706 - DNA, 1136 bp, Homo sapiens
  source 1..1136: mol_type = genomic DNA
accgccaccatggcaacagcattggacccagaccagccaaagaaacaaaaaatacttgtggaggagatggcccctctgaaaggagtacaggaacagcaggttcggcatgagtgtgaagttacaaagcctgagaaagagaagggtgaggagacaaggattgagaatgggaagcttattgtagtaacagactcttgtggaagagtagagtcatctgggaaaatatctgaacccatggaggctcataatgagggctctaacttggaaaggcatcaggccaagcccaaagagaagattgagtataaatgctcagaacgtgagcagagattcatccagcacttggacctgattgaacatgcgagtacacacacgggaaagaaactctgcgagtctgatgtgtgtcagagttccagtcttacaggacataagaaagtcctctctagagagaaaggtcatcagtgtcatgagtgtgggaaagcctttcagaggagttcacacctcgtcagacatcagaaaatccatcttggtgagaagccttatcagtgcaatgagtgtggcaaagtctttagccagaatgcaggccttttggaacatctcagaattcatactggagagaaaccttatctatgtatccattgtggaaaaaattttaggcgcagctctcaccttaatcgacatcagagaattcacagtcaggaggagccctgtgagtgcaaggagtgtggaaaaacctttagtcaggccttactcctcacccaccatcagagaatccatagtcactccaaaagccatcaatgtaacgagtgtggaaaagctttcagtttgacctcagaccttattcgacaccacagaattcatactggagaaaaacctttcaagtgtaacatatgccagaaagccttccgactaaactcacaccttgctcagcatgtaagaatccacaatgaagaaaaaccctatcagtgtagtgaatgtggagaagccttcaggcaaaggtcaggtctttttcaacatcagagatatcaccacaaagacaaactggcttagtaatgaactagtccgtaacttgaaagtatttcgatttcttggctttatatatcttgtggaaaggacgacacgccaagagtatacctgcagga

SEQ ID NO: 707 - DNA, 1541 bp, Homo sapiens
  source 1..1541: mol_type = genomic DNA
accgccaccatggcaacagcattggtgagtgcccattccctggctcccctgaatctgaagaaggaggggcttcgggtagtgagggaggatcactactctacttgggaacagggattcaagctgcaaggaaacagtaaaggccttggacaggagccattgtgcaaacaattcaggcagttgcgttatgaagagaccacaggacctcgagaagcactaagtcggctccgggagctctgtcaacagtggctacagcccgagacccataccaaggagcagatcctggagctgctggtgctggagcagtttctgatcatcctgcctaaggagctccaggcccgggtgcaggagcatcacccagagagcagggaggacgtggttgttgttctggaggatttgcagctggatcttggagaaacaggacaacaggtggacccagaccagccaaagaaacaaaaaatacttgtggaggagatggcccctctgaaaggagtacaggaacagcaggttcggcatgagtgtgaagttacaaagcctgagaaagagaagggtgaggagacaaggattgagaatgggaagcttattgtagtaacagactcttgtggaagagtagagtcatctgggaaaatatctgaacccatggaggctcataatgagggctctaacttggaaaggcatcaggccaagcccaaagagaagattgagtataaatgctcagaacgtgagcagagattcatccagcacttggacctgattgaacatgcgagtacacacacgggaaagaaactctgcgagtctgatgtgtgtcagagttccagtcttacaggacataagaaagtcctctctagagagaaaggtcatcagtgtcatgagtgtgggaaagcctttcagaggagttcacacctcgtcagacatcagaaaatccatcttggtgagaagccttatcagtgcaatgagtgtggcaaagtctttagccagaatgcaggccttttggaacatctcagaattcatactggagagaaaccttatctatgtatccattgtggaaaaaattttaggcgcagctctcaccttaatcgacatcagagaattcacagtcaggaggagccctgtgagtgcaaggagtgtggaaaaacctttagtcaggccttactcctcacccaccatcagagaatccatagtcactccaaaagccatcaatgtaacgagtgtggaaaagctttcagtttgacctcagaccttattcgacaccacagaattcatactggagaaaaacctttcaagtgtaacatatgccagaaagccttccgactaaactcacaccttgctcagcatgtaagaatccacaatgaagaaaaaccctatcagtgtagtgaatgtggagaagccttcaggcaaaggtcaggtctttttcaacatcagagatatcaccacaaagacaaactggcttagtaatgaactagtccgtaacttgaaagtatttcgatttcttggctttatatatcttgtggaaaggacgacattgttgtgatttcgaggagggt

SEQ ID NO: 708 - DNA, 1538 bp, Homo sapiens
  source 1..1538: mol_type = genomic DNA
accgccaccatggcaacagcattggtgagtgcccattccctggctcccctgaatctgaagaaggaggggcttcgggtagtgagggaggatcactactctacttgggaacagggattcaagctgcaaggaaacagtaaaggccttggacaggagccattgtgcaaacaattcaggcagttgcgttatgaagagaccacaggacctcgagaagcactaagtcggctccgggagctctgtcaacagtggctacagcccgagacccataccaaggagcagatcctggagctgctggtgctggagcagtttctgatcatcctgcctaaggagctccaggcccgggtgcaggagcatcacccagagagcagggaggacgtggttgttgttctggaggatttgcagctggatcttggagaaacaggacaacaggacccagaccagccaaagaaacaaaaaatacttgtggaggagatggcccctctgaaaggagtacaggaacagcaggttcggcatgagtgtgaagttacaaagcctgagaaagagaagggtgaggagacaaggattgagaatgggaagcttattgtagtaacagactcttgtggaagagtagagtcatctgggaaaatatctgaacccatggaggctcataatgagggctctaacttggaaaggcatcaggccaagcccaaagagaagattgagtataaatgctcagaacgtgagcagagattcatccagcacttggacctgattgaacatgcgagtacacacacgggaaagaaactctgcgagtctgatgtgtgtcagagttccagtcttacaggacataagaaagtcctctctagagagaaaggtcatcagtgtcatgagtgtgggaaagcctttcagaggagttcacacctcgtcagacatcagaaaatccatcttggtgagaagccttatcagtgcaatgagtgtggcaaagtctttagccagaatgcaggccttttggaacatctcagaattcatactggagagaaaccttatctatgtatccattgtggaaaaaattttaggcgcagctctcaccttaatcgacatcagagaattcacagtcaggaggagccctgtgagtgcaaggagtgtggaaaaacctttagtcaggccttactcctcacccaccatcagagaatccatagtcactccaaaagccatcaatgtaacgagtgtggaaaagctttcagtttgacctcagaccttattcgacaccacagaattcatactggagaaaaacctttcaagtgtaacatatgccagaaagccttccgactaaactcacaccttgctcagcatgtaagaatccacaatgaagaaaaaccctatcagtgtagtgaatgtggagaagccttcaggcaaaggtcaggtctttttcaacatcagagatatcaccacaaagacaaactggcttagtaatgaactagtccgtaacttgaaagtatttcgatttcttggctttatatatcttgtggaaaggacgaagattgcgcctcagttcgacgcca

SEQ ID NO: 709 - DNA, 3233 bp, Homo sapiens
  source 1..3233: mol_type = genomic DNA
accgccaccatggctatggccctggaattgcaagcccaggcatctccgcagccagagcctgaagaactcctgattgtgaaactggaagaggactcttggggatcagaatccaaactctgggagaaggaccgtggctctgtctctggcccagaggcctcccgccagcgcttcaggcaattccaatacagggatgcagctggaccccacgaggccttcagccagctctgggctctctgctgtcgttggctgaggccggagatccgtctcaaagagcagatcctggagctgctcgtgctggagcagttcctgactatcttgcctagggaggtccagacctgggtgcaggcacgccaccctgagagtggtgaggaggctgtggccttggtggaggattggcaccgagagaccaggactgcaggacagtcgggactggaattgcatacagaagagaccaggcccttaaagacaggggaagaagctcagagcttccagctgcagccagtggatccctggcctgagggacagtcccagaagaagggggtgaagaatacatgccctgaccttcccaatcacctaaatgccgaggtggcaccacagcctttgaaagagagtgctgtcctcactccccgagtccctactctcccaaagatggggagcgttggagattgggaggtgacagctgagtcccaggaagccctgggccctggcaaacatgctgagaaggagctctgtaaagaccccccaggagacgactgtgggaacagcgtgtgcctgggagttccagtttcaaaaccaagtaatacctccgagaaagagcaaggaccagagttttggggtctaagtcttataaattctgggaaaaggagcactgcagattacagcctggataatgagccagctcaggcattgacctggagggattcaagagcctgggaggaacaataccagtgggatgtggaggacatgaaggtgtcaggtgttcactggggctatgaggagaccaagactttcctggcaattttgagtgaatctcctttctctgaaaagctccggacttgtcaccagaaccgccaggtatatcgggccattgcagagcagctaagggcaaggggcttcctgcggacactggagcaatgtcgctatagggtcaaaaacctcctacggaattaccggaaagccaagagcagccacccaccaggtacctgccccttctatgaggagctggaggccctggtcagggctcggacagccatcagagccacagatggcccaggagaggccgtggcacttcccaggctcgggtatagtgacgcagagatggatgagcaggaggaagggggctgggatcctgaagaaatggcagaagactgtaacggtgctggcctggtcaatgttgagtctacccaggggcccaggattgcaggggccccagctctgttccagagtcgtattgcaggtgtgcactggggctatgaggagaccaaggccttcctggcaattctcagtgagtccccattctcggaaaagcttcgtacctgtcaccagaacagccaggtgtaccgggccattgcagagcggctgtgtgctctgggcttcctgcggacactggagcagtgtcgctacagattcaaaaacctccttcgaagctaccggaaagccaagagcagccacccaccagggacatgccctttctatgaggaactggactcgctgatgagggctcgggctgcagtcagggccatggggactgtccgagaggctgcaggtctccctaggtgtgggcagagtagtgctgagactgatgcccaggaggcctggggtgaagtggccaatgaagatgctgtcaaaccttcaaccttgtgtcctaaagccccagacatgggttttgaaatgaggcatgaggatgaagaccagatttcagagcaggacatttttgagggtttgcctggagccttatcaaaatgtcctacagaagctgtttgccaacctcttgactggggagaagacagtgaaaatgaaaatgaagatgaagggcagtggggaaatccctcacaggaacagtggcaagaaagttcttctgaagaggacttagaaaaacttattgaccatcaaggcctgtaccttgcagagaaaccctacaagtgtgacacatgcatgaagagcttcagtcggagctcccacttcattgcccatcagcgaatccacacaggtgagaagccctacaaatgccttgaatgtggaaaaaactttagtgaccgctctaacctcaatacccatcagagaatccacactggagagaagccctataaatgccttgaatgtgggaaaagctttagtgaccattctaatctcatcactcaccagagaattcacacgggggaaaagccctataaatgtggagaatgttggaaaagcttcaaccagagctcaaaccttctgaaacatcagagaatccacttgggaggaaatcctgaccagtgtagtgagcctgggggaaactttgcccaaagcccatcttttagtgctcactggaggaattctacagaagagacagctcctgaacaacctcaaagtatcagtaaggacttgaattctcctggaccacacagcacaaactcaggggagaaactttatgagtgttctgaatgtggaagaagcttctctaagagctctgccctcattagtcaccaaagaatccatacgggagagaaaccatatgaatgtgccgaatgtgggaaaagcttcagtaagagctccaccctggccaaccaccagcgcacccacactggagagaagccgtataaatgtgtggactgtgggaagtgcttcagtgagcgctccaagctcatcacacaccagagagtgcacacaggagagaagccctacaaatgccttgagtgtggaaaattcttccgtgaccgttctaacctcattactcaccagaggattcatacgggagagaagccgtataagtgcagagagtgtgggaaatgctttaaccagagctccagtcttattattcaccagagaatccacacaggggagaaaccctacaagtgcacagagtgtggcaaagacttcaacaacagttcccacttcagtgctcaccggagaacccatgcaggagggaaggcgtcgtagtaatgaactagtccgtaacttgaaagtatttcgatttcttggctttatatatcttgtggaaaggacgaaagttacgagctgtctttccaata

SEQ ID NO: 710 - DNA, 1454 bp, Homo sapiens
  source 1..1454: mol_type = genomic DNA
accgccaccatgatgaccaaggtactaggcatggccccagttctgggccctaggcctccacaggagcaggtggggcctctgatggtaaaagtcgaggagaaagaagagaaaggcaagtaccttcctagcctggagatgttccgccagcgcttcaggcagtttgggtaccatgatacccctggaccccgagaggccctgagccaactccgggtgctctgctgtgagtggctgaggcccgagatccacaccaaggagcagatcctggagctactggtgctggagcagttcctgaccatcctgccccaggagctccaggcctgggtgcaggagcattgcccggagagcgctgaagaggctgtcactctcctcgaagatctggagcgggaactggatgagccaggacaccaggtctcaactcctccaaacgaacagaaaccggtgtgggagaagatatcctcctcaggaactgcaaaggaatccccgagcagcatgcagccacagcccttggagaccagtcacaaatacgagtcttgggggcccctgtacatccaagagtctggtgaggagcaggagttcgctcaagatccaagaaaggtccgagattgcagattgagtacccagcacgaggaatcagcagatgagcagaaaggttctgaagcagaggggctcaaaggggatataatttctgtgattatcgccaataaacctgaggccagcttagagaggcagtgcgtaaaccttgaaaatgaaaaaggaacaaaaccccctcttcaagaggcaggctccaagaaaggagaacacacactggggagaaaccttacgtgtgcaccaagtgtgggaaagctttcagccacagctcaaacctcaccctccactacagaacacacttggtggaccggccctatgactgtaagtgtggaaaagcttttgggcagagctcagaccttcttaaacatcagagaatgcacacagaagaggcgccatatcagtgcaaagattgtggcaaggctttcagcgggaaaggcagcctcattcgtcactatcggatccacactggggagaagccttatcagtgtaacgaatgtgggaagagcttcagtcagcatgcgggcctcagctcccaccagagactccacaccggagagaagccatataagtgtaaggagtgtgggaaagccttcaaccacagctccaacttcaataaacaccacagaatccacaccggggaaaagccctactggtgtcatcactgtggaaagaccttctgtagcaagtccaatctttccaaacatcagcgagtccacactggagagggagaagcaccgtaactttcaagcgctcctgttgttgtcgttgttttagtaatgaactagtccgtaacttgaaagtatttcgatttcttggctttatatatcttgtggaaaggacgaggactcgtgcattccagtgcagcc

SEQ ID NO: 711 - DNA, 1577 bp, Homo sapiens
  source 1..1577: mol_type = genomic DNA
accgccaccatggccatccccaagcactccctgagcccagtgccgtgggaagaggacagcttccttcaagtgaaggtggaggaggaagaggaagccagcctctcccagggcggagaatccagccatgaccacattgctcactctgaggctgcacgcctgcgcttccggcacttccgctatgaggaggcatctggtccacacgaggccctggcccacctccgagcgctgtgctgtcagtggctgcagcccgaggcgcactccaaggagcagatactggagctgctggtgctggagcagttcctgggtgcgctgcccccagagatccaagcctgggtgggagcccagagtcccaagagcggagaggaagccgctgtgctggtggaggatctgactcaggtgctggacaagagaggatgggatccaggagccgagcccacagaggcaagctgcaagcagagtgacctgggagagtcagagccatcaaatgtcactgagaccctcatgggaggtgtttcccttggacccgcctttgtcaaggcatgtgaacctgagggcagctcagagaggtctggactatcaggggagatctggacaaagtctgtcacccaacagatccacttcaagaaaacttcagggccttacaaggatgtccccacagaccagcgtggccgtgaatctggtgcctcgaggaacagttctagtgcgtggccaaacctcacctcccaagagaagcctccttcagaagacaaatttgatctggtggatgcttatgggacagagcctccatacacctactcagggaagaggtcctccaagtgtcgcgagtgtaggaagatgttccagagtgcttcggcgctcgaggcacaccagaagacccattctcggaagaccccatatgcctgcagcgagtgtgggaaagccttcagccggagcactcacctcgcccagcaccaggttgtccacacaggggcgaagccccatgagtgtaaggaatgtgggaaggccttcagccgagtcacccacctgactcagcaccaaaggattcatactggagagaaaccctacaaatgtggggaatgtggtaaaaccttcagccgcagcactcacctcacccagcaccagcgggtgcacacgggggagcggccctacgagtgtgacgcgtgtgggaaagccttcagccagagcacgcacctgactcaacaccagcgcatccacaccggggagaagccctacaagtgtgacgcgtgtggccgagccttcagcgactgctcagccctgatccgacatctgagaatccactctggagagaagccatatcagtgtaaggtttgtccgaaggcctttgcacagagctcctccctcattgagcaccagaggatccacacgggagagaagccttataagtgcagcgactgtgggaaggccttcagtcgtagctcagccctgatggttcacttgcggatccacatcacggtgctgcaatagtaatgaactagtccgtaacttgaaagtatttcgatttcttggctttatatatcttgtggaaaggacgaaaccatacagctcgaggcagtaaa

SEQ ID NO: 712 - DNA, 1271 bp, Homo sapiens
  source 1..1271: mol_type = genomic DNA
accgccaccatggccataaccttgacccttcagactgcagagatgcaggaaggacttctggcagtgaaggtaaaggaggaagaggaggaacattcctgtgggccagaatcaggcctgtcaagaaataaccctcataccagagagatctttcgtagacgcttcaggcagttctgctatcaggagtcccctgggccccgggaggctcttcaaagactccaggagctctgccatcagtggctgagaccagagatgcacaccaaggagcagatcctagagctgctggtgctggagcagttcctgactatcctgcctgaggagctccaggcctgggtcagacagcaccgtcctgtgagtggagaggaggcagtgactgtgctggaggatttggagagagagctggatgacccaggagagcaggtcctgagccatgctcatgaacaggaagagtttgtaaaggagaaggcaactccaggagcagctcaggagtcatcaaatgaccaattccaaaccttggaagagcaacttgggtataatttgcgagaggtgtgcccagttcaagagattgatggcaaggctgggacttggaatgtggagttagccccaaagagggagatttctcaggaagtgaaatctcttatacaagttcttggaaaacagaatggtaatattactcagattcctgagtatggagatacctgtgaccgtgagggcagattggaaaagcaaagggtgagctcttcagtggagagaccctatatctgtagtgaatgtggaaaaagcttcacccagaattccatccttatcgagcaccagagaacacacacaggtgagaagccttatgaatgtgatgagtgtgggcgggccttcagccagaggtcaggcctattccagcaccagagactccacactggggagaagcgctaccagtgcagtgtttgtggcaaagccttcagccagaatgccgggcttttccatcacctcagaattcacactggggagaagccttaccagtgcaatcagtgcaataagagttttagtcgacgttcagtcctcattaagcatcagagaattcacactggagagagaccttatgaatgtgaagaatgtggcaagaacttcatttaccattgcaacctaatccagcatcggaaagtccacccagtggctgaatcaagctagtaatgaactagtccgtaacttgaaagtatttcgatttcttggctttatatatcttgtggaaaggacgaaatgtaaactccgagtggcgaaga

SEQ ID NO: 713 - DNA, 680 bp, Homo sapiens
  source 1..680: mol_type = genomic DNA
accgccaccatggagcttgttccagccactccccattatcctgcagatgtgcttttccagactgatccaactgcagagatggcagctgagtcattgcctttctccttcgggacactgtccagctgggagctggaagcctggtatgaggacctgcaagaggtcctgtcttcagatgaaaatgggggtacctatgtttcacctcctggaaatgaagaggaagaatcaaaaatcttcaccactcttgaccctgcttctctggcttggctgactgaggaggagccagaaccagcagaggtcacaagcacctcccagagccctcactctccagattccagtcagagctccctggctcaggaggaagaggaggaagaccaagggagaaccaggaaacggaaacagagtggtcattccccagcccgggctggaaagcagcgcatgaaggagaaagaacaggagaatgaaaggaaagtggcacagctagctgaagagaatgaacggctcaagcaggaaatcgagcgcctgaccagggaagtagaggcgactcgccgagctctgattgaccgaatggtgaatctgcaccaagcatagtaatgaactagtccgtaacttgaaagtatttcgatttcttggctttatatatcttgtggaaaggacgagcgaggaaagttaccagtcttgcg

SEQ ID NO: 714 - DNA, 2219 bp, Homo sapiens
  source 1..2219: mol_type = genomic DNA
accgccaccatgggctttatgttacctctcatcttcaggtacagcccacgcttgatggaaaaaattctccaaatggctgaaggtattgatattggggagatgccttcatatgatctggtgctgtccaaaccttccaaaggtcaaaaacgccacctctcaacatgtgatggtcaaaatcctcctaaaaagcaagccggttccaaattccatgcgagacctcgttttgagcctgtacattttgtagctagtagttcaaaagatgaaagacaggaagatccttatggccctcaaacaaaagaggtaaatgaacaaacacattttgccagcatgccaagagacatctaccaagattatactcaagactctttcagtatacaagatgggaattctcagtattgtgattcatcaggattcattctcacaaaagaccagcctgtaacagccaacatgtattttgacagtgggaaccctgccccaagcaccacatcacagcaggcaaactctcagtcaactcctgagccttcaccatcacagacatttcccgagtctgtggtagccgagaagcagtattttattgaaaaattaacggcgacaatctggaagaacctttctaatccagaaatgacttctggatctgataaaattaattatacatatatgttaactcgttgtattcaggcgtgtaagacaaatcctgagtatatatatgctcctttaaaggaaattcctcctgccgacatccccaaaaataaaaaacttctaactgatggctatgcttgtgaagttagatgccaaaatatctacttaactacaggttatgctggcagcaagaatgggtccagggatcgagctacagagctagctgtaaaactcttgcagaaacgtattgaagttagagttgtccggcggaaattcaagcatacatttggagaggacctcgtggtgtgtcagattggcatgtcctcctatgaatttcctccagctctgaagccaccagaagacctggtggtgctgggtaaagatgcttccgggcagccaatttttaatgcttctgccaaacactggaccaattttgtcattacagaaaatgcaaatgatgcaattggtatccttaacaattctgcctcattcaacaagatgtcaattgaatacaaatatgagatgatgccaaatcgcacatggcgttgtcgagtgtttttacaagatcactgcttagctgaaggttatggaaccaagaaaacaagtaaacatgcagctgccgacgaggctttgaaaattcttcaaaaaacacagcccacttatccatctgtcaaaagttcacaatgccatacaggctcttcacccagaggatctggaaagaagaaagatataaaggatcttgtagtttatgagaattcttcaaatcccgtgtgcacgctgaacgacacagctcagtttaaccgaatgacagttgagtatgtctatgaaaggatgacaggcctccgctggaaatgcaaagtgattctagagagtgaagtaattgcagaagcagttggggtgaagaaaactgtcaaatatgaagctgctggggaagctgtgaaaaccctcaaaaagacccagccaactgtcattaacaacttgaagaaaggagctgttgaagatgtgatttcaagaaatgaaattcagggccgctcagcagaggaggcttacaaacagcaaatcaaagaagataatattggaaatcagctgctgagaaagatgggttggactggtggtggtttaggtaaatctggtgagggcatacgggagcctatctcagtgaaagagcagcataagcgggaagggcttggtctggatgtagagagggtgaataaaattgccaagagagatattgaacagatcatcagaaactacgcccgctccgagagccacacagatttgactttctctagagagctgactaatgatgaacggaagcaaatacatcagattgcccagaagtatggtcttaagagtaagtctcatggggtgggccatgataggtacctagtggtaggtagaaaaagacggaaggaagacctactagatcagctcaaacaggaaggccaagtgggccattacgagcttgttatgcctcaagcaaattagtaatgaactagtccgtaacttgaaagtatttcgatttcttggctttatatatcttgtggaaaggacgagggcgtaagtacaacatcgaatcg

SEQ ID NO: 715 - DNA, 2588 bp, Homo sapiens
  source 1..2588: mol_type = genomic DNA
accgccaccatggcggctgaagaggcggatgtggatatcgaaggggacgtggtagcggcggcgggggcacagccaggaagtggtgaaaatacagcatcagttttacaaaaagatcactatcttgattcatcttggagaacagagaatggccttattccttggaccttggataacaccatcagtgaagagaacagagctgttattgagaaaatgttgttggaagaagaatattatttatctaaaaaatcacaaccggaaaaagtctggcttgatcaaaaggaagatgataaaaaatacatgaagagtctgcagaaaacagcaaaaatcatggtacactctcctacaaaaccagccagttactcagtaaagtggacgatagaagaaaaagagctgtttgaacaagggctggctaaatttggccgaagatggaccaaaatttcaaagctaattggaagccgcactgttttacaagtgaagagttatgcaagacagtattttaaaaataaggtcaaatgcggtctggataaagaaacaccaaatcagaagaccggccataatcttcaagttaaaaatgaagataaagggacaaaggcatggacaccatcatgtttaaggggacgtgctgatcccaacttgaatgctgtaaaaattgaaaagttatctgatgatgaagaagtagacatcacagatgaggtggacgagttgtcttctcaaacaccccagaagaattctagcagtgatctcttgttagactttcctaatagtaaaatgcatgaaaccaatcaaggagaattcattacttctgacagccaggaagctctcttttctaagtcttccaggggctgtcttcaaaatgaaaagcaagatgaaacactttcaagctcagaaattacactgtggactgagaaacagagcaatggtgacaaaaaatcaattgaattaaatgaccagaaatttaatgaattgattaaaaactgcaacaagcatgatggaaggggaataatagttgatgccaggcagttgccttctccagagccttgtgaaattcagaaaaatttgaatgataatgaaatgctttttcattcttgccaaatggtagaggaaagccatgaggaagaagagcttaagccaccagaacaggaaatagaaatagatagaaatatcattcaagaagaagaaaaacaagcaattcctgagttttttgaggggcgccaagctaaaacaccagaacgctatttgaaaattagaaattatattttggatcaatgggagatatgcaaaccaaaatacttaaataagacctcagtacgtcctggcctgaagaactgtggagatgttaattgtattggacggattcatacatacctcgaattgataggagcaatcaattttggatgtgaacaggctgtgtataataggccacaaacagttgacaaagtacgaatcagagacagaaaagatgcagtagaagcataccaacttgcccagcgtctgcagtctatgcgtacaaggagacgtagggtccgagacccatggggaaactggtgtgatgcaaaggacttagaaggacaaacgtttgagcatctctctgctgaggagttggcaaaaagaagagaagaggaaaaaggcagacctgttaaatctttaaaagtgccaagaccaacaaaaagctcgtttgatcccttccaactgataccttgtaatttttttagtgaagaaaagcaggagccatttcaggtgaaagtggcttcagaagcacttttaataatggatttgcatgctcatgtttctatggcagaagtgattggtctgttaggaggaagatactcagaagttgataaagtagttgaagtctgtgcagcagaaccatgtaacagtctgagtacaggactacagtgtgagatggatcctgtatcacaaacacaggcctcagaaaccttggctgttagaggcttcagtgttattggatggtatcattctcatcctgcttttgatcctaatccttccttacgagatattgacacacaagctaaataccagagttacttctccagaggaggtgcaaagttcattgggatgattgttagtccctataatcgaaataatcccttaccatattctcagattacctgcctggttataagtgaggaaattagcccagatggctcttatcgcttaccttacaaatttgaagtacagcagatgttagaagaacctcagtggggattagtatttgaaaagacaagatggataatagaaaaatacaggctctcccatagcagcgtccccatggataaaatctttcgccgggattctgacctgacttgtttgcagaaacttttggagtgtatgaggaagactctgagcaaagtgaccaattgctttatggctgaagaattcttgactgaaatagaaaatttgttcctttccaattataaaagcaaccaagagaatggagtaaccgaagagaactgtacaaaggaattgttaatgtagtaatgaactagtccgtaacttgaaagtatttcgatttcttggctttatatatcttgtggaaaggacgaccggcgttcacaggttcctctagg

SEQ ID NO: 716 - DNA, 3266 bp, Homo sapiens
  source 1..3266: mol_type = genomic DNA
accgccaccatggccgcagtcaaggagcctttggagttccatgccaagcggccttggcgccccgaggaggcagtagaagatccggacgaggaggatgaggataatactagtgaagccgagaatgggttctccctggaggaagtgttacggctcggaggcaccaagcaagattaccttatgctggctactttggatgagaatgaggaagtgatagatggaggcaaaaaaggagcaatcgatgaccttcagcaaggtgaattggaagcatttattcaaaatcttaatttggcgaagtatacaaaagcttccttagttgaagaagatgaaccagctgaaaaagaaaattccagcaaaaaagaagtaaaaatacctaaaataaataataaaaatacagcagaaagtcaaaggacatcagttaataaggtgaaaaataagaataggccagaaccacattctgatgagaatggcagtaccacaccgaaagtaaagaaagataaacagaacatctttgaattttttgagagacagactttgttacttaggcctggaggcaaatggtatgatctggagtacagcaatgaatattctttgaaaccccagcctcaggatgttgtatctaagtacaaaacccttgctcagaagctgtatcagcatgaaatcaacttattcaaaagtaagacgaatagtcaaaagggagcctcttctacctggatgaaggcaattgtgtcatcggggacactaggtgacaggatggcagccatgattcttcttattcaggatgatgccgttcacacacttcagtttgtagaaactcttgtgaaccttgttaaaaagaagggcagcaaacagcagtgccttatggccttggatactttcaaagagttgcttatcacagaccttttgccagacaatcggaagctgaggattttcagccagcgtccttttgacaaactggaacagttgtccagtggcaacaaggactcaagagatagaagactgatattatggtattttgaacaccagctgaaacacttagtggctgaatttgtgcaggtcttagaaactttaagtcatgatacattagtaaccactaaaactcgagcccttaccgtggctcatgagctgctttgtaacaagcctgaggaagaaaaggctcttcttgtgcaagtggtaaataaactgggagatcctcagaacagaattgccacaaaagcatcccatctgttagagacattactttgtaaacatcccaatatgaaaggagttgtgtctggtgaagtagaaaggctactcttccgctcaaatatcagctccaaagctcaatattatgcaatttgctttttaaatcaaatggctctgtcccatgaagaaagtgaattggctaacaaattaataactgtttacttttgcttttttcggacttgtgtcaaaaaaaaagatgttgaatcaaaaatgcttagcgcccttttaacaggtgtgaatagggcatacccttattcccagactggtgatgacaaagtaagggagcagattgacacactgtttaaagtgttgcatattgtgaattttaataccagtgtccaggctttaatgttgcttttccaagtaatgaattctcagcagacaatatcggatcgatattacacagcattatacaggaagatgttggatccagggttgatgacgtgttccaagcaagctatgtttcttaaccttgtctacaaatctctgaaagctgacattgtgttgcgccgggtgaaggcttttgtgaagaggttacttcaagttacttgtcaacagatgccaccatttatatgtggagctttatatcttgtgtctgagatccttaaagcaaaaccaggtttaagaagccaactagatgatcatccggagtctgatgatgaagaaaattttattgatgcaaatgatgatgaagacatggaaaaattcactgatgcagacaaagaaacagagatagtgaaaaaacttgagacagaggaaacagttcctgaaactgatgtagaaaccaaaaaaccagaggttgcttcctgggtgcactttgataatttgaaaggtgggaaacagttaaataaatacgatccattcagtagaaaccctctgttctgtggagctgaaaatacaagtctttgggaactcaaaaagttatctgtgcattttcatccctccgtggccctttttgcaaagaccatccttcagggaaactatattcagtattcaggggacccactgcaggatttcactctaatgagatttttggatcgatttgtataccgaaatccaaagccccataaaggcaaagaaaacacagatagtgttgtgatgcagccgaaaagaaaacattttattaaggatattcgtcatcttcctgtgaacagtaaggagttccttgcaaaagaagaaagccaaataccagtggatgaagtgtttttccacaggtattataaaaaagttgctgttaaagagaaacaaaaacgggatgcagatgaagaaagtatagaagacgtggatgatgaagaatttgaagagctgattgacacatttgaagatgataactgtttcagctctggaaaggatgatatggattttgctggaaacgtgaaaaagagaacaaaaggagctaaggataacacattagatgaagattcagaaggtagtgatgatgaacttggtaacctggatgacgatgaagtttctttaggaagtatggatgatgaagaatttgctgaagttgatgaagatggaggaacattcatggatgtgttagatgatgaaagtgagagcgttccagaacttgaagtccactccaaagtcagtactaagaaaagcaagagaaaaggtacagatgattttgactttgctggctcatttcaagggccaagaaaaaagaaaagaaacttaaatgattccagcctatttgtatctgctgaagagtttggccatctattggatgaaaatatgggatccaagtttgataacattggcatgaatgccatggctaacaaagataatgcaagtctcaaacagcttagatgggaggctgaacgtgatgactggctacacaacagagatgcaaaaagtatcatcaagaaaaagaaacattttaaaaagaagaggattaaaaccactcaaaaaactaaaaaacaaaggaaatagtaatgaactagtccgtaacttgaaagtatttcgatttcttggctttatatatcttgtggaaaggacgatccgcggtcgggtaagtacaatta

SEQ ID NO: 717 - DNA, 1730 bp, Homo sapiens
  source 1..1730: mol_type = genomic DNA
accgccaccatggccgcgggagccgggacggcgggccccgcttccggcccgggcgtcgtgcgtgacccagcggcgtcacagccgaggaagcggcccggccgggagggcggggagggcgcgcggcgatcggacacgatggcgggaggaggcgggagtagcgacggcagcgggcgggcagctggcaggcgggcgtcccgcagtagcgggcgggcccggcgggggcgccacgagccggggctggggggcccggcggagcgcggcgcgggggaggcacggctggaagaggcagtcaatcgctgggtgctcaagttctacttccacgaggcgctgcgggcctttcggggtagccggtacggggacttcagacagatccgggacatcatgcaggctttgcttgtcaggcccttggggaaggagcacaccgtgtcccgattgctgcgggttatgcagtgtctgtcgcggattgaagaaggggaaaatttagactgttcctttgatatggaggctgagctcacaccactggaatcagctatcaatgtgctggagatgattaaaacggaatttacactgacagaagcagtggtcgaatccagtagaaaactggtcaaggaagctgctgtcattatttgtatcaaaaacaaagaatttgaaaaggcttcaaaaattttgaaaaaacatatgtccaaggaccccacaactcagaagctgagaaatgatctcctgaatattattcgagaaaagaacttggcccatcctgttatccagaacttttcatatgagaccttccagcagaagatgctgcgcttcctggagagccacctggatgacgccgagccctacctcctcacgatggccaaaaaggctttgaaatctgagtccgctgcctcaagtacagggaaggaagataaacagccagcaccagggcctgtggaaaagccacccagagaacccgcaaggcagctacggaatcctccaaccaccattggaatgatgactctgaaagcagctttcaagactctgtctggtgcacaggattctgaggcagcctttgcaaaactggaccagaaggatctggttcttcctactcaagctctcccagcatcaccagccctcaaaaacaagagacccagaaaagatgaaaacgaaagttcagccccggctgacggtgagggtggctcggaactgcagcccaagaacaagcgcatgacaataagcagattggtcttggaggaggacagccagagtactgagcccagcgcaggcctcaactcctcccaggaggccgcttcagcgccaccatccaagcccaccgttctcaaccaacccctccctggagagaagaatcccaaagtacccaaaggcaagtggaacagctctaatggggttgaagaaaaggagacttgggtggaagaggatgaactgtttcaagttcaggcagcaccagatgaagacagtacaaccaatataacaaaaaagcagaagtggactgtagaagaaagcgagtgggtcaaggctggagtgcagaaatatggggaaggaaactgggctgccatttctaaaaattacccatttgttaaccgaacagctgtgatgattaaggatcgctggcggaccatgaaaagacttggcatgaactagtaatgaactagtccgtaacttgaaagtatttcgatttcttggctttatatatcttgtggaaaggacgaatcatggcggtcggtacccaggtt

SEQ ID NO: 718 - DNA, 1295 bp, Homo sapiens
  source 1..1295: mol_type = genomic DNA
accgccaccctggaggtgagacccaaagaaagctggaaccatgctgactttgtacactgtgaggacacagagtctgttcctggaaagcccagtgtcaacgcagatgaggaagtcggaggtccccaaatctgccgtgtatgtggggacaaggccactggctatcacttcaatgtcatgacatgtgaaggatgcaagggctttttcaggagggccatgaaacgcaacgcccggctgaggtgccccttccggaagggcgcctgcgagatcacccggaagacccggcgacagtgccaggcctgccgcctgcgcaagtgcctggagagcggcatgaagaaggagatgatcatgtccgacgaggccgtggaggagaggcgggccttgatcaagcggaagaaaagtgaacggacagggactcagccactgggagtgcaggggctgacagaggagcagcggatgatgatcagggagctgatggacgctcagatgaaaacctttgacactaccttctcccatttcaagaatttccgggtctctctgcagctgcggggggaggatggcagtgtctggaactacaaacccccagccgacagtggcgggaaagagatcttctccctgctgccccacatggctgacatgtcaacctacatgttcaaaggcatcatcagctttgccaaagtcatctcctacttcagggacttgcccatcgaggaccagatctccctgctgaagggggccgctttcgagctgtgtcaactgagattcaacacagtgttcaacgcggagactggaacctgggagtgtggccggctgtcctactgcttggaagacactgcaggtggcttccagcaacttctactggagcccatgctgaaattccactacatgctgaagaagctgcagctgcatgaggaggagtatgtgctgatgcaggccatctccctcttctccccagaccgcccaggtgtgctgcagcaccgcgtggtggaccagctgcaggagcaattcgccattactctgaagtcctacattgaatgcaatcggccccagcctgctcataggttcttgttcctgaagatcatggctatgctcaccgagctccgcagcatcaatgctcagcacacccagcggctgctgcgcatccaggacatacacccctttgctacgcccctcatgcaggagttgttcggcatcacaggtagctagtaatgaactagtccgtaacttgaaagtatttcgatttcttggctttatatatcttgtggaaaggacgattcgccgcgacttactatattgag

SEQ ID NO: 719 - DNA, 1523 bp, Homo sapiens
  source 1..1523: mol_type = genomic DNA
accgccaccatgacagtcaccaggactcaccacttcaaggaggggtccctcagagcacctgccatacccctgcacagtgctgcggctgagttggcttcaaaccatccaagaggcccagaagcaaacctggaggtgagacccaaagaaagctggaaccatgctgactttgtacactgtgaggacacagagtctgttcctggaaagcccagtgtcaacgcagatgaggaagtcggaggtccccaaatctgccgtgtatgtggggacaaggccactggctatcacttcaatgtcatgacatgtgaaggatgcaagggctttttcaggagggccatgaaacgcaacgcccggctgaggtgccccttccggaagggcgcctgcgagatcacccggaagacccggcgacagtgccaggcctgccgcctgcgcaagtgcctggagagcggcatgaagaaggagatgatcatgtccgacgaggccgtggaggagaggcgggccttgatcaagcggaagaaaagtgaacggacagggactcagccactgggagtgcaggggctgacagaggagcagcggatgatgatcagggagctgatggacgctcagatgaaaacctttgacactaccttctcccatttcaagaatttccggctgccaggggtgcttagcagtggctgcgagttgccagagtctctgcaggccccatcgagggaagaagctgccaagtggagccaggtccggaaagatctgtgctctttgaaggtctctctgcagctgcggggggaggatggcagtgtctggaactacaaacccccagccgacagtggcgggaaagagatcttctccctgctgccccacatggctgacatgtcaacctacatgttcaaaggcatcatcagctttgccaaagtcatctcctacttcagggacttgcccatcgaggaccagatctccctgctgaagggggccgctttcgagctgtgtcaactgagattcaacacagtgttcaacgcggagactggaacctgggagtgtggccggctgtcctactgcttggaagacactgcaggtggcttccagcaacttctactggagcccatgctgaaattccactacatgctgaagaagctgcagctgcatgaggaggagtatgtgctgatgcaggccatctccctcttctccccagaccgcccaggtgtgctgcagcaccgcgtggtggaccagctgcaggagcaattcgccattactctgaagtcctacattgaatgcaatcggccccagcctgctcataggttcttgttcctgaagatcatggctatgctcaccgagctccgcagcatcaatgctcagcacacccagcggctgctgcgcatccaggacatacacccctttgctacgcccctcatgcaggagttgttcggcatcacaggtagctagtaatgaactagtccgtaacttgaaagtatttcgatttcttggctttatatatcttgtggaaaggacgagcagtacatctaaagtatgcggcc

SEQ ID NO: 720 - DNA, 1406 bp, Homo sapiens
  source 1..1406: mol_type = genomic DNA
accgccaccctggaggtgagacccaaagaaagctggaaccatgctgactttgtacactgtgaggacacagagtctgttcctggaaagcccagtgtcaacgcagatgaggaagtcggaggtccccaaatctgccgtgtatgtggggacaaggccactggctatcacttcaatgtcatgacatgtgaaggatgcaagggctttttcaggagggccatgaaacgcaacgcccggctgaggtgccccttccggaagggcgcctgcgagatcacccggaagacccggcgacagtgccaggcctgccgcctgcgcaagtgcctggagagcggcatgaagaaggagatgatcatgtccgacgaggccgtggaggagaggcgggccttgatcaagcggaagaaaagtgaacggacagggactcagccactgggagtgcaggggctgacagaggagcagcggatgatgatcagggagctgatggacgctcagatgaaaacctttgacactaccttctcccatttcaagaatttccggctgccaggggtgcttagcagtggctgcgagttgccagagtctctgcaggccccatcgagggaagaagctgccaagtggagccaggtccggaaagatctgtgctctttgaaggtctctctgcagctgcggggggaggatggcagtgtctggaactacaaacccccagccgacagtggcgggaaagagatcttctccctgctgccccacatggctgacatgtcaacctacatgttcaaaggcatcatcagctttgccaaagtcatctcctacttcagggacttgcccatcgaggaccagatctccctgctgaagggggccgctttcgagctgtgtcaactgagattcaacacagtgttcaacgcggagactggaacctgggagtgtggccggctgtcctactgcttggaagacactgcaggtggcttccagcaacttctactggagcccatgctgaaattccactacatgctgaagaagctgcagctgcatgaggaggagtatgtgctgatgcaggccatctccctcttctccccagaccgcccaggtgtgctgcagcaccgcgtggtggaccagctgcaggagcaattcgccattactctgaagtcctacattgaatgcaatcggccccagcctgctcataggttcttgttcctgaagatcatggctatgctcaccgagctccgcagcatcaatgctcagcacacccagcggctgctgcgcatccaggacatacacccctttgctacgcccctcatgcaggagttgttcggcatcacaggtagctagtaatgaactagtccgtaacttgaaagtatttcgatttcttggctttatatatcttgtggaaaggacgaggagagtttgaaccttaacgaaga

SEQ ID NO: 721 - DNA, 1421 bp, Homo sapiens
  source 1..1421: mol_type = genomic DNA
accgccaccatggcggaggatgtttcctcagcggccccgagcccgcggggctgtgcggatggtagggatgccgaccctactgaggagcagatggcagaaacagagagaaacgacgaggagcagttcgaatgccaggaactgctcgagtgccaggtgcaggtgggggcccccgaggaggaggaggaggaggaggaggacgcgggcctggtggccgaggccgaggccgtggctgccggctggatgctcgatttcctctgcctctctctttgccgagctttccgcgacggccgctccgaggacttccgcaggacccgcaacagcgcagaggctattattcatggactatccagtctaacagcttgccagttgagaacgatatacatatgtcagtttttgacaagaattgcagcaggaaaaacccttgatgcacagtttgaaaatgatgaacgaattacacccttggaatcagccctgatgatttggggttcaattgaaaaggaacatgacaaacttcatgaagaaatacagaatttaattaaaattcaggctatagctgtttgtatggaaaatggcaactttaaagaagcagaagaagtctttgaaagaatatttggtgatccaaattctcatatgcctttcaaaagcaaattgcttatgataatctctcagaaagatacatttcattccttttttcaacacttcagctacaaccacatgatggagaaaattaagagttatgtgaattatgtgctaagtgaaaaatcatcaacctttctaatgaaggcagcggcaaaagtagtagaaagcaaaaggacaagaacaataacttctcaagataaacctagtggtaatgatgttgaaatggaaactgaagctaatttggatacaagaaaaagtgttagtgacaaacagtctgcggtaactgaatcctcagagggtacagtatccttattgaggtctcacaagaatcttttcttatctaagttgcaacatggaacccagcaacaagaccttaataagaaagaaagaagagtaggaactcctcaaagtacaaaaaagaaaaaagaaagcagaagagccactgaaagcagaatacctgtttcaaagagtcagccggtaactcctgaaaaacatcgagctagaaaaagacaggcatggctttgggaagaagacaagaatttgagatctggcgtgaggaaatatggagagggaaactggtctaaaatactgttgcattataaattcaacaaccggacaagtgtcatgttaaaagacagatggaggaccatgaagaaactaaaactgatttcctcagacagcgaagactagtaatgaactagtccgtaacttgaaagtatttcgatttcttggctttatatatcttgtggaaaggacgatgaagactttagactgattatggg

SEQ ID NO: 722 - DNA, 1196 bp, Homo sapiens
  source 1..1196: mol_type = genomic DNA
accgccaccatgagtttggctgggggccgggcaccccggaagaccgctgggaaccggctttctgggcttttggaggcagaggaggaagatgagttctaccagacgacttatgggggtttcacagaggaatccggagatgatgagtatcaaggggaccagtcagacacagaggacgaagtggactctgactttgacattgatgaaggggatgaaccatccagtgatggagaagcagaagagccaagaaggaagcgccgagtagtcaccaaggcctataaggaacctctcaagagcttaaggcctcgaaaggtcaacaccccggctggtagctctcagaaggcgcgagaagagaaggcactactgccattagaactacaagatgacggctctgacagtcggaagtctatgcgtcagtctacagctgagcatacacgacaaacgttccttcgggtacaggagaggcagggccagtcaagacggcgaaaggggccccactgtgagcggccactaacccaggaggaactgctccgggaggccaagatcacagaagagcttaatttacggtcactggagacatatgagcggctcgaggctgataaaaagaagcaggttcataagaagcggaagtgccccgggcccataatcacctatcattcagtgacagtgccacttgttggggagccaggccccaaggaagagaacgttgacatagaaggacttgatcctgctccctcggtgtctgcattgactcctcatgctgggactggacccgtcaacccccctgctcgctgctcacgtaccttcatcacttttagtgatgatgcaactttcgaggaatggttcccccaagggcggcccccaaaagtccctgttcgtgaggtctgtccagtgacccatcgtccagccctataccgggaccctgttacagacataccctatgccactgctcgagccttcaagatcattcgtgaggcttacaagaagtacattactgcccatggactgccgcccactgcctcagccctgggccccggcccgccacctcctgagcccctccctggctctgggccccgagccttgcgccagaaaattgtcattaaatagtaatgaactagtccgtaacttgaaagtatttcgatttcttggctttatatatcttgtggaaaggacgagcaggctcacatatggtctgtacc

SEQ ID NO: 723 - DNA, 1229 bp, Homo sapiens
  source 1..1229: mol_type = genomic DNA
accgccaccatgagtttggctgggggccgggcaccccggaagaccgctgggaaccggctttctgggcttttggaggcagaggaggaagatgagttctaccagacgacttatgggggtttcacagaggaatccggagatgatgagtatcaaggggaccagtcagacacagaggacgaagtggactctgactttgacattgatgaaggggatgaaccatccagtgatggagaagcagaagagccaagaaggaagcgccgagtagtcaccaaggcctataaggaacctctcaagagcttaaggcctcgaaaggtcaacaccccggctggtagctctcagaaggcgcgagaagagaaggcactactgccattagaactacaagatgacggctctgacagtcggaagtctatgcgtcagtctacagctgagcatacacgacaaacgttccttcgggtacaggagaggcagggccagtcaagacggcgaaaggggccccactgtgagcggccactaacccaggaggaactgctccgggaggccaagatcacagaagagcttaatttacggtcactggagacatatgagcggctcgaggctgataaaaagaagcaggttcataagaagcggaagtgccccgggcccataatcacctatcattcagtgacagtgccacttgttggggagccaggccccaaggaagagaacgttgacatagaaggctctttgtgtttttccttgtcttttgtcctcagacttgatcctgctccctcggtgtctgcattgactcctcatgctgggactggacccgtcaacccccctgctcgctgctcacgtaccttcatcacttttagtgatgatgcaactttcgaggaatggttcccccaagggcggcccccaaaagtccctgttcgtgaggtctgtccagtgacccatcgtccagccctataccgggaccctgttacagacataccctatgccactgctcgagccttcaagatcattcgtgaggcttacaagaagtacattactgcccatggactgccgcccactgcctcagccctgggccccggcccgccacctcctgagcccctccctggctctgggccccgagccttgcgccagaaaattgtcattaaatagtaatgaactagtccgtaacttgaaagtatttcgatttcttggctttatatatcttgtggaaaggacgaaagtgataacataaacaatatatt

SEQ ID NO: 724 - DNA, 3434 bp, Homo sapiens
  source 1..3434: mol_type = genomic DNA
accgccaccatggcggaaaacaaaggcggcggcgaggctgagagcggcggcgggggcagcggcagcgcgccggtaactgccggggccgccgggcccgccgcgcaggaggcggagccgcctctcaccgcggtgctggtggaggaggaggaggaggaaggcggcagggccggcgctgagggcggcgcggccgggcccgacgacgggggggtggccgcggcctcctcgggctcggcccaggctgcttcatctcctgcggcctcagtgggcactggagttgccgggggcgcagtatcgacgccggctccagctccagcctcggctcccgctccgggtccctcggcagggccgcctcctggaccgccagcctcgctcctggacacctgcgccgtgtgtcagcagagcttgcagagccggcgtgaggcggagcccaagctgctgccctgtcttcactccttctgcctgcgctgcctgcccgagccggagcgccagctcagcgtgcccatcccggggggcagcaacggcgacatccagcaagttggtgtaatacggtgcccagtatgccgccaagaatgcagacagatagaccttgtggataattattttgtgaaagacacatctgaagctcctagcagttctgatgaaaaatcagaacaggtatgtactagttgtgaagacaatgcaagtgcagttggcttttgtgtagaatgtggagagtggctatgtaagacatgtatcgaagcacatcaaagagtaaaatttactaaagatcacttgatcaggaagaaagaagatgtctcagagtctgttggagcatctggtcaacgccctgttttctgccctgtacacaaacaagaacagttgaaacttttctgtgaaacatgtgatagattgacatgtagagactgtcagctattggaacacaaagaacataggtatcagtttttggaagaagcttttcaaaatcagaagggtgcaattgagaatctactggcgaaacttcttgagaagaagaattatgttcattttgcagctactcaggtgcagaataggataaaagaagtaaatgagactaacaaacgagtagaacaggaaattaaagtggccattttcacccttatcaatgaaattaataagaaaggaaaatctctcttacaacagctagagaatgttacaaaggaaagacagatgaagttactacagcagcagaatgacatcacaggcctttcccggcaggtgaagcatgttatgaacttcacaaattgggcaattgcaagtggcagcagcacagcactactatacagcaagcgactgattactttccagttgcgtcatattttgaaagcacggtgtgatcctgtccctgctgctaatggagcaatacgtttccattgtgatcccaccttctgggcaaagaatgtagtcaatttaggtaatctagtaatagagagtaaaccagctcctggttatactcctaatgttgtagttgggcaagttcctccagggacaaaccacattagtaaaacccctggacagattaacttagcacagcttcgactccagcacatgcaacaacaagtatatgcacagaaacatcagcagttgcaacagatgaggatgcagcaaccaccagcacctgtaccaactacaacaacaacaacacaacagcatcctagacaagcagcccctcagatgttacaacaacagcctcctcgattgatcagtgtgcaaacaatgcaaagaggcaacatgaactgtggagcttttcaagcccatcagatgagactggctcagaatgctgccagaataccagggatacccaggcacagcggccctcaatattccatgatgcagccacacctccaaagacaacactcaaacccagggcatgctggaccctttcccgtagtatcggtacacaacaccacaatcaacccaacgagccctactacagcaactatggcaaatgcaaaccgaggtcccaccagcccatctgttacagcaatagagctaatcccctcagttaccaatccagaaaaccttccatcgctgccagatattccacccatacagttggaagatgctggctcaagtagtttagataatctactaagtagatacatctcaggcagtcacctacccccacagcctacaagcaccatgaatccttctccaggtccctctgccctttctccgggatcatcaggtttatccaattctcacacacctgtgagacccccaagtacttctagtactggcagtcgaggcagctgtgggtcatcaggaagaactgctgagaagacaagtcttagtttcaaatctgatcaggtgaaggtcaagcaagaacctgggactgaagatgaaatatgtagcttttcaggaggtgtaaaacaagaaaaaacagaggatggcaggaggagtgcttgcatgttgagcagtcctgagagtagcttgacaccacctctctcaaccaacctgcatctagaaagtgaattggatgcattggcaagcctggaaaaccatgtgaaaattgaacctgcagatatgaatgaaagctgcaaacagtcagggctcagcagccttgttaatggaaagtccccaattcgaagcctcatgcacaggtcggcaaggattggaggagatggcaacaataaagatgatgacccaaatgaagactggtgtgctgtctgccaaaacggaggagatctcttgtgctgcgaaaaatgtccaaaggtctttcatctaacttgtcatgttccaacactacttagctttccaagtggggactggatatgcacattttgtagagatattggaaagccagaagttgaatatgattgtgataatttgcaacatagtaagaaggggaaaactgcgcaggggttaagccccgtggaccaaaggaaatgtgaacgtcttctgctttacctctattgccatgaattaagtattgaattccaggagcctgttcctgcttcgataccaaactactataaaattataaagaaaccaatggatttatccaccgtgaaaaagaagcttcagaaaaaacattcccaacactaccaaatcccggatgactttgtggccgatgtccgtttgatcttcaagaactgtgaaaggtttaatgaagctgattcagaagtagctcaggcagggaaagcagttgcattgtactttgaagataaactcacagagatctactcagacaggaccttcgcacctttgccagagtttgagcaggaagaggatgatggtgaggtaactgaggactctgatgaagactttatacagccccgcagaaaacgcctaaagtcagatgagagaccagtacatataaagtagtaatgaactagtccgtaacttgaaagtatttcgatttcttggctttatatatcttgtggaaaggacgagcgactaacacttgtagcagttta

SEQ ID NO: 725 - DNA, 3485 bp, Homo sapiens
  source 1..3485: mol_type = genomic DNA
accgccaccatggcggaaaacaaaggcggcggcgaggctgagagcggcggcgggggcagcggcagcgcgccggtaactgccggggccgccgggcccgccgcgcaggaggcggagccgcctctcaccgcggtgctggtggaggaggaggaggaggaaggcggcagggccggcgctgagggcggcgcggccgggcccgacgacgggggggtggccgcggcctcctcgggctcggcccaggctgcttcatctcctgcggcctcagtgggcactggagttgccgggggcgcagtatcgacgccggctccagctccagcctcggctcccgctccgggtccctcggcagggccgcctcctggaccgccagcctcgctcctggacacctgcgccgtgtgtcagcagagcttgcagagccggcgtgaggcggagcccaagctgctgccctgtcttcactccttctgcctgcgctgcctgcccgagccggagcgccagctcagcgtgcccatcccggggggcagcaacggcgacatccagcaagttggtgtaatacggtgcccagtatgccgccaagaatgcagacagatagaccttgtggataattattttgtgaaagacacatctgaagctcctagcagttctgatgaaaaatcagaacaggtatgtactagttgtgaagacaatgcaagtgcagttggcttttgtgtagaatgtggagagtggctatgtaagacatgtatcgaagcacatcaaagagtaaaatttactaaagatcacttgatcaggaagaaagaagatgtctcagagtctgttggagcatctggtcaacgccctgttttctgccctgtacacaaacaagaacagttgaaacttttctgtgaaacatgtgatagattgacatgtagagactgtcagctattggaacacaaagaacataggtatcagtttttggaagaagcttttcaaaatcagaagggtgcaattgagaatctactggcgaaacttcttgagaagaagaattatgttcattttgcagctactcaggtgcagaataggataaaagaagtaaatgagactaacaaacgagtagaacaggaaattaaagtggccattttcacccttatcaatgaaattaataagaaaggaaaatctctcttacaacagctagagaatgttacaaaggaaagacagatgaagttactacagcagcagaatgacatcacaggcctttcccggcaggtgaagcatgttatgaacttcacaaattgggcaattgcaagtggcagcagcacagcactactatacagcaagcgactgattactttccagttgcgtcatattttgaaagcacggtgtgatcctgtccctgctgctaatggagcaatacgtttccattgtgatcccaccttctgggcaaagaatgtagtcaatttaggtaatctagtaatagagagtaaaccagctcctggttatactcctaatgttgtagttgggcaagttcctccagggacaaaccacattagtaaaacccctggacagattaacttagcacagcttcgactccagcacatgcaacaacaagtatatgcacagaaacatcagcagttgcaacagatgaggatgcagcaaccaccagcacctgtaccaactacaacaacaacaacacaacagcatcctagacaagcagcccctcagatgttacaacaacagcctcctcgattgatcagtgtgcaaacaatgcaaagaggcaacatgaactgtggagcttttcaagcccatcagatgagactggctcagaatgctgccagaataccagggatacccaggcacagcggccctcaatattccatgatgcagccacacctccaaagacaacactcaaacccagggcatgctggaccctttcccgtagtatcggtacacaacaccacaatcaacccaacgagccctactacagcaactatggcaaatgcaaaccgaggtcccaccagcccatctgttacagcaatagagctaatcccctcagttaccaatccagaaaaccttccatcgctgccagatattccacccatacagttggaagatgctggctcaagtagtttagataatctactaagtagatacatctcaggcagtcacctacccccacagcctacaagcaccatgaatccttctccaggtccctctgccctttctccgggatcatcaggtttatccaattctcacacacctgtgagacccccaagtacttctagtactggcagtcgaggcagctgtgggtcatcaggaagaactgctgagaagacaagtcttagtttcaaatctgatcaggtgaaggtcaagcaagaacctgggactgaagatgaaatatgtagcttttcaggaggtgtaaaacaagaaaaaacagaggatggcaggaggagtgcttgcatgttgagcagtcctgagagtagcttgacaccacctctctcaaccaacctgcatctagaaagtgaattggatgcattggcaagcctggaaaaccatgtgaaaattgaacctgcagatatgaatgaaagctgcaaacagtcagggctcagcagccttgttaatggaaagtccccaattcgaagcctcatgcacaggtcggcaaggattggaggagatggcaacaataaagatgatgacccaaatgaagactggtgtgctgtctgccaaaacggaggagatctcttgtgctgcgaaaaatgtccaaaggtctttcatctaacttgtcatgttccaacactacttagctttccaagtggggactggatatgcacattttgtagagatattggaaagccagaagttgaatatgattgtgataatttgcaacatagtaagaaggggaaaactgcgcaggggttaagccccgtggaccaaaggaaatgtgaacgtcttctgctttacctctattgccatgaattaagtattgaattccaggagcctgttcctgcttcgataccaaactactataaaattataaagaaaccaatggatttatccaccgtgaaaaagaagcttcagaaaaaacattcccaacactaccaaatcccggatgactttgtggccgatgtccgtttgatcttcaagaactgtgaaaggtttaatgaaatgatgaaagttgttcaagtttatgcagacacacaagagattaatttgaaggctgattcagaagtagctcaggcagggaaagcagttgcattgtactttgaagataaactcacagagatctactcagacaggaccttcgcacctttgccagagtttgagcaggaagaggatgatggtgaggtaactgaggactctgatgaagactttatacagccccgcagaaaacgcctaaagtcagatgagagaccagtacatataaagtagtaatgaactagtccgtaacttgaaagtatttcgatttcttggctttatatatcttgtggaaaggacgacctgaaatacctgctgaggaagtc

SEQ ID NO: 726 - DNA, 770 bp, Homo sapiens
  source 1..770: mol_type = genomic DNA
accgccaccatgagctcctacgtagccaattcattctataagcagagccccaatatccctgcctataacatgcaaacttgtgggaactatggatcggcctcagaggtgcaggcatccaggtactgctacggcggattggacttaagcatcactttcccaccgcctgcgccttccaactctctccacggggtagacatggctgccaacccccgggctcaccccgaccgccccgcctgcagcgccgcggccgctccgggacacgctccgggcagagacgaagcggctcctctgaaccccgggatgtacagtcagaaggcggctcgcccggcgctggaggagcgagctaagagcagtggggagatcaaagaggagcaggcgcagacagggcagcccgccggactgagccagccaccggccccgccacagatttacccgtggatgaccaaactgcacatgagccacgagacggacggcaagcggtcccgaaccagttacacgcgctaccagactctggaactcgagaaagaattccactttaaccgctacctcactcgccgcaggcgcatagagatcgccaacaacttgtgtctcaatgagagacagatcaagatctggttccagaaccgcaggatgaagtggaagaaagattccaaaatgaaaagcaaagaggctctttagtaatgaactagtccgtaacttgaaagtatttcgatttcttggctttatatatcttgtggaaaggacgagatgtgcccgagggatacgccgtc

SEQ ID NO: 727 - DNA, 896 bp, Homo sapiens
  source 1..896: mol_type = genomic DNA
accgccaccatgatcatgagctcgtatttgatggactctaactacatcgatccgaaatttcctccatgcgaagaatattcgcaaaatagctacatccctgaacacagtccggaatattacggccggaccagggaatcgggattccagcatcaccaccaggagctgtacccaccaccgcctccgcgccctagctaccctgagcgccagtatagctgcaccagtctccaggggcccggcaattcgcgaggccacgggccggcccaggcgggccaccaccaccccgagaaatcacagtcgctctgcgagccggcgcctctctcaggcgcctccgcctccccgtccccagccccgccagcctgcagccagccagcccccgaccatccctccagcgccgccagcaagcaacccatagtctacccatggatgaaaaaaattcacgttagcacggtgaaccccaattataacggaggggaacccaagcgctcgaggacagcctatacccggcagcaagtcctggaattagagaaagagtttcattacaaccgctacctgacccgaaggagaaggatcgagatcgcccactcgctgtgcctctctgagaggcagatcaaaatctggttccaaaaccgtcgcatgaaatggaagaaggaccaccgactccccaacaccaaagtcaggtcagcacccccggccggcgctgcgcccagcaccctttcggcagctaccccgggtacttctgaagaccactcccagagcgccacgccgccggagcagcaacgggcagaggacattaccaggttatagtaatgaactagtccgtaacttgaaagtatttcgatttcttggctttatatatcttgtggaaaggacgaaatgcgtgatagaaccgatactgg

SEQ ID NO: 728 - DNA, 563 bp, Homo sapiens
  source 1..563: mol_type = genomic DNA
accgccaccatgctctcaaactgcagacaaaacaccttaggacataacacacagacctcaatcgctcaggattttagttctgagcagggcaggactgcgccccaggaccagaaagccagtatccagatttacccctggatgcagcgaatgaattcgcacagtggggtcggctacggagcggaccggaggcgcggccgccagatctactcgcggtaccagaccctggaactggagaaggaatttcacttcaatcgctacctaacgcggcgccggcgcatcgagatcgccaacgcgctttgcctgaccgagcgacagatcaaaatctggttccagaaccgccggatgaagtggaaaaaagaatctaatctcacatccactctctcggggggcggcggaggggccaccgccgacagcctgggcggaaaagaggaaaagcgggaagagacagaagaggagaagcagaaagagtagtaatgaactagtccgtaacttgaaagtatttcgatttcttggctttatatatcttgtggaaaggacgaaatgtgtacctggatccactcgct

SEQ ID NO: 729 - DNA, 809 bp, Homo sapiens
  source 1..809: mol_type = genomic DNA
accgccaccatgaattcctacttcactaacccttccttatcctgccacctcgccgggggccaggacgtcctccccaacgtcgccctcaattccaccgcctatgatccagtgaggcatttctcgacctatggagcggccgttgcccagaaccggatctactcgactcccttttattcgccacaggagaatgtcgtgttcagttccagccgggggccgtatgactatggatctaattccttttaccaggagaaagacatgctctcaaactgcagacaaaacaccttaggacataacacacagacctcaatcgctcaggattttagttctgagcagggcaggactgcgccccaggaccagaaagccagtatccagatttacccctggatgcagcgaatgaattcgcacagtggggtcggctacggagcggaccggaggcgcggccgccagatctactcgcggtaccagaccctggaactggagaaggaatttcacttcaatcgctacctaacgcggcgccggcgcatcgagatcgccaacgcgctttgcctgaccgagcgacagatcaaaatctggttccagaaccgccggatgaagtggaaaaaagaatctaatctcacatccactctctcggggggcggcggaggggccaccgccgacagcctgggcggaaaagaggaaaagcgggaagagacagaagaggagaagcagaaagagtagtaatgaactagtccgtaacttgaaagtatttcgatttcttggctttatatatcttgtggaaaggacgagcatatacgccttatcgaatgtgt

SEQ ID NO: 730 - DNA, 374 bp, Homo sapiens
  source 1..374: mol_type = genomic DNA
accgccaccatgaccaaaataaaggcagatcccgacgggcccgaggctcaggcggaggcgtgttccggggagcgcacctaccaggagctgctggtcaaccagaaccccatcgcgcagcccctggcttctcgccgcctcacgcggaagctctacaaatgcatcaagaaagcggtgaagcagaagcagattcggcgcggggtgaaagaggttcagaaatttgtcaacaaaggagaaaaagggacctgggtgcagccgcaggctccaagcgccccacctgtgtagtaatgaactagtccgtaacttgaaagtatttcgatttcttggctttatatatcttgtggaaaggacgatcagaacgcattgtaacgcaaggc

SEQ ID NO: 731 - DNA, 1046 bp, Homo sapiens
  source 1..1046: mol_type = genomic DNA
accgccaccatgcctggctttacgtgctgcgtgccaggctgctacaacaactcgcaccgggacaaggcgctgcacttctacacgtttccaaaggacgctgagttgcggcgcctctggctcaagaacgtgtcgcgtgccggcgtcagtgggtgcttctccaccttccagcccaccacaggccaccgtctctgcagcgttcacttccagggcggccgcaagacctacacggtacgcgtccccaccatcttcccgctgcgcggcgtcaatgagcgcaaagtagcgcgcagacccgctggggccgcggccgcccgccgcaggcagcagcagcaacagcagcagcagcagcaacagcagcaacagcagcagcagcagcaacagcagcagcagcagcagcagcagcagcagtcctcaccctctgcctccactgcccagactgcccagctgcagccgaacctggtatctgcttccgcggccgtgcttctcacccttcaggccactgtagacagcagtcaggctccgggatccgtacagccggcgcccatcactcccactggagaagacgtgaagcccatcgatctcacagtgcaagtggagtttgcagccgcagagggcgcagccgctgcggccgccgcgtcggagttacaggctgctaccgcagggctggaggctgccgagtgccctatgggcccccagttggtggtggtaggggaagagggcttccctgatactggctccgaccattcgtactccttgtcgtcaggcaccacggaggaggagctcctgcgcaagctgaatgagcagcgggacatcctggctctgatggaagtgaagatgaaagagatgaaaggcagcattcgccacctgcgtctcactgaggccaagctgcgcgaagaactgcgtgagaaggatcggctgcttgccatggctgtcatccgcaagaagcacggaatgtagtaatgaactagtccgtaacttgaaagtatttcgatttcttggctttatatatcttgtggaaaggacgagggccacatttacccgcaatgctc

SEQ ID NO: 732 - DNA, 1148 bp, Homo sapiens
  source 1..1148: mol_type = genomic DNA
accgccaccatggccagtagggaagatgagctgaggaactgtgtggtatgtggggaccaagccacaggctaccactttaatgcgctgacttgtgagggctgcaagggtttcttcaggagaacagtcagcaaaagcattggtcccacctgcccctttgctggaagctgtgaagtcagcaagactcagaggcgccactgcccagcctgcaggttgcagaagtgcttagatgctggcatgaggaaagacatgatactgtcggcagaagccctggcattgcggcgagcaaagcaggcccagcggcgggcacagcaaacacctgtgcaactgagtaaggagcaagaagagctgatccggacactcctgggggcccacacccgccacatgggcaccatgtttgaacagtttgtgcagtttaggcctccagctcatctgttcatccatcaccagcccttgcccaccctggcccctgtgctgcctctggtcacacacttcgcagacatcaacactttcatggtactgcaagtcatcaagtttactaaggacctgcccgtcttccgttccctgcccattgaagaccagatctcccttctcaagggagcagctgtggaaatctgtcacatcgtactcaataccactttctgtctccaaacacaaaacttcctctgcgggcctcttcgctacacaattgaagatggagcccgtgtggggttccaggtagagtttttggagttgctctttcacttccatggaacactacgaaaactgcagctccaagagcctgagtatgtgctcttggctgccatggccctcttctctcctgaccgacctggagttacccagagagatgagattgatcagctgcaagaggagatggcactgactctgcaaagctacatcaagggccagcagcgaaggccccgggatcggtttctgtatgcgaagttgctaggcctgctggctgagctccggagcattaatgaggcctacgggtaccaaatccagcacatccagggcctgtctgccatgatgccgctgctccaggagatctgcagctagtaatgaactagtccgtaacttgaaagtatttcgatttcttggctttatatatcttgtggaaaggacgatcctaaagaggttgagtattggtc

SEQ ID NO: 733 - DNA, 1124 bp, Homo sapiens
  source 1..1124: mol_type = genomic DNA
accgccaccatggccagtagggaagatgagctgaggaactgtgtggtatgtggggaccaagccacaggctaccactttaatgcgctgacttgtgagggctgcaagggtttcttcaggagaacagtcagcaaaagcattggtcccacctgcccctttgctggaagctgtgaagtcagcaagactcagaggcgccactgcccagcctgcaggttgcagaagtgcttagatgctggcatgaggaaagacatgatactgtcggcagaagccctggcattgcggcgagcaaagcaggcccagcggcgggcacagcaaacacctgtgcaactgagtaaggagcaagaagagctgatccggacactcctgggggcccacacccgccacatgggcaccatgtttgaacagtttgtgcagtttaggcctccagctcatctgttcatccatcaccagcccttgcccaccctggcccctgtgctgcctctggtcacacacttcgcagacatcaacactttcatggtactgcaagtcatcaagtttactaaggacctgcccgtcttccgttccctgcccattgaagaccagatctcccttctcaagggagcagctgtggaaatctgtcacatcgtactcaataccactttctgtctccaaacacaaaacttcctctgcgggcctcttcgctacacaattgaagatggagcccgtgtggggttccaggtagagtttttggagttgctctttcacttccatggaacactacgaaaactgcagctccaagagcctgagtatgtgctcttggctgccatggccctcttctctcctgctccctatcttacagaccgacctggagttacccagagagatgagattgatcagctgcaagaggagatggcactgactctgcaaagctacatcaagggccagcagcgaaggccccgggatcgctcacctggaacaccctggatacactggagtgggaaaatgctgggaccaaagattgggccgggttcaaagggagcccagtggttgcaatagtaatgaactagtccgtaacttgaaagtatttcgatttcttggctttatatatcttgtggaaaggacgatcagcagatattaaatagatacta

SEQ ID NO: 734 - DNA, 1031 bp, Homo sapiens
  source 1..1031: mol_type = genomic DNA
accgccaccatggccagtagggaagatgagctgaggaactgtgtggtatgtggggaccaagccacaggctaccactttaatgcgctgacttgtgagggctgcaagggtttcttcaggagaacagtcagcaaaagcattggtcccacctgcccctttgctggaagctgtgaagtcagcaagactcagaggcgccactgcccagcctgcaggttgcagaagtgcttagatgctggcatgaggaaagacatgatactgtcggcagaagccctggcattgcggcgagcaaagcaggcccagcggcgggcacagcaaacacctgtgcaactgagtaaggagcaagaagagctgatccggacactcctgggggcccacacccgccacatgggcaccatgtttgaacagtttgtgcagtttaggcctccagctcatctgttcatccatcaccagcccttgcccaccctggcccctgtgctgcctctggtcacacacttcgcagacatcaacactttcatggtactgcaagtcatcaagtttactaaggacctgcccgtcttccgttccctgcccattgaagaccagatctcccttctcaagggagcagctgtggaaatctgtcacatcgtactcaataccactttctgtctccaaacacaaaacttcctctgcgggcctcttcgctacacaattgaagatggagcccgtgaccgacctggagttacccagagagatgagattgatcagctgcaagaggagatggcactgactctgcaaagctacatcaagggccagcagcgaaggccccgggatcggtttctgtatgcgaagttgctaggcctgctggctgagctccggagcattaatgaggcctacgggtaccaaatccagcacatccagggcctgtctgccatgatgccgctgctccaggagatctgcagctagtaatgaactagtccgtaacttgaaagtatttcgatttcttggctttatatatcttgtggaaaggacgaagggcaaactaagagggcacgacc

SEQ ID NO: 735 - DNA, 1046 bp, Homo sapiens
  source 1..1046: mol_type = genomic DNA
accgccaccatggccagtagggaagatgagctgaggaactgtgtggtatgtggggaccaagccacaggctaccactttaatgcgctgacttgtgagggctgcaagggtttcttcaggagaacagtcagcaaaagcattggtcccacctgcccctttgctggaagctgtgaagtcagcaagactcagaggcgccactgcccagcctgcaggttgcagaagtgcttagatgctggcatgaggaaagacatgatactgtcggcagaagccctggcattgcggcgagcaaagcaggcccagcggcgggcacagcaaacacctgtgcaactgagtaaggagcaagaagagctgatccggacactcctgggggcccacacccgccacatgggcaccatgtttgaacagtttgtgcagtttaggcctccagctcatctgttcatccatcaccagcccttgcccaccctggcccctgtgctgcctctggtcacacacttcgcagacatcaacactttcatggtactgcaagtcatcaagtttactaaggacctgcccgtcttccgttccctgcccattgaagaccagatctcccttctcaagggagcagctgtggaaatctgtcacatcgtactcaataccactttctgtctccaaacacaaaacttcctctgcgggcctcttcgctacacaattgaagatggagcccgtgctccctatcttacagaccgacctggagttacccagagagatgagattgatcagctgcaagaggagatggcactgactctgcaaagctacatcaagggccagcagcgaaggccccgggatcggtttctgtatgcgaagttgctaggcctgctggctgagctccggagcattaatgaggcctacgggtaccaaatccagcacatccagggcctgtctgccatgatgccgctgctccaggagatctgcagctagtaatgaactagtccgtaacttgaaagtatttcgatttcttggctttatatatcttgtggaaaggacgagttccgagggaccacccgtatgac

SEQ ID NO: 736 - DNA, 1022 bp, Homo sapiens
  source 1..1022: mol_type = genomic DNA
accgccaccatgctgcctaagagaagcaggagaacagtcagcaaaagcattggtcccacctgcccctttgctggaagctgtgaagtcagcaagactcagaggcgccactgcccagcctgcaggttgcagaagtgcttagatgctggcatgaggaaagacatgatactgtcggcagaagccctggcattgcggcgagcaaagcaggcccagcggcgggcacagcaaacacctgtgcaactgagtaaggagcaagaagagctgatccggacactcctgggggcccacacccgccacatgggcaccatgtttgaacagtttgtgcagtttaggcctccagctcatctgttcatccatcaccagcccttgcccaccctggcccctgtgctgcctctggtcacacacttcgcagacatcaacactttcatggtactgcaagtcatcaagtttactaaggacctgcccgtcttccgttccctgcccattgaagaccagatctcccttctcaagggagcagctgtggaaatctgtcacatcgtactcaataccactttctgtctccaaacacaaaacttcctctgcgggcctcttcgctacacaattgaagatggagcccgtgtggggttccaggtagagtttttggagttgctctttcacttccatggaacactacgaaaactgcagctccaagagcctgagtatgtgctcttggctgccatggccctcttctctcctgaccgacctggagttacccagagagatgagattgatcagctgcaagaggagatggcactgactctgcaaagctacatcaagggccagcagcgaaggccccgggatcgctcacctggaacaccctggatacactggagtgggaaaatgctgggaccaaagattgggccgggttcaaagggagcccagtggttgcaatagtaatgaactagtccgtaacttgaaagtatttcgatttcttggctttatatatcttgtggaaaggacgacacatgtgggacgtcaacaaatac

SEQ ID NO: 737 - DNA, 1121 bp, Homo sapiens
  source 1..1121: mol_type = genomic DNA
accgccaccatggccagtagggaagatgagctgaggaactgtgtggtatgtggggaccaagccacaggctaccactttaatgcgctgacttgtgagggctgcaagggtttcttcaggagaacagtcagcaaaagcattggtcccacctgcccctttgctggaagctgtgaagtcagcaagactcagaggcgccactgcccagcctgcaggttgcagaagtgcttagatgctggcatgaggaaagacatgatactgtcggcagaagccctggcattgcggcgagcaaagcaggcccagcggcgggcacagcaaacacctgtgcaactgagtaaggagcaagaagagctgatccggacactcctgggggcccacacccgccacatgggcaccatgtttgaacagtttgtgcagtttaggcctccagctcatctgttcatccatcaccagcccttgcccaccctggcccctgtgctgcctctggtcacacacttcgcagacatcaacactttcatggtactgcaagtcatcaagtttactaaggacctgcccgtcttccgttccctgcccattgaagaccagatctcccttctcaagggagcagctgtggaaatctgtcacatcgtactcaataccactttctgtctccaaacacaaaacttcctctgcgggcctcttcgctacacaattgaagatggagcccgtgtatctcccacagtggggttccaggtagagtttttggagttgctctttcacttccatggaacactacgaaaactgcagctccaagagcctgagtatgtgctcttggctgccatggccctcttctctcctgaccgacctggagttacccagagagatgagattgatcagctgcaagaggagatggcactgactctgcaaagctacatcaagggccagcagcgaaggccccgggatcgctcacctggaacaccctggatacactggagtgggaaaatgctgggaccaaagattgggccgggttcaaagggagcccagtggttgcaatagtaatgaactagtccgtaacttgaaagtatttcgatttcttggctttatatatcttgtggaaaggacgaaattatccataggtctatgagctt

SEQ ID NO: 738 - DNA, 905 bp, Homo sapiens
  source 1..905: mol_type = genomic DNA
accgccaccatgctgcctaagagaagcaggagaacagtcagcaaaagcattggtcccacctgcccctttgctggaagctgtgaagtcagcaagactcagaggcgccactgcccagcctgcaggttgcagaagtgcttagatgctggcatgaggaaagacatgatactgtcggcagaagccctggcattgcggcgagcaaagcaggcccagcggcgggcacagcaaacacctgtgcaactgagtaaggagcaagaagagctgatccggacactcctgggggcccacacccgccacatgggcaccatgtttgaacagtttgtgcagtttaggcctccagctcatctgttcatccatcaccagcccttgcccaccctggcccctgtgctgcctctggtcacacacttcgcagacatcaacactttcatggtactgcaagtcatcaagtttactaaggacctgcccgtcttccgttccctgcccattgaagaccagatctcccttctcaagggagcagctgtggaaatctgtcacatcgtactcaataccactttctgtctccaaacacaaaacttcctctgcgggcctcttcgctacacaattgaagatggagcccgtgaccgacctggagttacccagagagatgagattgatcagctgcaagaggagatggcactgactctgcaaagctacatcaagggccagcagcgaaggccccgggatcgctcacctggaacaccctggatacactggagtgggaaaatgctgggaccaaagattgggccgggttcaaagggagcccagtggttgcaatagtaatgaactagtccgtaacttgaaagtatttcgatttcttggctttatatatcttgtggaaaggacgaacgcgctagtctcaatggagaggg

SEQ ID NO: 739 - DNA, 1037 bp, Homo sapiens
  source 1..1037: mol_type = genomic DNA
accgccaccatgctgcctaagagaagcaggagaacagtcagcaaaagcattggtcccacctgcccctttgctggaagctgtgaagtcagcaagactcagaggcgccactgcccagcctgcaggttgcagaagtgcttagatgctggcatgaggaaagacatgatactgtcggcagaagccctggcattgcggcgagcaaagcaggcccagcggcgggcacagcaaacacctgtgcaactgagtaaggagcaagaagagctgatccggacactcctgggggcccacacccgccacatgggcaccatgtttgaacagtttgtgcagtttaggcctccagctcatctgttcatccatcaccagcccttgcccaccctggcccctgtgctgcctctggtcacacacttcgcagacatcaacactttcatggtactgcaagtcatcaagtttactaaggacctgcccgtcttccgttccctgcccattgaagaccagatctcccttctcaagggagcagctgtggaaatctgtcacatcgtactcaataccactttctgtctccaaacacaaaacttcctctgcgggcctcttcgctacacaattgaagatggagcccgtgtggggttccaggtagagtttttggagttgctctttcacttccatggaacactacgaaaactgcagctccaagagcctgagtatgtgctcttggctgccatggccctcttctctcctgctccctatcttacagaccgacctggagttacccagagagatgagattgatcagctgcaagaggagatggcactgactctgcaaagctacatcaagggccagcagcgaaggccccgggatcgctcacctggaacaccctggatacactggagtgggaaaatgctgggaccaaagattgggccgggttcaaagggagcccagtggttgcaatagtaatgaactagtccgtaacttgaaagtatttcgatttcttggctttatatatcttgtggaaaggacgatcaagggacaagcctgtaccggga

SEQ ID NO: 740 - DNA, 1049 bp, Homo sapiens
  source 1..1049: mol_type = genomic DNA
accgccaccatgctgcctaagagaagcaggagaacagtcagcaaaagcattggtcccacctgcccctttgctggaagctgtgaagtcagcaagactcagaggcgccactgcccagcctgcaggttgcagaagtgcttagatgctggcatgaggaaagacatgatactgtcggcagaagccctggcattgcggcgagcaaagcaggcccagcggcgggcacagcaaacacctgtgcaactgagtaaggagcaagaagagctgatccggacactcctgggggcccacacccgccacatgggcaccatgtttgaacagtttgtgcagtttaggcctccagctcatctgttcatccatcaccagcccttgcccaccctggcccctgtgctgcctctggtcacacacttcgcagacatcaacactttcatggtactgcaagtcatcaagtttactaaggacctgcccgtcttccgttccctgcccattgaagaccagatctcccttctcaagggagcagctgtggaaatctgtcacatcgtactcaataccactttctgtctccaaacacaaaacttcctctgcgggcctcttcgctacacaattgaagatggagcccgtgtatctcccacagtggggttccaggtagagtttttggagttgctctttcacttccatggaacactacgaaaactgcagctccaagagcctgagtatgtgctcttggctgccatggccctcttctctcctgctccctatcttacagaccgacctggagttacccagagagatgagattgatcagctgcaagaggagatggcactgactctgcaaagctacatcaagggccagcagcgaaggccccgggatcgctcacctggaacaccctggatacactggagtgggaaaatgctgggaccaaagattgggccgggttcaaagggagcccagtggttgcaatagtaatgaactagtccgtaacttgaaagtatttcgatttcttggctttatatatcttgtggaaaggacgaaattggagcaggccgcactgttac

SEQ ID NO: 741 - DNA, 1175 bp, Homo sapiens
  source 1..1175: mol_type = genomic DNA
accgccaccatggccagtagggaagatgagctgaggaactgtgtggtatgtggggaccaagccacaggctaccactttaatgcgctgacttgtgagggctgcaagggtttcttcaggagaacagtcagcaaaagcattggtcccacctgcccctttgctggaagctgtgaagtcagcaagactcagaggcgccactgcccagcctgcaggttgcagaagtgcttagatgctggcatgaggaaagacatgatactgtcggcagaagccctggcattgcggcgagcaaagcaggcccagcggcgggcacagcaaacacctgtgcaactgagtaaggagcaagaagagctgatccggacactcctgggggcccacacccgccacatgggcaccatgtttgaacagtttgtgcagtttaggcctccagctcatctgttcatccatcaccagcccttgcccaccctggcccctgtgctgcctctggtcacacacttcgcagacatcaacactttcatggtactgcaagtcatcaagtttactaaggacctgcccgtcttccgttccctgcccattgaagaccagatctcccttctcaagggagcagctgtggaaatctgtcacatcgtactcaataccactttctgtctccaaacacaaaacttcctctgcgggcctcttcgctacacaattgaagatggagcccgtgtatctcccacagtggggttccaggtagagtttttggagttgctctttcacttccatggaacactacgaaaactgcagctccaagagcctgagtatgtgctcttggctgccatggccctcttctctcctgctccctatcttacagaccgacctggagttacccagagagatgagattgatcagctgcaagaggagatggcactgactctgcaaagctacatcaagggccagcagcgaaggccccgggatcggtttctgtatgcgaagttgctaggcctgctggctgagctccggagcattaatgaggcctacgggtaccaaatccagcacatccagggcctgtctgccatgatgccgctgctccaggagatctgcagctagtaatgaactagtccgtaacttgaaagtatttcgatttcttggctttatatatcttgtggaaaggacgagattgtctacggctaacggttact

SEQ ID NO: 742 - DNA, 944 bp, Homo sapiens
  source 1..944: mol_type = genomic DNA
accgccaccatgctgcctaagagaagcaggagaacagtcagcaaaagcattggtcccacctgcccctttgctggaagctgtgaagtcagcaagactcagaggcgccactgcccagcctgcaggttgcagaagtgcttagatgctggcatgaggaaagacatgatactgtcggcagaagccctggcattgcggcgagcaaagcaggcccagcggcgggcacagcaaacacctgtgcaactgagtaaggagcaagaagagctgatccggacactcctgggggcccacacccgccacatgggcaccatgtttgaacagtttgtgcagtttaggcctccagctcatctgttcatccatcaccagcccttgcccaccctggcccctgtgctgcctctggtcacacacttcgcagacatcaacactttcatggtactgcaagtcatcaagtttactaaggacctgcccgtcttccgttccctgcccattgaagaccagatctcccttctcaagggagcagctgtggaaatctgtcacatcgtactcaataccactttctgtctccaaacacaaaacttcctctgcgggcctcttcgctacacaattgaagatggagcccgtgaccgacctggagttacccagagagatgagattgatcagctgcaagaggagatggcactgactctgcaaagctacatcaagggccagcagcgaaggccccgggatcggtttctgtatgcgaagttgctaggcctgctggctgagctccggagcattaatgaggcctacgggtaccaaatccagcacatccagggcctgtctgccatgatgccgctgctccaggagatctgcagctagtaatgaactagtccgtaacttgaaagtatttcgatttcttggctttatatatcttgtggaaaggacgatcctacgtgactaacgtccgtaca

SEQ ID NO: 743 - DNA, 1061 bp, Homo sapiens
  source 1..1061: mol_type = genomic DNA
accgccaccatgctgcctaagagaagcaggagaacagtcagcaaaagcattggtcccacctgcccctttgctggaagctgtgaagtcagcaagactcagaggcgccactgcccagcctgcaggttgcagaagtgcttagatgctggcatgaggaaagacatgatactgtcggcagaagccctggcattgcggcgagcaaagcaggcccagcggcgggcacagcaaacacctgtgcaactgagtaaggagcaagaagagctgatccggacactcctgggggcccacacccgccacatgggcaccatgtttgaacagtttgtgcagtttaggcctccagctcatctgttcatccatcaccagcccttgcccaccctggcccctgtgctgcctctggtcacacacttcgcagacatcaacactttcatggtactgcaagtcatcaagtttactaaggacctgcccgtcttccgttccctgcccattgaagaccagatctcccttctcaagggagcagctgtggaaatctgtcacatcgtactcaataccactttctgtctccaaacacaaaacttcctctgcgggcctcttcgctacacaattgaagatggagcccgtgtggggttccaggtagagtttttggagttgctctttcacttccatggaacactacgaaaactgcagctccaagagcctgagtatgtgctcttggctgccatggccctcttctctcctgaccgacctggagttacccagagagatgagattgatcagctgcaagaggagatggcactgactctgcaaagctacatcaagggccagcagcgaaggccccgggatcggtttctgtatgcgaagttgctaggcctgctggctgagctccggagcattaatgaggcctacgggtaccaaatccagcacatccagggcctgtctgccatgatgccgctgctccaggagatctgcagctagtaatgaactagtccgtaacttgaaagtatttcgatttcttggctttatatatcttgtggaaaggacgactgagaatacgtcatcttcagcac

SEQ ID NO: 744 - DNA, 1076 bp, Homo sapiens
  source 1..1076: mol_type = genomic DNA
accgccaccatgctgcctaagagaagcaggagaacagtcagcaaaagcattggtcccacctgcccctttgctggaagctgtgaagtcagcaagactcagaggcgccactgcccagcctgcaggttgcagaagtgcttagatgctggcatgaggaaagacatgatactgtcggcagaagccctggcattgcggcgagcaaagcaggcccagcggcgggcacagcaaacacctgtgcaactgagtaaggagcaagaagagctgatccggacactcctgggggcccacacccgccacatgggcaccatgtttgaacagtttgtgcagtttaggcctccagctcatctgttcatccatcaccagcccttgcccaccctggcccctgtgctgcctctggtcacacacttcgcagacatcaacactttcatggtactgcaagtcatcaagtttactaaggacctgcccgtcttccgttccctgcccattgaagaccagatctcccttctcaagggagcagctgtggaaatctgtcacatcgtactcaataccactttctgtctccaaacacaaaacttcctctgcgggcctcttcgctacacaattgaagatggagcccgtgtggggttccaggtagagtttttggagttgctctttcacttccatggaacactacgaaaactgcagctccaagagcctgagtatgtgctcttggctgccatggccctcttctctcctgctccctatcttacagaccgacctggagttacccagagagatgagattgatcagctgcaagaggagatggcactgactctgcaaagctacatcaagggccagcagcgaaggccccgggatcggtttctgtatgcgaagttgctaggcctgctggctgagctccggagcattaatgaggcctacgggtaccaaatccagcacatccagggcctgtctgccatgatgccgctgctccaggagatctgcagctagtaatgaactagtccgtaacttgaaagtatttcgatttcttggctttatatatcttgtggaaaggacgaaccacgttcgatgagtaccgttac

SEQ ID NO: 745 - DNA, 992 bp, Homo sapiens
  source 1..992: mol_type = genomic DNA
accgccaccatggccagtagggaagatgagctgaggaactgtgtggtatgtggggaccaagccacaggctaccactttaatgcgctgacttgtgagggctgcaagggtttcttcaggagaacagtcagcaaaagcattggtcccacctgcccctttgctggaagctgtgaagtcagcaagactcagaggcgccactgcccagcctgcaggttgcagaagtgcttagatgctggcatgaggaaagacatgatactgtcggcagaagccctggcattgcggcgagcaaagcaggcccagcggcgggcacagcaaacacctgtgcaactgagtaaggagcaagaagagctgatccggacactcctgggggcccacacccgccacatgggcaccatgtttgaacagtttgtgcagtttaggcctccagctcatctgttcatccatcaccagcccttgcccaccctggcccctgtgctgcctctggtcacacacttcgcagacatcaacactttcatggtactgcaagtcatcaagtttactaaggacctgcccgtcttccgttccctgcccattgaagaccagatctcccttctcaagggagcagctgtggaaatctgtcacatcgtactcaataccactttctgtctccaaacacaaaacttcctctgcgggcctcttcgctacacaattgaagatggagcccgtgaccgacctggagttacccagagagatgagattgatcagctgcaagaggagatggcactgactctgcaaagctacatcaagggccagcagcgaaggccccgggatcgctcacctggaacaccctggatacactggagtgggaaaatgctgggaccaaagattgggccgggttcaaagggagcccagtggttgcaatagtaatgaactagtccgtaacttgaaagtatttcgatttcttggctttatatatcttgtggaaaggacgaccgagtggactcataactgtgcaa

SEQ ID NO: 746 - DNA, 6104 bp, Homo sapiens
  source 1..6104: mol_type = genomic DNA
accgccaccatgaaggcggcagacactgtgatcctgtgggcaagaagtaaaaatgaccagctgaggatttcttttcctccaggactgtgttggggtgacaggatgcctgataaggatgacattcggctgctgccgtcagcattgggtgtgaagaagagaaaacgaggacccaagaagcagaaggagaacaagccaggaaaaccccgaaaacgcaagaagcgtgacagtgaggaggaatttggttctgagcgagatgagtaccgggagaagtcagagagtgggggcagtgaatatggaaccggaccgggtcggaaacgaagaaggaagcaccgagaaaaaaaggagaagaagacaaagcggcggaaaaagggggagggagatggggggcaaaagcaagtggaacagaagtcatcagcaactctgcttctgacctggggcctggaggatgtggagcatgtgttctctgaggaggattaccacacgctcaccaactacaaagccttcagccagttcatgaggcccctaattgctaagaagaatcctaagatcccaatgtctaagatgatgaccatccttggggccaaatggagagagttcagtgccaacaaccccttcaaggggtcagcagctgctgtggcggcggcagcggcagcagcagcagcagctgtagctgagcaggtgtcagctgctgtctcgtcggccacccccatagcaccctccggaccccccgcccttccaccaccccctgctgctgatatccagcccccacccatccgaagagccaaaaccaaagagggcaaaggtccaggccataagaggcggagtaagagcccccgagtgcctgatggacgcaagaagcttcggggaaagaaaatggcaccactcaaaataaaactagggcttctgggtggcaagaggaagaaaggaggctcgtatgtttttcagagcgacgaaggtcctgaaccagaggctgaggaatcagacctggacagtggcagtgtccacagtgcctcaggccggcctgatggccctgtccgcaccaagaaactaaagagaggccggccaggaaggaagaagaagaaggtcctgggctgtcctgcagtggccggggaggaggaggttgatggctacgagacggatcaccaggattactgtgaggtgtgccagcagggtggggaaattattctgtgtgacacctgccctcgtgcctaccacctcgtctgccttgatcctgagcttgaccgggctccagagggcaaatggagctgccctcactgtgagaaggagggggtccagtgggaggccaaggaggaagaagaagaatacgaagaggagggagaggaagaaggggagaaggaggaggaggatgatcacatggagtactgccgcgtatgcaaggacggcggggagctcctgtgctgtgacgcgtgcatctcctcctaccacattcattgtctaaaccctcccctgcctgacattcccaatggtgaatggctgtgtccccgatgcacatgccccgtgctgaagggtcgagtgcagaagatcctacattggcggtggggggagccacctgtagcagtgccagcccctcaacaggcagatggaaatccagatgtcccacccccccgtcctcttcaaggcagatcagagcgagagttctttgtcaagtgggtaggactatcctactggcactgctcctgggccaaggagcttcagctggaaatcttccatttggttatgtatcgaaactaccagcggaagaatgacatggatgagcccccacccctggactatggctccggcgaggatgatgggaagagcgacaagcgtaaagtgaaagacccgcactatgctgagatggaggagaagtactatcgttttggcatcaagccagagtggatgaccgtccaccgcatcatcaaccacagtgtggataaaaaggggaattaccactatctagtaaaatggagggacttaccatatgaccagtccacgtgggaggaagatgaaatgaatatccctgaatacgaagaacataagcaaagctactggagacaccgagaactaattatgggggaagaccctgcccagccccgcaagtataagaagaagaagaaggagctacagggtgatgggcctcccagttctcccactaatgatcctaccgtgaaatatgagactcagccacggtttatcacagccactggaggcaccctgcacatgtatcagttggaagggctgaactggctacgcttctcctgggcccagggcactgacaccattctagctgatgagatggggctaggcaagaccatacaaaccatcgtcttcctctactcactctacaaggagggccacacaaaaggtcccttcctggtgagtgccccactctctaccatcattaactgggagcgggagttccagatgtgggcacccaaattctatgtggtgacatacacgggtgacaaggacagccgggccatcattcgtgagaatgaattctcctttgaggacaatgccatcaaagggggcaagaaagcttttaagatgaagagggaggcacaggtgaagttccatgttctcctgacatcgtatgagctgatcaccattgatcaggcagcacttggttccatccgctgggcctgtcttgtggtagatgaggcccatcgactcaagaacaaccagtccaagtttttcagggttctcaatggttacaagatagatcataagttgctgctgacaggaaccccattgcagaataatctggaggagctcttccatctcctgaacttcctcaccccagagagatttaacaacttggagggcttcctggaggagtttgctgacatatccaaagaggaccagatcaagaaactgcatgatttgctggggccacacatgctgcggagactcaaggcagatgtctttaagaacatgccagccaagacagagctcatcgttcgggtggagctaagccccatgcagaagaaatactacaaatacatcctgactcgaaattttgaggccttgaattcacgaggtggtgggaaccaggtgtcgctgcttaatatcatgatggatcttaagaagtgctgcaaccatccatacctttttcccgtggctgctatggagtcccccaaactccccagtggggcttatgagggtggggcacttattaagtcgtctgggaagctcatgctgctccagaagatgctgcgaaagctgaaggagcaaggacaccgagtgctcatcttctcgcagatgaccaaaatgttagacttgcttgaggacttcttagactatgaaggctacaagtatgagcgcatcgatggtggtatcacgggtgccctgaggcaggaggccatcgatcggtttaatgctcctggggcccaacaattctgcttcctcctgtccacccgagctgggggcctgggcatcaatctggccactgctgacactgtcatcatctttgattctgactggaacccccataatgacatccaggcctttagccgggctcatcggattggccaggccaacaaagtgatgatttaccggtttgtgactcgcgcgtcagtggaagagcgaatcacacaagtggccaagagaaagatgatgctgacacacctggttgtgcggcctgggctgggctccaaggcaggctccatgtccaagcaggagcttgacgacattctcaaatttggcactgaagagctattcaaggatgaaaacgagggggagaacaaggaggaggacagcagtgtgattcattatgacaatgaggccatcgctcggctgttggaccggaaccaggatgcaactgaggacactgacgtgcagaacatgaatgagtatctcagctccttcaaggtggcacagtacgtcgtgcgggaagaagacaagattgaggaaattgagcgagagatcatcaagcaggaggagaatgtggaccctgactactgggagaagctgctgaggcatcactatgagcaacagcaggaagacctagcccggaatctaggcaagggcaagcgggttcgcaagcaagttaactacaatgatgctgctcaggaagaccaagacaaccagtcagagtactcggtgggttcagaggaggaggatgaagacttcgatgaacgtcctgaagggcgtagacagtcaaagaggcagctccggaatgagaaagataagccactgcctccactgctggcccgagtcgggggcaacattgaggtgctgggcttcaacacccgtcagcggaaggctttcctcaatgctgtgatgcgctgggggatgccaccacaggatgccttcaccacacagtggctggtgcgggacctgaggggcaagactgagaaggagtttaaggcctatgtgtctttgttcatgcgccatctgtgtgagcctggggcagacggctctgaaacctttgccgatggggtccctcgggagggactgagtcgccagcaggtgttgacccgcattggagtcatgtctctcgtcaaaaagaaggtgcaggagtttgagcacatcaatgggcgttggtcaatgccggaactgatgcctgaccccagcgccgattctaagcgctcctccagagcctcctctcctaccaaaacgtctcccaccactcctgaggcttctgctaccaacagtccctgcacctctaaacctgctactccagctccaagtgagaaaggagaaggcataaggacacctcttgagaaggaggaagctgaaaaccaggaggaaaagccagagaagaacagcagaattggggagaagatggagacagaggctgatgcccccagcccagccccatcacttggggagcggctggagccaaggaagattcctctagaggatgaggtgccaggggtgcctggagagatggagcctgaacctgggtaccgtggggacagagagaagtcagccacagagtcgacgccaggagaaaggggggaggagaagccgttggatggacaggaacacagggagaggccggagggggaaacaggggatttgggcaagagagaagatgtaaaaggtgaccgggagcttcgaccagggcctcgagatgagccacggtccaatgggcgacgagaggaaaagacagagaagccccggttcatgttcaatatcgccgatggtggcttcacagagcttcacacactgtggcagaatgaggaacgggcagctatttcctcggggaaactcaatgagatctggcacagaagacatgactattggcttctggctgggattgtcctccatggctatgcacggtggcaggacatccagaatgatgctcaatttgccattatcaacgagccatttaaaactgaagccaataaggggaactttctggagatgaaaaataagttcctggcccggaggttcaagctcctggagcaggcgctggtgattgaggagcagctgcggcgggcggcctacctgaacctgtcgcaggagccggcgcaccccgccatggccctccacgcccgcttcgccgaggccgagtgcctggccgagagccaccagcacctctccaaggagtcgctggcggggaacaagccggccaacgccgtcctgcacaaggttctgaaccagctggaggagttgctgagcgacatgaaggcggacgtgacccgcctgccagccacgctgtcccgaataccccccatcgcagcccgccttcagatgtccgagcgcagcatcctcagccggctggccagcaagggcacggagcctcaccccacaccggcctacccgccgggtccctacgctacacctccggggtacggggcggccttcagcgccgcacccgtaggggccctggccgccgcaggcgccaattacagccagatgcctgcagggtccttcatcacagccgccaccaacggccctccagtgcttgtgaagaaggagaaggaaatggtgggggcattggtgtcagacgggctggatcggaaggagccccgagccggggaggtgatctgtatagacgactagtaatgaactagtccgtaacttgaaagtatttcgatttcttggctttatatatcttgtggaaaggacgacacggccataattggttcagcgtg

SEQ ID NO: 747 - DNA, 6002 bp, Homo sapiens
  source 1..6002: mol_type = genomic DNA
accgccaccatgaaggcggcagacactgtgatcctgtgggcaagaagtaaaaatgaccagctgaggatttcttttcctccaggactgtgttggggtgacaggatgcctgataaggatgacattcggctgctgccgtcagcattgggtgtgaagaagagaaaacgaggacccaagaagcagaaggagaacaagccaggaaaaccccgaaaacgcaagaagcgtgacagtgaggaggaatttggttctgagcgagatgagtaccgggagaagtcagagagtgggggcagtgaatatggaaccggaccgggtcggaaacgaagaaggaagcaccgagaaaaaaaggagaagaagacaaagcggcggaaaaagggggagggagatggggggcaaaagcaagtggaacagaagtcatcagcaactctgcttctgacctggggcctggaggatgtggagcatgtgttctctgaggaggattaccacacgctcaccaactacaaagccttcagccagttcatgaggcccctaattgctaagaagaatcctaagatcccaatgtctaagatgatgaccatccttggggccaaatggagagagttcagtgccaacaaccccttcaaggggtcagcagctgctgtggcggcggcagcggcagcagcagcagcagctgtagctgagcaggtgtcagctgctgtctcgtcggccacccccatagcaccctccggaccccccgcccttccaccaccccctgctgctgatatccagcccccacccatccgaagagccaaaaccaaagagggcaaaggtccaggccataagaggcggagtaagagcccccgagtgcctgatggacgcaagaagcttcggggaaagaaaatggcaccactcaaaataaaactagggcttctgggtggcaagaggaagaaaggaggctcgtatgtttttcagagcgacgaaggtcctgaaccagaggctgaggaatcagacctggacagtggcagtgtccacagtgcctcaggccggcctgatggccctgtccgcaccaagaaactaaagagaggccggccaggaaggaagaagaagaaggtcctgggctgtcctgcagtggccggggaggaggaggttgatggctacgagacggatcaccaggattactgtgaggtgtgccagcagggtggggaaattattctgtgtgacacctgccctcgtgcctaccacctcgtctgccttgatcctgagcttgaccgggctccagagggcaaatggagctgccctcactgtgagaaggagggggtccagtgggaggccaaggaggaagaagaagaatacgaagaggagggagaggaagaaggggagaaggaggaggaggatgatcacatggagtactgccgcgtatgcaaggacggcggggagctcctgtgctgtgacgcgtgcatctcctcctaccacattcattgtctaaaccctcccctgcctgacattcccaatggtgaatggctgtgtccccgatgcacatgccccgtgctgaagggtcgagtgcagaagatcctacattggcggtggggggagccacctgtagcagtgccagcccctcaacaggcagatggaaatccagatgtcccacccccccgtcctcttcaaggcagatcagagcgagagttctttgtcaagtgggtaggactatcctactggcactgctcctgggccaaggagcttcagctggaaatcttccatttggttatgtatcgaaactaccagcggaagaatgacatggatgagcccccacccctggactatggctccggcgaggatgatgggaagagcgacaagcgtaaagtgaaagacccgcactatgctgagatggaggagaagtactatcgttttggcatcaagccagagtggatgaccgtccaccgcatcatcaaccacagtgtggataaaaaggggaattaccactatctagtaaaatggagggacttaccatatgaccagtccacgtgggaggaagatgaaatgaatatccctgaatacgaagaacataagcaaagctactggagacaccgagaactaattatgggggaagaccctgcccagccccgcaagtataagaagaagaagaaggagctacagggtgatgggcctcccagttctcccactaatgatcctaccgtgaaatatgagactcagccacggtttatcacagccactggaggcaccctgcacatgtatcagttggaagggctgaactggctacgcttctcctgggcccagggcactgacaccattctagctgatgagatggggctaggcaagaccatacaaaccatcgtcttcctctactcactctacaaggagggccacacaaaaggtcccttcctggtgagtgccccactctctaccatcattaactgggagcgggagttccagatgtgggcacccaaattctatgtggtgacatacacgggtgacaaggacagccgggccatcattcgtgagaatgaattctcctttgaggacaatgccatcaaagggggcaagaaagcttttaagatgaagagggaggcacaggtgaagttccatgttctcctgacatcgtatgagctgatcaccattgatcaggcagcacttggttccatccgctgggcctgtcttgtggtagatgaggcccatcgactcaagaacaaccagtccaagtttttcagggttctcaatggttacaagatagatcataagttgctgctgacaggaaccccattgcagaataatctggaggagctcttccatctcctgaacttcctcaccccagagagatttaacaacttggagggcttcctggaggagtttgctgacatatccaaagaggaccagatcaagaaactgcatgatttgctggggccacacatgctgcggagactcaaggcagatgtctttaagaacatgccagccaagacagagctcatcgttcgggtggagctaagccccatgcagaagaaatactacaaatacatcctgactcgaaattttgaggccttgaattcacgaggtggtgggaaccaggtgtcgctgcttaatatcatgatggatcttaagaagtgctgcaaccatccatacctttttcccgtggctgctatggagtcccccaaactccccagtggggcttatgagggtggggcacttattaagtcgtctgggaagctcatgctgctccagaagatgctgcgaaagctgaaggagcaaggacaccgagtgctcatcttctcgcagatgaccaaaatgttagacttgcttgaggacttcttagactatgaaggctacaagtatgagcgcatcgatggtggtatcacgggtgccctgaggcaggaggccatcgatcggtttaatgctcctggggcccaacaattctgcttcctcctgtccacccgagctgggggcctgggcatcaatctggccactgctgacactgtcatcatctttgattctgactggaacccccataatgacatccaggcctttagccgggctcatcggattggccaggccaacaaagtgatgatttaccggtttgtgactcgcgcgtcagtggaagagcgaatcacacaagtggccaagagaaagatgatgctgacacacctggttgtgcggcctgggctgggctccaaggcaggctccatgtccaagcaggagcttgacgacattctcaaatttggcactgaagagctattcaaggatgaaaacgagggggagaacaaggaggaggacagcagtgtgattcattatgacaatgaggccatcgctcggctgttggaccggaaccaggatgcaactgaggacactgacgtgcagaacatgaatgagtatctcagctccttcaaggtggcacagtacgtcgtgcgggaagaagacaagattgaggaaattgagcgagagatcatcaagcaggaggagaatgtggaccctgactactgggagaagctgctgaggcatcactatgagcaacagcaggaagacctagcccggaatctaggcaagggcaagcgggttcgcaagcaagttaactacaatgatgctgctcaggaagaccaagacaaccagtcagagtactcggtgggttcagaggaggaggatgaagacttcgatgaacgtcctgaagggcgtagacagtcaaagaggcagctccggaatgagaaagataagccactgcctccactgctggcccgagtcgggggcaacattgaggtgctgggcttcaacacccgtcagcggaaggctttcctcaatgctgtgatgcgctgggggatgccaccacaggatgccttcaccacacagtggctggtgcgggacctgaggggcaagactgagaaggagtttaaggcctatgtgtctttgttcatgcgccatctgtgtgagcctggggcagacggctctgaaacctttgccgatggggtccctcgggagggactgagtcgccagcaggtgttgacccgcattggagtcatgtctctcgtcaaaaagaaggtgcaggagtttgagcacatcaatgggcgttggtcaatgccggaactgatgcctgaccccagcgccgattctaagcgctcctccagagcctcctctcctaccaaaacgtctcccaccactcctgaggcttctgctaccaacagtccctgcacctctaaacctgctactccagctccaagtgagaaaggagaaggcataaggacacctcttgagaaggaggaagctgaaaaccaggaggaaaagccagagaagaacagcagaattggggagaagatggagacagaggctgatgcccccagcccagccccatcacttggggagcggctggagccaaggaagattcctctagaggatgaggtgccaggggtgcctggagagatggagcctgaacctgggtaccgtggggacagagagaagtcagaagatgtaaaaggtgaccgggagcttcgaccagggcctcgagatgagccacggtccaatgggcgacgagaggaaaagacagagaagccccggttcatgttcaatatcgccgatggtggcttcacagagcttcacacactgtggcagaatgaggaacgggcagctatttcctcggggaaactcaatgagatctggcacagaagacatgactattggcttctggctgggattgtcctccatggctatgcacggtggcaggacatccagaatgatgctcaatttgccattatcaacgagccatttaaaactgaagccaataaggggaactttctggagatgaaaaataagttcctggcccggaggttcaagctcctggagcaggcgctggtgattgaggagcagctgcggcgggcggcctacctgaacctgtcgcaggagccggcgcaccccgccatggccctccacgcccgcttcgccgaggccgagtgcctggccgagagccaccagcacctctccaaggagtcgctggcggggaacaagccggccaacgccgtcctgcacaaggttctgaaccagctggaggagttgctgagcgacatgaaggcggacgtgacccgcctgccagccacgctgtcccgaataccccccatcgcagcccgccttcagatgtccgagcgcagcatcctcagccggctggccagcaagggcacggagcctcaccccacaccggcctacccgccgggtccctacgctacacctccggggtacggggcggccttcagcgccgcacccgtaggggccctggccgccgcaggcgccaattacagccagatgcctgcagggtccttcatcacagccgccaccaacggccctccagtgcttgtgaagaaggagaaggaaatggtgggggcattggtgtcagacgggctggatcggaaggagccccgagccggggaggtgatctgtatagacgactagtaatgaactagtccgtaacttgaaagtatttcgatttcttggctttatatatcttgtggaaaggacgagacaatagagacagtttgacagac

(The sequence listing continues in the following parts.)

What is claimed is:

1. A method of differentiating a pluripotent cell population to a target cell comprising overexpressing one or more transcription factors from Table 1 or Table 3 in a pluripotent cell population, and selecting cells expressing one or more target cell markers.

2. The method of claim 1, wherein the target cell is a neural progenitor and selecting cells comprises selecting cells expressing one or more radial glial cell markers.

3. The method of claim 2, wherein the one or more transcription factors are selected from the group consisting of RFX4, NFIB, ASCL1, PAX6, EOMES, FOS, OTX1, NFIC, LHX2, RCOR2, GLI3, NOTCH2, HELLS, BCL11A, HES1, FANCD2, SOX9, FEZF2, and TCF7L2.

4. The method of claim 3, wherein the one or more transcription factors are RFX4, NFIB, ASCL1, PAX6, or a combination thereof.

5. The method of any one of the preceding claims, wherein the one or more radial glial cell markers are selected from Table 2.

6. The method of claim 5, wherein the one or more radial glial cell markers are selected from the group consisting of NES, VIM, SLC1A3, and PAX6.

7. The method of any of the claims 2 to 6, wherein selecting further comprises selecting cells enriched for expression of one or more gene signatures expressed in in vivo radial glia cells.

8. The method of claim 7, wherein selecting cells enriched for expression of one or more gene signatures expressed in in vivo radial glia cells comprises:
a) identifying gene signatures for each TF by identifying differentially expressed genes between cells overexpressing a transcription factor and control cells; and
b) selecting cells having a signature that is enriched in an in vivo radial glia cell type.

9. An isolated neural progenitor cell produced by the method of any one of claims 2 to 8.

10. A therapeutic composition comprising the isolated neural progenitor cell of claim 9.

11. An ex vivo system comprising the isolated neural progenitor cell of claim 9.

12. A method of producing neurons, astrocytes and/or oligodendrocytes, comprising expressing one or more transcription factors from Table 1 in the isolated neural progenitor cell of claim 9 and inducing spontaneous differentiation of the isolated neural progenitor cells.

13. A method of producing neurons, astrocytes and/or oligodendrocytes comprising expressing one or more transcription factors from Table 1 in the isolated neural progenitor cell of claim 9 and inducing directed differentiation of the isolated neural progenitor cells.

14. An isolated neuron, astrocyte, or oligodendrocyte produced according to the method of claim 12 or 13.

15. A therapeutic composition comprising the isolated neuron, astrocyte, or oligodendrocyte of claim 14.

16. An ex vivo system comprising the isolated neurons, astrocytes, and/or oligodendrocytes of claim 14.

17. A non-naturally occurring population of stem cells comprising a reporter gene integrated into an endogenous locus of each stem cell in the population, wherein:
i. the endogenous locus is associated with a marker gene for a cell type of interest;
ii. the reporter gene is under control of the promoter for the marker gene; and
iii. the reporter gene and marker gene are expressed as separate proteins,
whereby the marker gene and reporter gene are co-expressed upon differentiation of the stem cells into the cell type of interest.

18. The non-naturally occurring population of stem cells of claim 17, further comprising a second reporter gene integrated into a second endogenous locus of the stem cell, wherein the locus is associated with a marker gene for a second cell type of interest, and wherein the second cell type of interest is more differentiated than the first cell type of interest.

19. The non-naturally occurring population of stem cells according to claim 17 or 18, wherein the reporter gene and marker gene are separated by a ribosomal skipping site.

20. The non-naturally occurring population of stem cells according to claim 19, wherein the ribosomal skipping site is a P2A sequence.

21. The non-naturally occurring population of stem cells according to any of claims 17 to 20, wherein the reporter gene is a fluorescent protein.

22. The non-naturally occurring population of stem cells according to any of claims 17 to 21, wherein the cell type of interest is a differentiated cell.

23. The non-naturally occurring population of stem cells according to any of claims 17 to 22, wherein the cell type of interest is a neural progenitor or mature neural cell type.

24. The non-naturally occurring population of stem cells according to claim 23, wherein the cell type of interest is a radial glia cell.

25. The non-naturally occurring population of stem cells according to claim 24, wherein the marker gene is selected from Table 2.

26. The non-naturally occurring population of stem cells of claim 25, wherein the marker gene is selected from the group consisting of NES, VIM, SLC1A3, and PAX6.

27. The non-naturally occurring population of stem cells according to claim 23, wherein the cell type of interest is an astrocyte.

28. The non-naturally occurring population of stem cells according to claim 27, wherein the marker gene is selected from the group consisting of ALDH1L1 and GFAP.

29. A pooled transcription factor screening system comprising:
i. a transcription factor library comprising one or more vectors encoding a transcription factor and a barcode identifying said transcription factor; and
ii. a population of pluripotent cells.

30. The system of claim 29, wherein the transcription factors encoded by the vectors are selected from Table 1 and/or Table 3.

31. The system of claim 29 or 30, wherein the population of pluripotent cells are stem cells according to any one of claims 17 to 28.

32. The system of claim 29 or 30, further comprising one or more fluorescent probes configured for detecting one or more target cell marker gene transcripts.

33. A method of screening for transcription factors capable of differentiating pluripotent cells into a cell type of interest, comprising:
a) introducing a transcription factor library comprising one or more vectors to a population of pluripotent cells, wherein each vector encodes:
i. a transcription factor selected from Table 1 and/or Table 3 or an agent capable of modulating said transcription factor, and
ii. a barcode identifying each transcription factor;
b) culturing the cells to allow differentiation of the cells;
c) selecting cells expressing one or more marker genes for the cell of interest; and
d) determining barcodes enriched in cells expressing the one or marker genes, thereby identifying transcription factors capable of differentiating pluripotent cells into a cell of interest.

34. The method of claim 33, wherein the population of pluripotent cells is a population of human embryonic stem cells (hESCs).

35. The method of claim 33 or 34, wherein selecting cells expressing one or more marker genes for the cell of interest comprises Flow-FISH using probes for the one or more marker genes.

36. The method of claim 33 or 34, wherein selecting cells expressing one or more marker genes for the cell of interest comprises single cell RNA-seq.

37. The method of claim 36, wherein selecting cells further comprises comparing single cell RNA-seq expression profiles of cells overexpressing one or more of the transcription factors to control cells to infer pseudotime for each cell, wherein transcription factors that increased pseudotimes direct differentiation.

38. The method of claim 36, wherein selecting cells further comprises grouping one or more of the transcription factors in modules that alter expression of the same gene programs, wherein transcription factors in the same modules are co-functional.

39. The method of claim 33, wherein the one or more populations of pluripotent cells are stem cells according to any of claims 17 to 28.

40. The method of claim 39, wherein selecting cells expressing one or marker genes for the cell of interest comprises detecting the reporter gene.

41. The method of any of claims 33 to 40, wherein each transcription factor is inducible.

42. The method of any of claims 33 to 41, wherein determining barcodes comprises sequencing the DNA barcode or transcript comprising the barcode.

43. The method of any of claims 33 to 42, wherein determining barcodes comprises amplification of barcode sequences.

44. The method of any of claims 41 to 43, wherein the method further comprises:
a) introducing the transcription factor library at a low cell density, such that the cells multiply into small colonies; and
b) inducing expression of the transcription factors or agents encoded by the vectors.

45. The method of any of claims 33 to 44, wherein the method further comprises introducing the vector library at a low MOI, such that most cells receive no more than one vector.

46. The method of any of claims 33 to 44, wherein the method further comprises introducing the vector library at a high MOI, such that most cells receive one or more vectors, whereby specific combinations of transcription factors capable of differentiating pluripotent cells into a cell type of interest are identified.

47. The method of any of claims 33 to 46, wherein the transcription factor library comprises viral vectors.

48. The method of claim 47, wherein the viral vectors are lentivirus, adenovirus or adeno associated virus (AAV) vectors.

49. The method of any of claims 33 to 48, wherein selecting cells comprises FACS.

50. The method of any of claims 33 to 49, wherein the transcription factor library further encodes a protein tag in frame with the transcription factor coding sequence.

51. The method of any of claims 33 to 49, wherein the population of stem cells expresses a CRISPR system and the transcription factor library comprises vectors encoding one or more CRISPR guide sequences targeting one of the transcription factors.

52. The method of claim 51, wherein the guide sequences comprise one or more aptamer sequences specific for binding an adaptor protein and the CRISPR system comprises an enzymatically inactive CRISPR enzyme and the adaptor protein comprising a functional domain.

53. The method of claim 51, wherein the CRISPR system comprises an enzymatically inactive CRISPR enzyme and a functional domain.

54. The method of claim 52 or 53, wherein the functional domain is a transcription activation or repression domain.

55. The method of any of claims 33 to 49, wherein the transcription factor library comprises vectors encoding a shRNA for one of the transcription factors.

56. The method of any of claims 33 to 55, wherein the transcription factors selected are normally expressed by the cell of interest.

57. The method of any of claims 33 to 56, wherein identifying transcription factors further comprises:
a) determining gene signatures for each identified TF, wherein the gene signature comprises differentially expressed genes between cells overexpressing each transcription factor and control cells; and
b) selecting transcription factors inducing a gene signature that is enriched in an in vivo cell type.

58. The method of claim 1, wherein the target cell is a cardiomyocyte, said method comprising overexpressing a transcription factor selected from the group consisting of MESP1, EOMES and ESR1 in a pluripotent cell population, and selecting cells expressing one or more cardiomyocyte markers.

59. The method of claim 58, wherein the transcription factor is EOMES.

60. The method of claim 59, wherein the amino acid sequence of EOMES is SEQ ID NO: 10807 or SEQ ID NO: 10808.

61. The method of any of claims 58 to 60, wherein the transcription factor is induced for about two days.

62. The method of any of claims 58 to 61, wherein the transcription factor is induced when the cell density is about 500,000 cells/ml.

63. The method of any of claims 58 to 62, wherein the one or more cardiomyocyte markers comprises TNNT2.

64. The method of any of claims 58 to 63, wherein selecting further comprises selecting cells enriched for expression of one or more gene signatures expressed in in vivo cardiomyocytes.

65. An isolated cardiomyocyte produced by the method of any one of claims 58 to 64.

66. A therapeutic composition comprising the isolated cardiomyocyte of claim 65.

67. An ex vivo system comprising the isolated cardiomyocyte of claim 65.

68. The method according to any of the preceding claims, wherein the pluripotent cell is an embryonic stem cell (ES) or induced pluripotent stem cell.

69. The method according to claim 68, wherein the stem cell is a human embryonic stem cell (ES).

70. The method according to claim 69, wherein the human embryonic stem cell is selected from the group consisting of HUES66, HUES64, HUES3, HUES8, HUES53, HUES28, HUES49, HUES9, HUES48, HUES45, HUES1, HUES44, HUES6, H1, HUES62, HUES65, H7, HUES13 and HUES63.

71. A stem cell comprising an exogenous nucleotide sequence capable of inducible expression of one or more transcription factors selected from the group consisting of RFX4, NFIB, ASCL1 and PAX6.

72. A stem cell comprising an exogenous nucleotide sequence capable of inducible expression of one or more transcription factors selected from the group consisting of MESP1, EOMES and ESR1.

73. The method of any of claims 2 to 8, further comprising inducing differentiation of the neural progenitors into neurons, astrocytes and/or oligodendrocytes.

74. The method of claim 73, wherein differentiation comprises spontaneous differentiation of the neural progenitors.

75. The method of claim 73, wherein differentiation comprises directed differentiation of the neural progenitors.

76. A method of predicting transcription factor combinations for differentiating a stem cell into a cell of interest comprising determining the average gene expression of one or more genes for two or more stem cells each expressing a single transcription factor and comparing the average expression to a gene signature specific for the cell of interest.

77. The method of claim 76, further comprising differentiating a stem cell into the cell of interest by expressing in the stem cell a double or triple combination of transcription factors whose average gene expression is most similar to a gene signature specific for the cell of interest.

78. A method of differentiating a stem cell into a cell of interest comprising expressing in the stem cell a double or triple combination of transcription factors selected from the clusters in Table 19.
